United States Patent Application Publication US 2018/0126003 A1 - sequence listing, part 29

SEQ ID NO: 47518 - DNA, 5859 bp, Artificial Sequence
  derived and/or modified sequence
atgcctgcgctgggccccgcccttcttcaagccttgtgggcaggctgggtgttgaccctgcaaccacttccacccaccgctttcaccccaaatggaacatatctgcagcacctcgcccgcgacccaacgtctggaactctatacctgggcgctacaaacttcctgttccagctctccccagggctccagttggaggctacagtgtccactggcccagtcctggattcaagggactgccttccacccgtcatgcccgatgagtgcccccaggcccagcccaccaacaatccaaaccaattgctcttggtgtcccctggggctctcgttgtttgtgggtccgtccatcagggcgtgtgcgagcagcgtaggctgggtcagctggagcagctcctactgagacccgaacgcccaggcgacacccagtacgtagcagcaaatgaccctgctgtttctacagttggacttgttgcccaggggctagccggtgaacccctacttttcgtgggccgcggttatacaagcagaggcgtgggggggggcatccctcccattaccacacgcgcactgtggcctcctgaccctcaggccgccttctcctacgaggaaactgcaaagcttgcggtgggccgactctcggaatactcacaccacttcgtgtctgccttcgccagaggcgccagcgcctatttcttgttccttcggcgggacctgcaggcccagtcccgcgccttcagagcctacgtctcccgagtttgccttcgagatcagcattactattcctatgtagaactgcctctggcatgcgaaggtggaagatacgggctaatccaggctgccgccgtcgccacaagcagagaggtggcccatggtgaggtgctgtttgcggctttctcaagtgctgcgcctcctaccgtgggtagaccaccatccgcagccgctggagcgtccggagcctctgccctctgtgcgtttccgttagatgaggtcgacaggctggcaaataggacccgagatgcctgttacactagagaaggccgggcagaggacggcaccgaggttgcttatattgagtatgatgtcaattctgattgcgctcaactgccagtggataccctggatgcctatccttgtggctctgaccacactcccagccctatggcctctcgagtaccactagaggccactcctatactcgagtggcctggcatccagttgaccgcggtggccgtcaccatggaggacggccatacaatcgcctttctcggagactcccaaggacagctgcacagagtatacctgggccccggaagtgatggtcacccttattcaacccaatcaattcaacagggcagcgccgtgagtagggatttgacatttgatggaacattcgaacatctgtatgtgatgacccagagcaccctgctgaaggtgcccgtggcgagctgcgctcagcatctggattgtgctagctgcctcgcccacagggacccttactgtgggtggtgcgtgctcctgggcagatgttcaagacgatccgagtgctctagagggcaggggcctgagcagtggttatggtcttttcagccagagcttggatgtcttcaggttgccgcaatgtcgcccgccaatatatctcgggaagagaccagggaggtgttcctgagcgtgccggacctaccaccactctggccaggagaaagttacagctgccacttcggagaacaccaatcacctgccttgctgacaggcagcggtgtaatgtgtccttccccggatccgagcgaggcccctgtcctgcctcgaggcgctgactacgtgtcggtgagcgtggaactcagattcggagccgtggtgattgctaagacctccctgtcattttatgattgcgttgcagttaccgagcttagaccatctgcccaatgtcaggcatgcgtatcgagcagatggggctgcaattggtgcgtgtggcaacatctgtgcactcacaaagcctcctgcgacgcaggaccaatggttgcctcccatcagtcccccctggtgtcccctgatcctcctgcaagaggcgatggagactcggccgagctggagggaccccctgcgccattgattctccctagctcccttgattaccaatatgacacccccgggctatgggaactagaggaagccaccctgggcgcgtcctcctgcccctgcgtggaatccgtccaaggctcgactctgatgcctgttcacgtagagagagagataagactgcttggacgaaatctccacctgtttcaagacggccccggagacaatgaatgcgttatggagctcgaggggctggaggtggtggttgaggcacgggttgagtgtgaaccacctcccgatactcagtgccacgtcacttgccaacagcatcagctgagctacgaggccttgcagcccgagctacgagtggggcttttcctgcgacgcgctggccggctgcgtgtggatagtgccgaggggcttcacgtagttctttatgactgctctgtaggtcatggtgattgtagtaggtgtcagaccgccatgccccagtacgggtgcgtgtggtgcgagggggagcgcccacgttgtgtgaccagggaggcctgcggcgaagccgaagccgtggctacacagtgtcccgccccgcttatccatagtgtcgagccacttacaggccctgtggacggaggcactcgagttacgatacgagggtccaatcttggacagcatgtgcaagacgtcctgggcatggtcaccgttgctggcgtgccgtgcgccgtggatgcccaggaatatgaggtgtcctcctcactggtgtgcattacaggcgcttccggggaggaggtagccggggccacagccgtcgaggttcctggccggggaagaggggtgtccgaacacgactttgcatatcaggaccctaaggttcattccatcttccccgcacggggcccaagagccggcggcacaaggttgaccctgaatgggtccaagctgctgacaggcagactggaggacatacgtgtagtggtcggcgaccagccgtgccatctgctgcctgagcagcagtctgagcagctgcgatgtgaaacctcccctcgccctacaccagccactctgccagtggcagtgtggttcggtgcaacagagaggagactacagagagggcagttcaaatacactctggaccccaatattaccagcgctggcccgaccaagtctttcttgagtggcggccgggagatttgcgttcgtggccagaacctggacgtagtccaaacgccacgtatccgggttactgtcgtatctagaatgcttcagcccagccagggcctgggtcgaaggagaagagtggttcccgagacagcttgttccctggggccaagctgttcctctcagcaattcgaggaaccatgccatgtgaatagcagtcaactcatcacctgtaggacgcccgccctgcctggactgcccgaagacccctgggtgagggtggagttcatccttgacaatcttgttttcgatttcgcaacactgaatccgacaccattttcttacgaggctgatccgaccttacagccattgaatccagaggacccaaccatgccgttccggcacaagcctggatctgttttttccgtagagggcgagaacctggacctagcgatgtctaaggaggaggtggttgctatgataggggacggcccctgtgttgtcaagacgctgactaggcaccacttgtactgcgaaccgcctgtggagcagccactgccccgccaccacgccttaagggaagcccccgactccctccccgagttcacagttcagatgggcaacctcaggttctccctgggacacgtgcagtacgatggtgaaagtccgggggcctttcctgtagcagctcaagtgggcctgggagtggggacatcattactggcccttggagttatcatcatcgttcttatgtaccggcgcaagagcaagcaagccctgcgcgattacaagaaggtacagatccagttggaaaatctggagagttccgtgagggacagatgtaagaaagagtttaccgatctcatgacggaaatgacagaccttacgtcagacctgcttggatccggaatccctttccttgactacaaggtatacgcggaacgcattttttttccagggcacagggaatcgcctctgcatcgggatctcggcgtacccgagagccggcgtcccacagtcgagcaagggctggggcagttaagcaatctcctgaacagcaagctgttcctgacaaaatttatacataccctggagtctcagcgaacattctccgcacgcgaccgggcctacgttgcaagcctactgactgtggccctacatggtaagcttgaatatttcactgacatcttgaggacactactgagcgacctggttgcacagtacgtagctaagaaccccaagctgatgctccggcggaccgagacagtcgtagagaagctcttgacaaattggatgtccatctgcttgtatacatttgtgagagacagtgtgggcgaacccctctatatgctgtttcgcggcatcaaacatcaggtcgacaagggaccagtggactcagtgacggggaaggccaagtacactctgaacgacaatagattgctgagggaagacgtggaatacagacccttaaccctcaacgcactacttgcagtggggccaggcgccggagaggcccaaggcgtgccagtgaaggttttggattgtgacactatcagccaggctaaagagaaaatgttagaccaactgtataagggagtcccactaacccagaggcctgaccctcggactctcgatgtcgagtggagatccggagtggcgggacacttgattctctcagatgaagacgtcacctcggaagttcagggactttggcgccggttgaataccctgcaacattacaaggttcctgatggcgcgaccgtagctctggtcccctgtctgacaaaacacgtgctgagagagaaccaggattacgtgccaggggagcggacacccatgctggaagatgtggatgaaggcggaatacggccttggcacctggtgaaaccttctgatgagcctgaaccccccaggcccagacggggatcactgcggggaggagagcgagagagggctaaggccataccagagatttatctgaccaggttgctgtctatgaaggggacattgcagaagttcgtcgatgacctgtttcaggtgatcctcagtacgagcaggcccgtgccacttgccgtcaaatattttttcgatctgctggatgaacaggcccaacagcacggcataagcgaccaggacactattcacatatggaagacaaattctctgccactgcgcttttggatcaatattatcaaaaatccccagttcgtctttgacgttcagactagcgacaacatggacgctgtcctcctggtcattgcccagactttcatggatgcctgcactttagcggatcacaagttgggaagggattcccccatcaacaaactgttgtatgcacgagacattcctagatataaacgaatggtggagagatattacgccgacatccggcagacagttccggctagtgatcaggagatgaacagcgtcttggcagagttgtcctggaactatagtggggacctcggagcccgcgtcgcactccacgagttgtataaatacatcaataagtactatgatcagatcattacagccctggaagaggatggaacggcgcagaagatgcagctggggtataggctccagcagatcgctgctgccgtagaaaataaggttaccgacttgtag

SEQ ID NO: 47519 - DNA, 6408 bp, Artificial Sequence
  derived and/or modified sequence
atgcctgccctgggccctgccctgctgcaggccctgtgggccggctgggtgctgaccctgcagcccctgcccccaacagccttcaccccaaatggcacctacctgcagcacctggcccgggaccccaccagcggcaccctgtacctgggcgccaccaacttcctgttccagctgagccctggcctgcagctggaggccaccgtgtccacaggccctgtgctggacagccgggactgcctgccccctgtgatgccagatgaatgtccccaggcccagcccaccaacaaccccaaccagctgctgctggtgtcccctggggccctggtggtgtgtggctctgtgcaccagggcgtgtgtgagcagaggcggctgggccagctggagcagctgctgctgcggcctgagaggcctggggacacccagtatgtggccgccaatgaccctgctgtgtccacagtgggcctggtggcccagggcctggccggggagcccctgctgtttgtgggccggggctacaccagccggggcgtgggcggcggcatcccccccatcaccacccgggccctgtggcccccagacccccaggccgccttctcctatgaggagacagccaagctggccgtgggccgcctgtctgagtacagccaccactttgtgtctgcctttgcccggggggccagcgcctacttcctgttcctgcggcgggacctgcaggcccagagccgggccttccgggcctacgtgtcccgggtgtgcctgcgggaccagcactactacagctatgtggagctgcccctggcctgtgagggcggccgctatggcctcatccaggccgctgctgtggccaccagccgggaggtggcccatggagaggtgctgtttgctgccttcagcagcgctgccccacccaccgtgggccggccccccagcgctgctgctggggccagcggggccagcgccctgtgtgccttccccctggatgaggtggaccggctggccaacagaacaagagatgcctgctacacccgggagggccgggcagaagatggaacagaggtggcctacatcgagtatgatgtgaacagcgactgtgcccagctgcctgtggacaccctggatgcctacccctgtggcagtgaccacacccccagccccatggccagccgggtgcccctggaggccacccccatcctggagtggccaggcatccagctgacagctgtggccgtgaccatggaggatggccacaccatcgccttcctgggggacagccagggccagctgcaccgggtgtacctgggccctggcagtgatggccacccctacagcacccagagcatccagcagggcagcgctgtgtcccgggacctgacctttgatggcacctttgagcacctgtatgtgatgacccagagcaccctgctgaaggtgcctgtggccagctgtgcccagcacctggactgtgccagctgcctggcccaccgggacccctactgcggctggtgtgtgctgctgggccgctgcagccgccgctcagaatgttcccggggccagggccctgagcagtggctgtggagcttccagcctgagctgggctgcctgcaggtggccgccatgagccctgccaacatcagccgggaggagacccgggaggtgttcctgtctgtgcctgacctgccccccctgtggccaggagagagctacagctgccactttggagagcaccagagccctgccctgctgaccggcagcggcgtgatgtgccccagcccagaccccagcgaggcccctgtgctgcccagaggagctgactatgtgtctgtgtctgtggagctgcgctttggagctgtggtgattgccaagaccagcctgtccttctatgactgtgtggccgtgacagagctgcggcccagcgcccagtgccaggcctgtgtgagcagccgctggggctgcaactggtgtgtgtggcagcacctgtgcacccacaaggccagctgtgatgctggccccatggtggccagccaccagagccccctggtgtccccagaccccccagcccggggcggccccagccccagccccccaacagcccccaaggccctggccaccccagccccagacaccctgcctgtggagcccggggcccccagcacagccacagccagtgacatcagccctggggccagccccagcctgctgagcccctggggcccctgggccggcagcggcagcatcagcagccctggcagcacaggcagccccctgcacgaggagcccagcccccccagcccccagaatggacctggaacagctgtgcctgcccccacagacttccggcccagcgccaccccagaggacctgctggccagccccctgagccccagcgaggtggccgctgtgcccccagctgaccccggccctgaggccctgcaccccaccgtgcccctggacctgcccccagccaccgtgcctgccaccaccttccctggggccatgggctctgtgaagccagccctggactggctgacccgggagggcggggagctgcctgaggctgatgagtggacaggaggagatgccccagccttcagcaccagcaccctgctgtctggagatggagacagcgctgagctggagggccccccagcccccctcatcctgcccagcagcctggactaccagtatgacaccccaggcctgtgggagctggaggaggccaccctgggcgccagcagctgcccctgtgtggagagcgtgcagggcagcaccctgatgcctgtgcacgtggagcgggagatccggctgctgggcaggaacctgcacctgttccaggacggccctggggacaatgaatgtgtgatggagctggagggcctggaggtggtggtggaggcccgggtggagtgtgagcccccaccagacacccagtgccacgtgacctgccagcagcaccagctgtcctatgaggccctgcagcctgagctgcgggtgggcctcttcctgcggcgggccggccgcctgcgggtggacagcgctgagggcctgcacgtggtgctgtatgactgcagcgtgggccacggggactgcagccgctgccagacagccatgccccagtatggctgtgtgtggtgtgagggggagcggccccgctgtgtgacccgggaggcctgtggggaggccgaggccgtggccacccagtgcccagcccccctcatccacagcgtggagcccctgactggacctgtggatggcggcaccagggtgaccatccggggcagcaacctgggccagcacgtgcaggatgtgctgggcatggtgacagtggccggcgtgccctgtgctgtggatgcccaggagtatgaggtgagcagcagcctggtgtgcatcaccggggccagcggggaggaggtggccggggccacagctgtggaggtgcccggccggggccggggcgtgtctgaacatgactttgcctaccaggaccccaaggtgcacagcatcttccctgcccggggccccagggctgggggcacccggctgaccctgaatggcagcaagctgctgaccggccgcctggaggacatccgggtggtggtgggggaccagccctgccacctgctgcctgagcagcagagcgagcagctgcgctgtgagaccagcccccggcccaccccagccaccctgcctgtggccgtgtggtttggagccacagaaagaaggctgcagaggggccagttcaagtacaccctggaccccaacatcaccagcgctggccccaccaagagcttcctgagcggcggccgggagatctgtgtgcggggccagaacctggatgtggtgcagaccccccgcatccgggtgacagtggtgtccaggatgctgcagcccagccagggcctgggcagaagaagaagagtggtgcctgagacagcctgcagcctgggccccagctgcagcagccagcagtttgaggagccctgccacgtgaacagcagccagctgatcacctgcaggaccccagccctgcccggcctgcctgaggacccctgggtgcgggtggagttcatcctggacaacctggtgtttgattttgccaccctgaaccccacccccttctcctatgaggccgaccccaccctgcagcccctgaaccctgaggaccccaccatgcccttccgccacaagccaggcagcgtcttctctgtggagggggagaacctggacctggccatgagcaaggaggaggtggtggccatgattggagatggcccctgtgtggtgaagaccctgaccaggcaccacctgtactgtgagccccctgtggagcagcccctgcccaggcaccacgccctgcgggaggccccagacagcctgcctgagttcaccgtgcagatgggcaacctgcgcttcagcctgggccacgtgcagtatgatggagagagccctggggccttccctgtggccgcccaggtgggcctgggcgtgggcaccagcctgctggccctgggcgtcatcatcatcgtgctgatgtacagaaggaagagcaagcaggccctgcgggactacaagaaggtgcagatccagctggagaacctggagagctctgtgcgggaccgctgcaagaaggagttcacagacctgatgacagagatgacagacctgaccagtgacctgctgggcagcggcatccccttcctggactacaaggtgtatgcagagcgcatcttcttccctggccaccgggagagccccctgcaccgggacctgggcgtgcctgagagcagaagacccaccgtggagcagggcctgggccagctgagcaacctgctgaacagcaagctgttcctgaccaagttcatccacaccctggagagccagaggaccttcagcgcccgggaccgggcctacgtggccagcctgctgactgtggccctgcacggcaagctggagtacttcacagacatcctgcggaccctgctgagtgacctggtggcccagtatgtggccaagaaccccaagctgatgctgcggaggacagaaacagtggtggagaagctgctgaccaactggatgagcatctgcctgtacacctttgtgcgggacagcgtgggggagcccctgtacatgctgttccggggcatcaagcaccaggtggacaagggccctgtggacagcgtgacaggcaaggccaagtacaccctgaatgacaaccggctgctgcgggaggatgtggagtaccggcccctgaccctgaatgccctgctggccgtgggccctggagctggggaggcccagggcgtgcctgtgaaggtgctggactgtgacaccatcagccaggccaaggagaagatgctggaccagctgtacaagggcgtgcccctgacccagaggccagaccccaggaccctggatgtggagtggaggtctggagtggccggccacctgatcctgagtgatgaagatgtgaccagcgaggtgcagggcctgtggaggcggctgaacaccctgcagcactacaaggtgcctgatggagccaccgtggccctggtgccctgcctgaccaagcacgtgctgcgggagaaccaggactatgtgcctggagagaggacccccatgctggaggatgtggatgaaggaggcatccggccctggcacctggtgaagcccagtgatgagcctgagcccccccggccccggcggggcagcctgcggggcggggagcgggagcgggccaaggccatccctgagatctacctgacccggctgctgtccatgaagggcaccctgcagaagtttgtggatgacctcttccaggtgatcctgagcaccagcaggcctgtgcccctggccgtgaagtacttctttgacctgctggatgagcaggcccagcagcacggcatcagtgaccaggacaccatccacatctggaagaccaacagcctgcccctgcgcttctggatcaacatcatcaagaacccccagtttgtgtttgatgtgcagaccagtgacaacatggatgctgtgctgctggtgattgcccagaccttcatggatgcctgcaccctggccgaccacaagctgggccgggacagccccatcaacaagctgctgtatgcccgggacatcccccgctacaagaggatggtggagcgctactatgctgacatccggcagacagtgcctgccagtgaccaggagatgaacagcgtgctggccgagctgtcctggaactacagcggggacctgggcgcccgggtggccctgcacgagctgtacaagtacatcaacaagtactatgaccagatcatcacagccctggaggaggatggaacagcccagaagatgcagctgggctaccgcctgcagcagattgctgctgctgtggagaacaaggtgacagacctgtag

SEQ ID NO: 47520 - DNA, 5859 bp, Artificial Sequence
  derived and/or modified sequence
atgcctgccctgggccctgccctgctgcaggccctgtgggccggctgggtgctgaccctgcagcccctgcccccaacagccttcaccccaaatggcacctacctgcagcacctggcccgggaccccaccagcggcaccctgtacctgggcgccaccaacttcctgttccagctgagccctggcctgcagctggaggccaccgtgtccacaggccctgtgctggacagccgggactgcctgccccctgtgatgccagatgaatgtccccaggcccagcccaccaacaaccccaaccagctgctgctggtgtcccctggggccctggtggtgtgtggctctgtgcaccagggcgtgtgtgagcagaggcggctgggccagctggagcagctgctgctgcggcctgagaggcctggggacacccagtatgtggccgccaatgaccctgctgtgtccacagtgggcctggtggcccagggcctggccggggagcccctgctgtttgtgggccggggctacaccagccggggcgtgggcggcggcatcccccccatcaccacccgggccctgtggcccccagacccccaggccgccttctcctatgaggagacagccaagctggccgtgggccgcctgtctgagtacagccaccactttgtgtctgcctttgcccggggggccagcgcctacttcctgttcctgcggcgggacctgcaggcccagagccgggccttccgggcctacgtgtcccgggtgtgcctgcgggaccagcactactacagctatgtggagctgcccctggcctgtgagggcggccgctatggcctcatccaggccgctgctgtggccaccagccgggaggtggcccatggagaggtgctgtttgctgccttcagcagcgctgccccacccaccgtgggccggccccccagcgctgctgctggggccagcggggccagcgccctgtgtgccttccccctggatgaggtggaccggctggccaacagaacaagagatgcctgctacacccgggagggccgggcagaagatggaacagaggtggcctacatcgagtatgatgtgaacagcgactgtgcccagctgcctgtggacaccctggatgcctacccctgtggcagtgaccacacccccagccccatggccagccgggtgcccctggaggccacccccatcctggagtggccaggcatccagctgacagctgtggccgtgaccatggaggatggccacaccatcgccttcctgggggacagccagggccagctgcaccgggtgtacctgggccctggcagtgatggccacccctacagcacccagagcatccagcagggcagcgctgtgtcccgggacctgacctttgatggcacctttgagcacctgtatgtgatgacccagagcaccctgctgaaggtgcctgtggccagctgtgcccagcacctggactgtgccagctgcctggcccaccgggacccctactgcggctggtgtgtgctgctgggccgctgcagccgccgctcagaatgttcccggggccagggccctgagcagtggctgtggagcttccagcctgagctgggctgcctgcaggtggccgccatgagccctgccaacatcagccgggaggagacccgggaggtgttcctgtctgtgcctgacctgccccccctgtggccaggagagagctacagctgccactttggagagcaccagagccctgccctgctgaccggcagcggcgtgatgtgccccagcccagaccccagcgaggcccctgtgctgcccagaggagctgactatgtgtctgtgtctgtggagctgcgctttggagctgtggtgattgccaagaccagcctgtccttctatgactgtgtggccgtgacagagctgcggcccagcgcccagtgccaggcctgtgtgagcagccgctggggctgcaactggtgtgtgtggcagcacctgtgcacccacaaggccagctgtgatgctggccccatggtggccagccaccagagccccctggtgtccccagaccccccagcccggggagatggagacagcgctgagctggagggccccccagcccccctcatcctgcccagcagcctggactaccagtatgacaccccaggcctgtgggagctggaggaggccaccctgggcgccagcagctgcccctgtgtggagagcgtgcagggcagcaccctgatgcctgtgcacgtggagcgggagatccggctgctgggcaggaacctgcacctgttccaggacggccctggggacaatgaatgtgtgatggagctggagggcctggaggtggtggtggaggcccgggtggagtgtgagcccccaccagacacccagtgccacgtgacctgccagcagcaccagctgtcctatgaggccctgcagcctgagctgcgggtgggcctcttcctgcggcgggccggccgcctgcgggtggacagcgctgagggcctgcacgtggtgctgtatgactgcagcgtgggccatggagactgcagccgctgccagacagccatgccccagtatggctgtgtgtggtgtgagggggagcggccccgctgtgtgacccgggaggcctgtggggaggccgaggccgtggccacccagtgcccagcccccctcatccacagcgtggagcccctgaccggccctgtggatggcggcaccagggtgaccatccggggcagcaacctgggccagcacgtgcaggatgtgctgggcatggtgacagtggccggcgtgccctgtgctgtggatgcccaggagtatgaggtgagcagcagcctggtgtgcatcactggagccagcggggaggaggtggccggggccacagctgtggaggtgcccggccggggccggggcgtgtctgaacatgactttgcctaccaggaccccaaggtgcacagcatcttccctgcccggggcccccgggccggcggcacccggctgaccctgaatggcagcaagctgctgaccggccgcctggaggacatccgggtggtggtgggggaccagccctgccacctgctgcctgagcagcagagcgagcagctgcgctgtgagaccagcccccggcccaccccagccaccctgcctgtggccgtgtggtttggagccacagagcggcggctgcagaggggccagttcaagtacaccctggaccccaacatcaccagcgctggccccaccaagagcttcctgagcggcggccgggagatctgtgtgcggggccagaacctggatgtggtgcagaccccccgcatccgggtgacagtggtgtccaggatgctgcagcccagccagggcctgggcagaagaagaagagtggtgcctgagacagcctgcagcctgggccccagctgcagcagccagcagtttgaggagccctgccacgtgaacagcagccagctgatcacctgcaggaccccagccctgcccggcctgcctgaggacccctgggtgcgggtggagttcatcctggacaacctggtgtttgattttgccaccctgaaccccacccccttctcctatgaagctgaccccaccctgcagcccctgaaccctgaggaccccaccatgcccttccgccacaagccaggctctgtgttttctgtggagggggagaacctggacctggccatgagcaaggaggaggtggtggccatgattggagatggcccctgtgtggtgaagaccctgaccaggcaccacctgtactgtgagccccctgtggagcagcccctgcccaggcaccacgccctgcgggaggccccagacagcctgcctgagttcaccgtgcagatgggcaacctgcgcttcagcctgggccacgtgcagtatgatggagagagccctggggccttccctgtggccgcccaggtgggcctgggcgtgggcaccagcctgctggccctgggcgtcatcatcatcgtgctgatgtacagaaggaagagcaagcaggccctgcgggactacaagaaggtgcagatccagctggagaacctggagagctctgtgcgggaccgctgcaagaaggagttcacagacctgatgacagagatgacagacctgaccagtgacctgctgggcagcggcatccccttcctggactacaaggtgtatgcagagcgcatcttcttccctggccaccgggagagccccctgcaccgggacctgggcgtgcctgagagccggcggcccaccgtggagcagggcctgggccagctgagcaacctgctgaacagcaagctgttcctgaccaagttcatccacaccctggagagccagaggaccttcagcgcccgggaccgggcctacgtggccagcctgctgactgtggccctgcacggcaagctggagtacttcacagacatcctgcggaccctgctgagtgacctggtggcccagtatgtggccaagaaccccaagctgatgctgcggaggacagagaccgtggtggagaagctgctgaccaactggatgagcatctgcctgtacacctttgtgcgggacagcgtgggggagcccctgtacatgctgttccggggcatcaagcaccaggtggacaagggccctgtggacagcgtgacaggcaaggccaagtacaccctgaatgacaaccggctgctgagagaagatgtggagtaccggcccctgaccctgaatgccctgctggccgtgggccctggggccggggaggcccagggcgtgcctgtgaaggtgctggactgtgacaccatcagccaggccaaggagaagatgctggaccagctgtacaagggcgtgcccctgacccagaggccagaccccaggaccctggatgtggagtggaggtctggagtggccggccacctgatcctgagtgatgaagatgtgaccagcgaggtgcagggcctgtggaggcggctgaacaccctgcagcactacaaggtgcctgatggagccaccgtggccctggtgccctgcctgaccaagcacgtgctgcgggagaaccaggactatgtgcctggagagaggacccccatgctggaggatgtggatgagggcggcatccggccctggcacctggtgaagcccagtgatgagcctgagcccccccggccccggcggggcagcctgcggggcggggagcgggagcgggccaaggccatccctgagatctacctgacccggctgctgtccatgaagggcaccctgcagaagtttgtggatgacctcttccaggtgatcctgagcaccagcaggcctgtgcccctggccgtgaagtacttctttgacctgctggatgagcaggcccagcagcacggcatcagtgaccaggacaccatccacatctggaagaccaacagcctgcccctgcgcttctggatcaacatcatcaagaacccccagtttgtgtttgatgtgcagaccagtgacaacatggatgctgtgctgctggtgattgcccagaccttcatggatgcctgcaccctggccgaccacaagctgggccgggacagccccatcaacaagctgctgtatgcccgggacatcccccgctacaagaggatggtggagcgctactatgctgacatccggcagacagtgcctgccagtgaccaggagatgaacagcgtgctggccgagctgtcctggaactacagcggggacctgggcgcccgggtggccctgcacgagctgtacaagtacatcaacaagtactatgaccagatcatcacagccctggaggaggatggaacagcccagaagatgcagctgggctaccgcctgcagcagattgctgctgctgtggagaacaaggtgacagacctgtag

SEQ ID NO: 47521 - DNA, 2241 bp, Artificial Sequence
  derived and/or modified sequence
atgcccttccgccacaagccaggctctgtgttttctgtggagggggagaacctggacctggccatgagcaaggaggaggtggtggccatgattggagatggcccctgtgtggtgaagaccctgaccaggcaccacctgtactgtgagccccctgtggagcagcccctgcccaggcaccacgccctgcgggaggccccagacagcctgcctgagttcaccgtgcagatgggcaacctgcgcttcagcctgggccacgtgcagtatgatggagagagccctggggccttccctgtggccgcccaggtgggcctgggcgtgggcaccagcctgctggccctgggcgtcatcatcatcgtgctgatgtacagaaggaagagcaagcaggccctgcgggactacaagaaggtgcagatccagctggagaacctggagagctctgtgcgggaccgctgcaagaaggagttcacagacctgatgacagagatgacagacctgaccagtgacctgctgggcagcggcatccccttcctggactacaaggtgtatgcagagcgcatcttcttccctggccaccgggagagccccctgcaccgggacctgggcgtgcctgagagccggcggcccaccgtggagcagggcctgggccagctgagcaacctgctgaacagcaagctgttcctgaccaagttcatccacaccctggagagccagaggaccttcagcgcccgggaccgggcctacgtggccagcctgctgactgtggccctgcacggcaagctggagtacttcacagacatcctgcggaccctgctgagtgacctggtggcccagtatgtggccaagaaccccaagctgatgctgcggaggacagagaccgtggtggagaagctgctgaccaactggatgagcatctgcctgtacacctttgtgcgggacagcgtgggggagcccctgtacatgctgttccggggcatcaagcaccaggtggacaagggccctgtggacagcgtgacaggcaaggccaagtacaccctgaatgacaaccggctgctgagagaagatgtggagtaccggcccctgaccctgaatgccctgctggccgtgggccctggggccggggaggcccagggcgtgcctgtgaaggtgctggactgtgacaccatcagccaggccaaggagaagatgctggaccagctgtacaagggcgtgcccctgacccagaggccagaccccaggaccctggatgtggagtggaggtctggagtggccggccacctgatcctgagtgatgaagatgtgaccagcgaggtgcagggcctgtggaggcggctgaacaccctgcagcactacaaggtgcctgatggagccaccgtggccctggtgccctgcctgaccaagcacgtgctgcgggagaaccaggactatgtgcctggagagaggacccccatgctggaggatgtggatgagggcggcatccggccctggcacctggtgaagcccagtgatgagcctgagcccccccggccccggcggggcagcctgcggggcggggagcgggagcgggccaaggccatccctgagatctacctgacccggctgctgtccatgaagggcaccctgcagaagtttgtggatgacctcttccaggtgatcctgagcaccagcaggcctgtgcccctggccgtgaagtacttctttgacctgctggatgagcaggcccagcagcacggcatcagtgaccaggacaccatccacatctggaagaccaacagcctgcccctgcgcttctggatcaacatcatcaagaacccccagtttgtgtttgatgtgcagaccagtgacaacatggatgctgtgctgctggtgattgcccagaccttcatggatgcctgcaccctggccgaccacaagctgggccgggacagccccatcaacaagctgctgtatgcccgggacatcccccgctacaagaggatggtggagcgctactatgctgacatccggcagacagtgcctgccagtgaccaggagatgaacagcgtgctggccgagctgtcctggaactacagcggggacctgggcgcccgggtggccctgcacgagctgtacaagtacatcaacaagtactatgaccagatcatcacagccctggaggaggatggaacagcccagaagatgcagctgggctaccgcctgcagcagattgctgctgctgtggagaacaaggtgacagacctgtag

SEQ ID NO: 47522 - DNA, 6408 bp, Artificial Sequence
  derived and/or modified sequence
atgcccgccctgggccccgccctgctgcaggccctgtgggccggctgggttctcactctgcagccgctgccccccactgccttcactcctaacgggacatacctccaacacctcgctcgggatccaactagcggtactctttacttaggcgctactaacttcctcttccagctgagtccagggttgcagcttgaagctacagtcagcacaggtcctgtgctggatagcagagattgtctgcctccagtcatgccagacgaatgtccacaggcacagcctacgaataacccaaatcagctgctgctcgtctctcccggggctctagtggtgtgtggttctgtgcatcagggagtgtgtgaacagagacgcctgggccagttggagcaactgttactccgtccggagaggccgggcgatacgcaatacgtggccgccaatgatcccgcagtgtccacagtgggactcgttgcacaaggtctcgctggcgaacccctgctgttcgtcggacggggctacactagtcgaggcgttgggggaggtatacctcccatcactacgcgcgccttgtggccacccgatcctcaagctgcattcagctacgaggagactgctaaactggctgtgggccgtctcagcgaatacagtcaccatttcgtaagcgccttcgccaggggcgctagcgcgtatttcctgtttctccgccgggaccttcaagctcagtcccgggcattccgggcctatgtgtctcgcgtatgtttaagggaccagcattactatagctatgtcgaactccccctggcctgcgagggaggacgctacggacttattcaggcggctgctgttgcaactagcagagaagtggcccacggggaggtcctgttcgcagccttctcctcagcagcccccccgacagttgggcgcccgccctcagccgccgcaggtgcttcaggagcttcagcgctatgtgccttccccctagatgaagttgatcgactggctaaccgcacccgcgatgcctgctatacgagggagggtcgcgctgaagacggtaccgaagtggcctacattgagtacgacgtgaatagcgactgtgcccagttgcccgtcgacactctagacgcctacccatgtgggagcgaccacaccccgagccccatggcttctcgtgtgcccctggaggctactccaattctggagtggccgggaatacagctcacagcagtagcggtaaccatggaggacgggcataccatcgcgtttttgggagacagtcaagggcaactgcacagagtgtatcttggccccgggagcgatggacacccctacagcacccagagtattcagcaagggtcagccgtgtccagagatctaacatttgacggtacgttcgaacacttatatgtcatgacccagtcgacacttctaaaagtgcctgtcgccagctgtgcacaacacctggattgcgcaagttgtctcgctcatcgggatccctattgcggctggtgtgtgttgttaggcagatgctctagacggagcgagtgctccagaggccagggccctgaacaatggttgtggtctttccagcccgaactggggtgcctgcaggtcgcagctatgtctcccgccaatattagtagagaagaaacacgggaagtttttctctctgtgcctgacctgccccctctgtggcctggcgaatcttactcctgtcacttcggcgagcatcagtcccccgctcttctgactgggagcggcgttatgtgtcccagccctgacccaagtgaggcacccgtcctccccaggggggctgactatgttagtgtgagcgtggagctgaggttcggcgccgtagtaatcgctaagacctctctgagtttctacgactgtgtcgctgtgaccgaactacggccctctgcccaatgccaggcttgtgtgagttctaggtgggggtgtaactggtgcgtgtggcagcacctgtgtacccacaaagcaagctgtgacgctggccccatggtcgcaagtcaccaaagccccctggtttcccccgatccccctgcccgcggaggtccgagtccctccccgccaacagcccccaaggcgctcgccactcctgcacctgacaccctgccggtggagcctggagcccctagtaccgcgacagcttctgatatttcaccaggagcaagtccgtcacttctaagcccttggggcccctgggctggctcaggtagcataagtagcccaggatcaaccggaagtccccttcacgaggagccaagccctccctctccccaaaatggccccgggactgccgttccggcacctacagactttagaccctctgcaacccctgaggatctattagcctcacctctgagtccttctgaggtggccgcagtgccccctgcagatccaggccctgaagctctgcaccccaccgtgcctttggacctacctcccgccactgtacccgctacgacttttccgggcgcgatgggaagtgtgaaaccagctcttgactggcttaccagggaggggggtgaactgcccgaagcagatgagtggactggcggggacgctcctgccttttccaccagtaccttgttgagcggggacggagattcggccgaactggaaggaccacccgctccattgattttgccctccagcttagactaccagtatgacacacccggattatgggaactggaagaagccacactgggcgcaagttcctgcccatgcgtggaatcagtgcagggttccacactgatgccagttcacgtcgagagagagattcgtttacttggtcgaaacctccacctgttccaggacggccctggcgacaatgagtgtgtcatggaattggaggggttggaggttgtggtggaggctcgtgtcgagtgtgagcctcccccagacacacaatgtcatgttacctgtcagcagcaccagttatcatatgaagccctccagcctgagctcagagttggtttattccttcgcagggctggacgcctgagggtggacagcgctgaaggcctgcacgtagttctttatgattgttctgtgggccatggggattgtagtcggtgtcaaactgctatgccccagtacggctgtgtatggtgcgagggagagcggccccgctgcgtgaccagggaggcttgcggagaggccgaagctgtggcgacgcagtgtccggctcccctcatacattccgtggaacctctgaccgggcctgtcgatggaggtaccagggtgaccatcaggggctcaaacctggggcagcatgtgcaggacgttcttggcatggtcactgtggctggagtgccttgtgccgttgatgcccaggaatatgaagtaagctcaagtttagtgtgcataaccggcgccagcggagaagaggtcgccggcgccaccgcagtggaggtacccggtagaggcagaggcgtctctgaacatgattttgcataccaggaccccaaggtgcatagtatttttcccgcccgggggccgcgtgcaggtggtacgcggttaaccctgaatggctcaaaactgcttactggaaggttagaggacatccgcgttgtggtgggtgatcagccttgtcacctgctccctgaacagcaatccgaacagctgcgctgcgagaccagccctagaccaactcctgcaacgttgcccgtggccgtgtggttcggagccacagaaagacggcttcagaggggacaattcaaatacaccctagaccctaatattacctcggccgggccaaccaagagtttcctctccggagggagggagatctgtgtgagagggcagaatcttgatgttgtgcagactccgcgtatccgtgttactgtggtgagtaggatgcttcagccctctcagggcttggggcgccgtcgcagggtggtacccgaaacagcatgcagccttgggccaagctgtagtagccaacagtttgaagaaccctgtcatgttaattctagccaactgataacatgtaggacccctgctctacctgggctcccagaagatccatgggttagagtggagtttatcctcgataacctggtcttcgactttgcaactttaaatcctacccccttttcgtatgaagccgatccaacactgcagcctctgaatccggaggatcccacaatgcccttccggcataagccaggcagcgttttttctgtcgagggagagaacctcgacctggcaatgagtaaggaggaagtcgttgcaatgataggggacggaccgtgtgtggtgaaaactttaaccagacaccacctctattgtgagcccccagtggagcagccgctgccgcgccatcacgccctgagagaggcccccgatagcctgccagagtttacagtccagatgggtaacctgagattctctctaggacatgtgcagtatgatggcgagagtccgggggcatttcctgttgccgctcaagttggcttgggcgtgggcacaagtctgttagctctgggagtcatcataatagtgctgatgtatcgacgcaagtcaaaacaggcactgagagattacaagaaggtgcagatacagttggaaaatcttgaatctagcgtgagggacagatgcaagaaggagtttactgatctcatgaccgagatgaccgatctgacttcggatctgcttgggagcggaatccctttcctggactataaggtttatgcagaacggatcttcttccccggccatcgagaatcacccctccatagagatctcggtgtccccgagtctagaaggcctactgttgaacaggggctgggacagctgtctaacttactgaactcaaagctgtttctgaccaagttcattcacactctcgaatcccagcgcactttctctgccagggacagagcatatgtcgcctcccttttgactgtcgcactacatggaaaactagaatattttacggacatactgagaactttgctctccgaccttgttgctcagtacgtcgcaaaaaatcccaaactcatgctgaggagaacagaaaccgtcgttgaaaagcttctgacaaattggatgagcatatgtctctacacatttgtaagggactccgtcggggagcctctctatatgcttttcagaggtataaaacaccaagtggataaaggcccagtggactctgtgacgggaaaagcaaaatataccttaaacgacaaccggctgcttcgggaggacgttgagtaccggcctcttacgctgaatgccctgctggccgtgggtcccggagccggcgaggcccaaggggtccctgtgaaagtgctggactgcgacaccatttctcaagcgaaggaaaagatgctcgatcagttatacaaaggagttcccctaacccaacgccctgatcctcgcactctagatgtggaatggcgatccggggttgccggccatcttatactcagcgacgaggacgtgaccagcgaggtgcagggcctctggaggcggctgaatacccttcagcattacaaagtacctgatggcgccaccgtcgcactggtgccttgtcttacaaagcatgtgctgcgcgagaaccaagattatgtgcctggggaacgaacccccatgctggaagacgtggatgaagggggtatccgcccctggcatctagtgaagccttcagatgagcccgagcccccgcgccccagacgtggctccctgcggggtggggaacgggaacgcgccaaagccatcccggagatatatctgacccggttgctgtctatgaagggtacattacagaaatttgtggatgacttgtttcaggttatcctgtcaacttcgagacctgtgccccttgcagtgaagtacttcttcgatctcttggacgagcaggctcagcagcatggcatcagcgaccaggatacaatccacatctggaaaaccaacagcctcccactgcgattttggatcaatattataaagaaccctcagttcgtattcgacgtgcaaaccagtgataacatggacgccgtcctcctggtgatcgctcagaccttcatggacgcctgcaccctggcagaccataaactgggccgcgacagtcctatcaataagctgctgtatgcccgcgacattcccaggtataagcgcatggtagagaggtactacgctgacatcagacaaaccgtacctgctagtgaccaagaaatgaactctgttcttgcggagctcagttggaactattccggcgacctgggggccagagttgcacttcacgaattgtacaagtacattaataaatattacgaccaaattattactgcactggaggaagatgggacagctcagaagatgcagctaggctatagattgcagcagattgcagcagctgtagaaaataaggtcacggacctgtag

SEQ ID NO: 47523 - DNA, 5859 bp, Artificial Sequence
  derived and/or modified sequence
atgcccgccctgggccccgccctgctgcaggccctgtgggccggctgggtgctgactctccagccactgccaccaactgcttttacccccaatggaacttatctgcagcatttagctagggatccgacaagcgggacactgtatctcggggcgacaaacttcctgtttcagctctccccggggctgcagctggaagccaccgtcagtaccggccctgttctagactctcgcgactgcctacccccagtgatgccagatgagtgtcctcaggcccagcccacgaacaatccgaaccagctgctgctggtcagccccggcgctctcgtggtctgtggcagcgttcaccagggggtgtgtgagcaacgacgacttggccagttggaacagctcctgctgcggccagagcgtccaggggacactcaatatgtggctgccaatgatcccgcagtgagcaccgtgggtttagtggcccagggcttggccggcgagccgctcttatttgtgggtaggggctatacatctcgcggcgtgggcggaggcatccctcccattactactcgtgcactgtggcctccagacccgcaggctgccttcagttatgaagagacagccaaactggcggttggaagattgtccgagtactcgcaccactttgtttcagcatttgctagaggggccagtgcttactttctatttctcagacgcgacctccaggcacaatctagggccttcagggcctatgtctcgagagtctgcctgcgcgaccagcactactactcctacgttgaactaccattagcctgcgagggcggcaggtatggcctgattcaggccgcagcagtggctaccagtcgggaggttgcccatggcgaagtgctatttgcggcattcagctctgctgcaccgcctaccgtcggacgcccaccatccgctgctgctggagcctcgggggcaagcgccctttgtgcttttccacttgatgaggttgatagactggcaaatcgtacgagagacgcatgctatacgagagagggaagggctgaggatgggaccgaggtagcctacatagagtatgacgtgaattcagactgcgcccagcttcctgtcgatactttggatgcatacccctgtggcagcgatcacactccgtccccaatggcgagccgcgttcctctggaggccacgcccatactggagtggcctggcatccagctcaccgccgtcgcagtcacaatggaagacggacacacaatcgctttcttaggcgattcgcaggggcagctgcaccgcgtttacctagggccgggtagcgacggtcatccctattctacgcaatcgatccagcaaggctcagcagtgtcccgcgacctgaccttcgacgggacgtttgaacatttgtatgtcatgactcagtcaaccctgcttaaggtgcccgttgcatcctgcgcccagcacctggattgcgcatcttgccttgcccatagagacccttattgcggatggtgtgtactgctgggccgttgttcccgtagatccgaatgctctaggggacaggggccggagcagtggctgtggtccttccagcccgagctcggttgtctgcaagttgctgccatgagcccggcaaatatcagtagggaggagacccgggaggtcttcctgtccgtgcctgacctgccacccttatggccaggcgaatcttacagttgccacttcggcgagcatcagtctcccgcccttctgacggggagcggtgtcatgtgcccttcccctgacccaagtgaagcccccgtgctcccaaggggggccgactacgtatcagtatctgtcgaactgcgtttcggggcagtcgtaatcgctaaaaccagtctttccttctatgactgcgtggccgtgaccgaactgcggcctagcgcgcaatgtcaggcatgtgtaagcagcagatggggctgcaattggtgcgtgtggcagcatctatgcacacacaaggcttcttgcgacgcgggacccatggtggcatctcaccagagtcccctcgtgtccccagatcctccagcccgaggagatggagactctgccgaattagagggcccaccagcccctctcatcctcccaagctccctcgattaccagtacgacacgccaggattgtgggagctggaggaagcgactcttggagctagttcttgtccatgcgtggagtccgtgcaagggtcaacgctgatgcccgtgcacgttgagagggagattagattactgggacgtaatctgcatttgttccaggatggacccggagacaacgagtgcgtgatggaacttgaggggctcgaggtggttgtggaagcgagagtggaatgcgagcctccccctgacacacagtgtcacgtgacctgtcagcagcaccagctaagttacgaagctctccagccggaactccgggttggattatttctccggagagcaggcagattgcgtgtcgacagcgccgaaggactgcatgttgtattgtacgattgttcagttgggcatggggactgcagccggtgccagactgcaatgccacaatacgggtgcgtctggtgcgaaggggagcgaccccgttgtgtcactagagaagcctgcggcgaggcagaggcggtcgcgacccagtgccccgcccctcttatccatagcgtcgagcctttgaccgggcctgtagacggtggtacacgtgtgaccataaggggtagcaacctcggccagcatgtgcaggacgtgctgggtatggtgacagtggctggagtgccctgtgccgtagacgcccaggagtatgaagtctccagcagcttggtttgcatcaccggcgcctcaggggaagaggtcgccggagccacagccgtggaggtgcccgggagagggcgcggggtatctgagcacgacttcgcttatcaagacccaaaggtgcactccattttccctgctagaggaccccgcgccggcgggactcgcctcacactcaacggaagtaagctgctcactggacgccttgaggacattcgagtggtggtgggcgaccagccttgtcacttactgccggagcaacagtctgagcagctgcgctgtgagactagtcccaggccaactcctgctacgctgcccgtagcggtgtggttcggggcgactgaaagacgcctgcagcgagggcagtttaaatatactctagacccgaacataacctccgctggacctactaagagctttttgtccggtggtcgggaaatttgtgtgcgcgggcaaaatctggacgttgtgcaaacaccacgaatccgggtgactgttgtttccaggatgctgcagcctagccagggcttgggtaggagaagaagggttgtgcctgaaaccgcctgcagcctgggaccttcttgcagttcccagcagtttgaagagccatgccatgtgaacagtagtcaacttatcacgtgtaggaccccagcactgccaggcctgccagaagatccttgggtgagggtggagtttatcctggacaatttggtcttcgattttgcaacactcaaccccacacctttctcatatgaagcagatcctacgctgcagccattaaatcccgaggaccccactatgcctttcagacacaagcccggttccgtattctctgtggagggggaaaatttggaccttgccatgagcaaagaggaggtggtggccatgatcggggacgggccttgcgtcgtcaaaaccttgacaaggcaccacctgtattgcgagccacctgtggaacaacccctgcctagacatcatgccctgagagaagcaccagattccctccccgagtttaccgtgcagatgggtaatttgaggttctcactgggtcacgttcagtacgatggagaaagtccaggtgcctttccagtagccgcccaagtcgggttgggggtggggaccagcttactagccctcggggtgatcatcattgtgctcatgtacagacggaaatccaagcaggccttaagggattataagaaggtgcaaatccaactggagaacctggaaagcagcgtgcgcgatcgttgtaaaaaagagtttacggacttgatgacagagatgacggatctgacctccgaccttctcggatccggtattccatttctcgactataaggtgtacgccgagcgtatttttttcccgggccaccgggaatcccctctgcatagagacctcggggtgccggaaagccggcgtccaacggtcgagcagggccttggccagctgagcaatctgctgaatagtaagctttttttgactaaatttatccacaccctagaaagccagcgcacattctctgcaagggatagagcctacgtagcgagcttgttaacggtggcactccatggcaaactggagtatttcactgatatcctgcgtacgctgctaagcgatctagtggcccagtacgtggccaaaaacccaaaacttatgctgaggcgaactgagacagtagttgaaaaactactcactaattggatgagcatatgcctttatacttttgttagggattctgtgggggagccgctgtatatgctcttccgtggtataaaacaccaggtcgataagggcccagttgacagcgtgaccggaaaagcaaaatacacacttaatgacaacagactgctgcgtgaagatgtggagtatcggccgctgaccctgaacgcccttctcgctgttggccctggagcaggcgaagcgcagggtgtgcccgtgaaggtcctggattgtgacacgatttcgcaggcgaaggagaagatgctagatcagttgtataagggagttccacttacgcagcgacccgaccctcggaccctcgatgtggagtggagatccggagtggccggccatttaatacttagcgacgaagacgtgacgtccgaagttcaggggctttggcggaggctgaacaccctgcaacactacaaagtgccagacggtgctaccgtggcactggtgccctgccttaccaaacatgtgttgagggaaaaccaggattacgtgcctggagagcgcacaccaatgttggaagatgtagacgaaggaggcatacggccatggcatttggtgaagccatctgatgagccagagccacctagaccacgccggggatcactgcgcgggggcgagcgggaaagggcgaaggcaatcccagaaatatatttgacaagacttctgtcaatgaaaggaactctccagaagttcgttgatgacctgttccaggtgattctgtctaccagtcgccctgtacccctcgccgtcaaatatttttttgacctgttggatgagcaagcccagcagcacggcattagcgatcaagacaccatccatatttggaagacgaacagcctgccactgcgtttctggatcaacatcattaagaatccacagttcgtatttgatgtgcagacgtctgacaacatggatgctgtgctgctggtgatcgcccagactttcatggacgcctgcaccctagccgaccataagctgggacgggactcccccattaacaaactgctgtatgctcgtgacatcccaaggtacaagcgtatggtcgagcggtactacgcagacattcggcagactgtgcccgcatcagaccaggagatgaatagcgtactcgctgagctatcctggaattactccggcgatttgggagcccgggtcgctcttcatgagctgtacaagtacatcaacaaatattatgaccagatcattacagccctcgaagaggatggaactgcccaaaagatgcagctcggttatcgactccagcagatcgccgccgccgtagaaaacaaggtcaccgatctctag

SEQ ID NO: 47524 - DNA, 6408 bp, Artificial Sequence
  derived and/or modified sequence
atgcccgccctgggccccgccctgctgcaggccctgtgggccggctgggtgctgaccctgcagccactgcctcctactgcgttcactcctaatggcacttatttacagcatctggccagggatccaacttcgggtacactatacctgggtgccaccaactttctgttccagttgagtcctgggttgcaactggaagccacagtctccaccggccctgtactggatagcagggactgtctgcctcccgtaatgcctgatgagtgtccccaggcacagccaaccaataatcctaaccagctgctactggtgtcccctggtgctcttgtggtttgcgggagtgtccaccagggagtctgtgagcagcgcaggttgggccaactcgagcagctcctattgcgccctgaaaggccgggtgacacacaatatgtggctgcgaatgaccccgctgttagtactgtgggactggtggctcagggcctcgccggggagccacttctctttgtggggcggggctatacatctagaggggtgggaggcggaatcccccccatcaccaccagagcgctgtggccccccgaccctcaagcggcattttcatatgaggaaacagctaaactggccgtgggccgactctctgagtattctcaccactttgtgagtgcttttgcacgcggagctagcgcatacttcctctttctgcggcgggatctgcaggcacagtctagggcctttcgggcttatgtgagcagggtctgccttcgggaccagcattactacagttacgtggagctaccacttgcttgtgagggtgggcggtacggcttgattcaggctgcagcagtggccacgtctcgcgaagtagcacacggcgaggtgctgtttgcagccttctcttccgctgctcctccaaccgtggggcgtccacctagcgcggcggccggcgcctccggtgcatccgcgctttgcgccttcccactagatgaagtggacaggcttgccaaccgcactcgcgacgcttgttacactcgggaaggcagggccgaggatggcacagaagtggcatatattgaatacgacgtgaacagtgactgcgctcagctcccagttgacactctcgacgcatacccatgcggatccgaccatacaccaagccctatggctagcagggtgcccctggaggctacccccatcctggagtggccaggaatacagctgacagcagttgcagtaaccatggaggacgggcacactatagcgttcctgggggactcgcagggacagttgcacagagtttacttggggcctggatccgatggccatccatattccacccaaagcatccagcaaggctctgccgtttcgcgcgacctgacgtttgacggaactttcgagcacctgtatgtcatgacccagtccaccctccttaaagtgcccgtggcgtcatgcgctcaacacctcgactgtgcatcatgccttgcgcacagagatccatactgtggctggtgcgtgctgctgggccgatgttcccgcagaagcgagtgctcccgcgggcaggggcccgagcagtggctctggtcattccaacccgagctgggatgtcttcaggtcgctgccatgagtcctgccaatattagcagggaagagaccagggaagtttttctctccgtgcccgatctgccacctttgtggccaggagagagctactcttgccatttcggggagcaccagagccccgccctgctgacaggatccggcgtgatgtgtccgtcccccgaccctagcgaggcccctgtgcttcctaggggcgccgactacgtgagtgtgagtgtggaactccggtttggagcggtcgttatcgctaaaacttccctgtctttctacgactgcgtcgctgttactgagttaaggccgtcagctcaatgccaggcctgtgtatcgtctagatggggttgcaactggtgcgtttggcagcatttatgcacgcacaaggcctcatgtgatgccggccctatggtggcaagtcaccagtctccactcgtgtcacctgacccgcctgcaagaggcggtcctagtcctagtccccccactgccccgaaagctttagccactcctgctccagatacacttccggtggaacctggcgctccttccactgcaacagctagcgacatttcccccggcgctagccccagcctgttgagtccctggggtccatgggccggtagcggcagtatcagtagcccagggtccacgggaagtcctctccatgaagagccctctccaccttctccgcagaacggccccgggaccgctgtgccagctccgactgactttaggccctccgccacccctgaggatctcctcgcctctcctctctcaccatcagaggtcgcggccgtgccacctgccgatcccggcccagaggcccttcaccccaccgtgccactggatctccctccagcaactgtgccagctaccacattccccggagccatggggtccgtgaaacctgccctcgactggcttacaagggaggggggagagctacccgaagccgatgaatggactggtggagatgcacccgcattctccacgtctaccctactgtccggcgacggtgattctgctgagctcgaggggcctccggctcccctgatactcccctcgagcttggactaccagtatgacacgcctggcctttgggagttggaggaggccacattaggggcgtcaagctgcccttgcgtcgagtcagtgcagggctcaaccttaatgccagtgcacgttgaacgggaaattcggctcttgggacgaaacctccatctctttcaggatgggccgggcgacaatgaatgcgtgatggagcttgaagggctagaggttgtcgtggaagcacgggtggaatgtgagcctccacctgacactcagtgccacgtcacctgccagcagcatcagctctcctatgaggcccttcagccagaacttagagttggactgttcctcaggcgcgctggacggctgcgggtggattcagcagaaggcctgcatgtggtgctctacgattgctcagttggacatggcgattgttctcggtgccagactgcgatgcctcagtacggatgtgtctggtgtgagggggaacgcccacggtgcgtaactagagaggcctgtggcgaagcagaggccgtggctacccagtgccctgcaccactgatccacagcgtcgaaccgctcacagggcctgtggacggtgggacccgtgtgacaatccggggaagcaatctgggccaacacgtccaggacgtcctgggcatggttaccgtggcaggtgtcccctgtgccgttgatgcccaagagtatgaggtctcaagttcattggtctgcattaccggcgccagtggcgaagaggtggctggcgcgactgccgtagaagtgcccggaagggggcgcggagtctccgagcatgacttcgcatatcaagatcccaaggtgcactcaattttccctgcccggggaccgagagcaggtggcacccgtctaaccctcaacggttctaagctgctcaccgggagactggaggatatacgggtcgtagtgggcgaccaaccatgccatctgctcccagagcagcagtctgagcaactgcgatgcgagacttctccacgccctactcccgccacactcccggtcgcagtgtggtttggggctacagagcgcagactgcagcgggggcagttcaagtacacgctggaccccaacattacttcagccgggcctaccaaatcattcttgtccggcggcagggagatctgcgtacgcggacagaatttagacgtggtgcagacccccagaatacgcgtaaccgtggtctccagaatgctgcaacccagtcagggcttggggcggagacgccgggtggtacccgagaccgcttgtagcctggggcccagctgctcttctcaacaattcgaggagccttgtcacgtaaactccagccagctcatcacctgtcgaacacctgccctccctggcctccctgaggatccgtgggtgagggtcgaattcattttggacaacttggtattcgacttcgctaccctaaatcccacacctttctcctacgaggcggaccctaccctccaacccctgaaccctgaggaccccaccatgcccttcaggcacaagccaggttccgtgttcagcgtggagggcgagaatctggacctcgcgatgtccaaggaggaagttgttgccatgataggtgacggtccctgtgttgtcaagaccctgacacgacatcatctctattgcgaacctcctgtagaacagcccttgccgcgacatcatgctctgagggaggctcccgattcattaccagaattcactgttcagatgggtaatcttcgattttcactcgggcatgttcagtatgacggtgagtcaccaggggcattccccgtggcggcacaagtaggactaggtgtgggcacgtcactactggctctgggagtgattatcatcgtgctaatgtaccggcggaagtctaagcaagccctccgagactacaagaaagtccaaattcagctagagaacctggagagcagtgtgagagatagatgtaaaaaggagttcacagatttaatgaccgaaatgactgacctcacgtccgatttactgggctcggggataccgtttctggactataaggtttacgcggagaggatctttttcccgggacatcgggaatctccactccatagggacctgggggtgcctgagtcgcggagacccacagtggagcaaggtctggggcagctgtccaacctcctgaactccaaactgttcctaaccaagtttatccatacgctcgagtcacagcgcacattttccgcccgggacagagcctatgttgcgtccttgctgaccgtagctctccacggcaagttagagtactttaccgacatactgagaacactgctttcagacctcgttgcacagtatgtagccaagaacccgaagttaatgctccgacgaacagaaaccgttgttgagaagctgctcaccaattggatgagcatttgcctgtacacatttgtgcgggactccgtaggcgaacctctctatatgttgtttcgaggtatcaagcaccaagttgataaagggccagtggattcagtcacagggaaggccaaatacacccttaacgacaataggcttctgagagaggacgtagaatatagacccctgaccctcaatgcccttttagctgtgggtcccggggcgggcgaggctcagggagtgcctgtgaaagtgctggattgtgacacaatctcacaggccaaagagaaaatgctcgatcagttatataagggcgtccccttgacacaaaggcccgatccgcggacactcgatgtggagtggcgctctggtgtcgcaggacacctcatcctgagcgatgaggatgtcacctccgaggtccagggtttgtggcgtaggctaaatactctacagcattataaggtcccagatggagcaacagtcgcccttgtgccctgcctaacaaagcatgtcctgagggagaaccaggattacgttcccggcgaaaggactcctatgttggaggatgtcgatgagggtggcatcagaccttggcatcttgtaaagccatccgacgagcctgaaccgcctcgacctcgccggggaagcctccgaggcggggaaagggagcgggccaaagcaatcccggagatctacctcacccgtcttctgagcatgaaaggtactttgcagaagttcgtggacgacctctttcaggtgatcctatccacctcccggccggtgcctctggccgtaaagtatttctttgacttactggatgaacaggcgcagcaacacggcatcagcgatcaagacacaatccacatttggaaaacgaatagcctgccactgaggttctggatcaacatcattaaaaacccccagttcgttttcgacgttcagacctcagacaatatggatgcagtactgttggttatcgctcaaacattcatggacgcctgcaccctggctgaccataaactgggacgggattcacctataaacaaattgctctatgccagagatatcccacgctataaacgcatggtcgagagatactatgcagatatcaggcagactgttccagcctcagaccaagagatgaacagcgtgctcgccgagcttagttggaactactctggagatctgggtgctcgagtggctctgcacgagctgtacaaatacataaacaagtactacgaccagattatcactgctttggaggaggacggcaccgcccagaagatgcaattgggttaccggttacagcagatagccgcagcagtcgaaaacaaggttaccgacctgtag

SEQ ID NO: 47525 - DNA, 2241 bp, Artificial Sequence
  derived and/or modified sequence
atgcccttccggcacaagcccggcagcgtgttcagcgtggagggcgagaacctagatctggctatgagcaaagaagaggtcgtagcaatgattggagacgggccttgcgtggtaaaaactctgaccaggcatcacctctactgtgaaccacccgtcgaacagccgctaccccggcaccatgcactaagggaggctcccgacagcctgcctgaattcacagtgcagatgggcaaccttaggtttagcctcggccacgtgcagtacgatggagaatcaccaggggccttcccggtggctgcacaagttggcctgggtgtagggactagcctcctggcccttggcgtaataataattgtgcttatgtaccggcgcaagagcaaacaggcattgagagactacaagaaagtgcagatccaactagagaacctcgaatcctctgttcgggaccgttgcaaaaaggagttcactgacctcatgacagaaatgacagatctgacaagcgacttgcttggctccggtattccatttttagactataaagtctatgctgagaggatcttttttccaggacacagggagagtccccttcaccgggacctgggcgtgccagagtcccgtagacctaccgtggaacagggcctggggcaacttagcaatcttctcaactcgaaactcttcctgactaagttcatccatactcttgagtcacaacgcactttttcagctagggacagagcttacgtcgcctctttgctgaccgtggcacttcacggaaaactagaatacttcactgacatactcagaactctcctgagtgacctagtggcacagtacgtggccaaaaatcctaagctgatgctccgcagaactgaaaccgtcgtggagaaactcctcactaactggatgtccatctgtctctacacgttcgtcagagacagcgtaggcgagcccctgtatatgttatttcgtggaatcaaacaccaggttgataagggccctgttgactcagtgactggaaaggccaaatatacactcaacgacaaccggcttctccgcgaagacgttgaatatcgtcctctaaccctcaacgccctactagctgtgggtcccggcgcgggagaggctcagggggtaccggtgaaggtgcttgattgcgatactatctcccaggctaaggagaaaatgctcgaccagctgtacaagggggtgccgttgacccagagaccagaccccaggaccctcgatgtagagtggcgatcaggtgtggccggccacctcatcctatccgatgaggacgtcaccagtgaagttcagggcttgtggcggcggttaaataccctgcagcattataaggtgcctgatggcgccaccgtcgcactggtaccttgtctcactaagcacgtcttgcgcgagaaccaggattacgtccctggtgagcgcacccccatgttagaagatgtcgatgaaggcggaataaggccttggcacttggtcaagccgtccgatgagcctgaacccccccgccccagaaggggaagtctgcgcggtggtgagagggagcgtgcaaaagcaatcccagaaatctacctgacgcgtcttctatcaatgaagggaaccctacagaaatttgtagacgaccttttccaggttatcctgagtacctcaagacctgtacctctcgctgttaagtactttttcgatctgctcgatgaacaagcccagcaacacggcatctccgatcaggacacaatccacatctggaagacaaacagtctgcccctgcggttttggatcaacattataaagaacccgcagttcgtgttcgatgtgcaaacctccgacaacatggacgccgtgctgctggtgatcgctcaaacatttatggatgcatgcaccctggccgaccataaactcggccgggactccccgatcaataagctcctgtacgctcgggacatcccaagatataaacgcatggtcgagaggtactatgcggacatccgccagacagtgccagcatccgaccaggaaatgaatagcgtactggccgagctcagttggaactactcaggagacctgggtgcccgggttgctctgcatgagctgtacaagtatataaataagtattacgatcaaattattactgcactggaggaagatggaacagctcagaaaatgcaactcgggtaccgactccagcagatcgcagccgccgtcgagaacaaagttacagacctttag

SEQ ID NO: 47526 - DNA, 5859 bp, Artificial Sequence
  derived and/or modified sequence
atgcccgccctgggccccgccctgctgcaggccctgtgggccggctgggtgctgacgctgcagcccttgccaccaactgcctttacccccaacgggacataccttcaacatctggccagggaccctacatccggaacactgtacctgggagccaccaacttcctgtttcagctgtcgcctgggcttcaactggaagctacagtgtcaacaggacctgtgctggattcccgggattgcctcccccctgtgatgcctgatgaatgcccccaggcccaacccaccaacaaccccaatcagctgttgctcgtcagtccgggcgcactcgtggtttgtggctcggtccatcagggtgtgtgtgagcagcgccggctgggccaacttgaacaactattgcttcggccagagcggccaggggacactcagtatgtagcagccaatgacccagcagtgtctacagtgggactggtcgctcagggattggctggtgagccactgctttttgtggggcgcggatatactagtaggggtgtcggaggcggaatccctcccattactacacgagccttgtggccgcccgatccccaagccgctttctcatatgaggagaccgccaaactcgcagttggccgacttagcgagtacagtcatcactttgtgtctgccttcgctcgaggtgccagcgcttactttctgtttctcaggagagacctccaagcccagagccgggctttccgggcttacgtgtcgcgcgtgtgcctacgggatcaacactattattcatatgtggaactgccgctcgcctgcgagggcggtcggtatggcctgattcaggccgccgcagttgccacatcacgcgaggtcgctcatggcgaagtgctttttgctgcttttagctccgccgctccaccaaccgtggggcgaccgcccagtgcagccgccggcgcctccggggcctcagctctgtgtgcattccctctggacgaggtggataggctggccaaccggactagggacgcgtgctatacccgagagggaagggctgaagatggtacagaggtggcctatatcgagtatgacgtgaacagcgactgtgcccagctccctgttgatactttagacgcttatccatgcggttcagatcataccccgagtcccatggcctcccgtgttcccctggaggcgacccctatccttgagtggcccggcatccagcttaccgccgtggctgtcaccatggaggatggccacaccatagcgttcctgggagactcccaaggacagttgcaccgtgtgtatctgggcccaggctctgacggccacccttatagcacccaatccatccagcagggaagcgctgtctctcgcgatttgaccttcgacggcacatttgagcacctttacgtcatgacccagtcgacgttgttgaaggtgcccgttgccagctgtgcacagcacctggattgtgcctcctgtcttgcgcaccgggatccctattgcggctggtgcgtcttattggggcgctgcagtaggcggtctgagtgctctcgagggcagggccccgagcagtggttgtggagctttcagcctgagctcggttgtctgcaggtcgcagcaatgtcacccgcaaatatctctagagaagagaccagggaagtgtttctgagtgtgccagacttgcctccgttatggccaggagaaagctattcgtgccattttggggagcaccagagtcccgcactgcttacgggtagcggggtgatgtgccctagccccgatccctcggaagctccagtcctgccacgcggagccgattacgtgtccgtctctgtcgaactccgtttcggtgctgtagtgatagctaagacatctctaagtttctatgattgtgtagccgttaccgagctgcggccatctgctcaatgtcaggcttgtgtgtctagtagatggggctgtaattggtgtgtctggcaacatctctgtacccacaaggccagctgtgatgccggccctatggtggccagtcaccagagccctttagttagcccagacccccctgccaggggtgatggggattccgcggagctagaaggacctcctgccccgctgatcctgccatcaagcctggactaccagtacgatactcccggcttatgggagctggaggaagctaccctcggtgcctcttcctgtccatgcgttgagtccgtccagggcagtacccttatgcccgtgcacgtggagagggaaatcagactcctggggcgaaatttacatctgttccaggacggaccaggcgacaatgaatgtgtaatggaactcgaaggcctggaggtggtcgttgaagccagggtggaatgcgagccgcctccggacacccagtgtcatgttacatgtcagcaacaccagctttcatacgaggctctgcagcctgaactgcgcgtcggattgtttttacggcgggcaggccgccttcgagttgattcagctgaggggttgcatgtggtgctatatgattgcagcgttggccatggggattgcagccggtgtcagacagccatgcctcagtacgggtgcgtttggtgtgagggtgaacgcccaaggtgtgttacccgggaggcatgtggtgaggccgaggctgttgccacacagtgtccggcacccttaattcactcggtggaacccctgaccggtccagtggatggaggtactagagttaccattagagggagcaatttaggacaacatgtccaggatgtcctgggcatggttacagtcgctggagtgccatgcgcggtggacgctcaggaatacgaagtttccagctcactggtttgcattacaggagcatcaggggaggaggtcgctggggccacagcggttgaggtccccgggagagggcggggtgtgagcgagcacgatttcgcttatcaggatccaaaggtgcattccatttttcccgctcggggcccgcgggccggtgggacacgcctcacgctcaatggtagtaaactgttaacagggagacttgaggatatccgggttgttgtgggcgatcaaccatgtcatctcctcccagaacagcagtctgagcagcttagatgtgagacatccccccggccgacacccgccactctcccagttgctgtctggttcggcgctaccgagcggcgactgcaaaggggccaatttaaatacactctagatcccaacatcacatccgccggccccacgaagtcattcctgtctggggggagggaaatctgtgtgagaggacaaaatctagacgtcgtgcagactcccagaatccgagtgaccgtagtcagccgcatgctgcagcccagtcagggcctcgggcggcgccgaagagtggtccccgagactgcctgcagcctgggaccctcatgcagctctcagcagtttgaggagccgtgtcacgtgaactcatctcaattgataacatgtagaactcctgctctaccaggtcttccggaagacccctgggtccgggtggaattcatcctcgacaacctcgtcttcgacttcgcaacgttaaatcctaccccatttagctacgaggctgacccgaccctccaaccacttaatccagaagatccgacgatgccttttcgacataaacccggcagcgtctttagtgttgaaggggagaaccttgacctcgcaatgagcaaggaggaagttgtcgccatgatcggagatgggccatgtgttgtgaaaaccctcacacgccatcacctgtactgcgaaccaccagttgagcagccgcttcctcggcatcacgcactgcgggaggctccagactcgctccccgagttcactgtacaaatgggaaacttgcggttctctctgggtcacgtgcagtatgacggtgaaagtcccggcgcctttcccgtggcggcacaggtgggacttggtgtgggcaccagccttctggctttaggcgtgattataattgtgctgatgtacagaagaaagtctaagcaggccctccgcgattataaaaaggtgcaaattcagcttgagaacctcgaatcgagtgtgagggatcgctgtaaaaaggagttcactgatttgatgaccgagatgaccgatctcacttcagacctgctgggttccggcatccccttcctcgattataaggtctatgcagagagaatcttctttccaggtcacagagagagccctctgcacagagaccttggagtgccagagtcccgccgccccaccgtcgaacaggggcttggtcagttgagcaatctgctgaactctaagttattcctgaccaaattcatccacacccttgagtcccagcgcactttcagtgcccgcgaccgagcctatgtcgcgtcccttcttactgtggcactacacggaaaactcgagtattttactgacatactacgtactctactttcggatctggttgcccaatacgtggcaaaaaaccccaaactgatgctacggcggactgagacagtggtagagaagctcctgacaaattggatgtctatctgcctgtacacgtttgtgcgcgactctgtgggggaacccctgtatatgcttttccgggggattaagcaccaggtcgacaaagggccggttgacagtgtgaccgggaaggctaagtacactctgaacgataatagactgttgcgtgaagacgttgaatacagaccactcaccctcaacgcattactggcagtgggtccaggcgctggagaggctcagggagtgcccgttaaagtgctggattgcgatacaataagtcaggcaaaagaaaagatgctggaccagttatacaaaggggtccctctgactcagaggcctgatcctagaactctcgacgtggaatggcggtccggagtggctgggcacctgattctgagtgatgaagatgtcacgtctgaggtccaagggctctggagaagactcaacacacttcaacactacaaggtgccggacggcgcgactgtggcactggtgccatgcctcacgaaacacgtcctgagggagaatcaggactatgtccccggagagaggacccccatgcttgaagatgttgatgagggcggaatccgaccatggcatctggttaagccttctgatgaacccgagcctccgcgtccccggcgcggctcactcagaggcggggaaagagagcgcgctaaggctatccccgagatttacctgacaaggctgttgagcatgaagggaaccttacaaaagttcgtcgacgacctttttcaagtgatcttaagcacctctagaccagtcccgctggctgtcaaatatttttttgatctgttggacgagcaggcacaacagcacgggatctccgatcaagataccatacacatctggaagacaaactcacttccactgagattttggatcaatattattaagaaccctcaattcgtctttgacgtacagacatccgataacatggacgcagtgttgttggtcatcgcccagactttcatggacgcctgtacacttgccgatcataagctgggccgcgattcgcccattaataaactcttgtatgcccgggacatcccaagatataaacgaatggtggagagatactacgccgatatccgacagacagtgcccgcttctgaccaggaaatgaacagcgtcctcgctgaattgtcctggaactactccggtgacctcggggcccgggttgctctgcacgagctgtataaatatatcaataagtactacgaccagattatcacagccctggaagaagacggcacggctcaaaagatgcagttaggctacagattgcaacagattgccgctgctgtagagaataaggtgactgatctatag

SEQ ID NO: 47527 - RNA, 6408 nt, Artificial Sequence
  derived and/or modified sequence
augccggcacugggcccugcacuucuccaagcguuaugggcagguuggguguuaacccugcagccccugcccccaacggccuuuaccccgaacggaacauaucuccagcaucuggcgagggauccuaccagugggacacuguaucuaggagcaacaaacuuucuguuccaguugucaccggggcuucaguuagaagccaccgucuccacgggcccuguguuggacucucgugauugucugccucccgugaugccggaugaguguccccaggcacaaccuacgaacaaccccaaccagcuccuacugguuuccccuggcgcccugguggucugugguucuguccaccagggagugugugagcagagacggcuaggccaacuugagcagcuacuguuaaggccagaaagaccaggcgauacccaguacgucgcugcuaacgacccagcuguuagcacagucggccucguugcgcagggacuagcaggcgaaccucuuuuauucgugggcagggguuauaccagcaggggagugggaggugggauuccucccauuacgacacgcgcguuguggccccccgacccccaggccgccuucuccuacgaagaaaccgcaaagcuggcaguuggcagauuguccgaauauucacaucacuuugugucugccuucgcccggggggcaucagcuuacuuucucuuucugcgccgggaucuccaggcccagagccgagcuuuuagggcuuauguguccagagucugucuccgugaucagcauuauuacagcuacguugaauuaccauuagcaugcgaaggaggaagauauggguugauucaggccgcugcuguugcuaccucccgggagguagcacauggugaggugcuguucgccgcguucucuucugccgcgccaccaaccguuggccgaccccccuccgcugccgcaggugccucaggugcuagcgcacugugugcauucccguuagacgagguggacaggcucgccaaccgcacuagggaugccuguuacacccgagagggaagggcagaagacggcacagaagucgcuuacauugaguaugaugucaauucugacugcgcacaauuaccaguggauacacucgacgcuuaccccugcgguucagaccauacgccaaguccuauggcgucaagagucccucuggaagccacaccaauuuuagaauggccuggcauucagcugacagcagucgcagugaccauggaggacggccacacuauagccuuuuuaggcgauucacaggggcagcugcaccggguguaccugggucccgggagugacgggcacccguauaguacucagagcauucagcaaggcagugcugucucucgggaccugaccuucgacggcacauucgaacaccuguaugugaugacccaguccacacugcugaaggugccuguggcgucaugcgcacaacacuuagauugcgccaguugucuggcacaccgagaucccuacugcggauggugcgugcuccugggacggugcucuaggcgguccgaguguaguagagggcaggggccugaacaguggcucuggucauuccagccagagcuggggugucuacaggucgcggcuaugagcccagccaauaucucccgugaggaaacaagagaaguguuucucuccgucccugaucuaccaccacuuuggccaggggagagcuacagcugucacuuuggcgaacaccagucuccugcccuucugaccgguuccggagugaugugcccaucgcccgaccccucugaggcucccguacugccccgcggcgccgauuauguguccguuaguguugagcuaagauuuggggcuguuguuauagcaaagacuagucuguccuucuaugacuguguugcuguaaccgaacuucgaccaucagcccagugccaagccugcgugucuuccagaugggguugcaauugguguguguggcagcaccugugcacucacaaagcgucaugugacgccggccccauggucgcaagucaccagaguccccucgugagcccagacccgccagcuagggguggcccuucccccucuccccccacagcuccuaaggcccuugccaccccagcucccgacacuuugccuguggagccuggugccccaaguaccgccacagccagugacaucucccccggcgcaucccccagccuccugucucccuggggcccuugggcgggcucaggcucuaucaguucuccagguucaaccgggucuccccuacacgaagaacccuccccccccagcccacagaauggcccugguacugcugucccagccccaacugacuuucgaccuuccgcgaccccagaggaucuucuggccucaccucucuccccuagcgaaguggcugcuguuccucccgcagauccuggcccggaggcacuacauccuacagugccccucgaccucccaccagccaccguccccgccacuaccuucccaggggcuaugggauccguaaaaccugcccuggauuggcugacacgcgaaggaggugaguuaccugaagcugacgaauggacuggaggagaugcgccagcauucagcacauccacacugcuuagcggcgauggagauagcgccgaacuggagggcccgccagcccccuuaauucucccaaguucguuagauuaucaguaugacacaccagggcugugggaguuagaggaggccaccuuaggcgcaagcucuugccccugcgucgaguccguucagggaucaaccuugaugcccguccacguggagagagaaauucggcuccuagggcgaaaucugcacuuguuccaagauggaccaggagacaacgaauguguuauggagcuggaaggacuugaaguuguuguagaggccaggguggagugcgagccuccaccagauacccagugccaugugaccugucaacagcaccagcuaagcuacgaggcccugcaaccagaacucagagugggucucuuucugagaagggccggacguuugcgcgucgacucugccgagggccugcauguaguguuauacgauugcagugugggccauggugauugcuccaggugccagaccgccaugccccaguacggcuguguguggugcgagggggagaggccuaggugcgucacuagggaagccuguggugaggcagaagcugucgccacucaguguccugccccuuugauccacagcguggaaccacugaccgguccaguggauggcggcacacgcgugaccauucgggggagcaaucucgggcagcacguccaggacguccuuggaauggucaccgucgcuggugugccuugcgcuguggaugcucaggaguacgaggucucaucgucacuugugugcaucacuggcgcauccggagaagagguugcuggugcgacagcuguggagguuccagggcgaggaagaggggugucugagcaugacuucgccuaccaggaccccaaagugcacaguaucuucccugcucguggcccgcgcgccggcggcacacgacuuacccugaauggcucaaaguugcucacggggaggcuugaggauaucagaguuguugugggagaucaacccugucaucuucugcccgagcagcaaucagagcaacugcguugcgagacauccccucgaccaacaccugcaacccugcccgucgccguuugguuuggcgccacugaacggagacuccagagaggucaguucaaauacacucucgacccaaauaucaccuccgcagggccuacuaaaagcuuccugagcgguggacgggaaaucugcgugagggggcagaaccuagaugugguacagacgccaaggauuagaguaacaguugugucacggaugcuacagccgagucagggauuaggacggagacggcgcguugugccugagaccgcuuguucuuuagggcccagcuguuccagucagcaauucgaagagccaugccacgucaauucaucccaguugauaacgugucguacccccgcacugcccggucucccugaggaccccuggguaagaguggaguuuaucuuagacaaucucgucuucgacuuugccacccucaacccaacucccuuuucuuaugaggcggacccaacauuacagccccugaauccugaagacccuaccaugccauuccgacacaaaccugggucugucuucagcguggaaggagagaaccucgaccuugcaaugucuaaggaagaaguggucgccaugauaggagacgggcccugcguugugaaaacccucacccgucaccaucuguacugugagccaccuguggaacagccucuuccccgacaucaugcgcucagggaagccccggauucccuaccagaauucacagugcagaugggcaaccugcgguuuucucugggccacguacaguaugauggcgagaguccaggcgcauucccagucgccgcgcagguugggcugggggucgguacuucccuccuggcccuagggguaauuaucaucgucuuaauguaucggagaaaauccaaacaagccuugagagauuauaaaaaggugcagauacaguuggagaaccuggaguccagcguaagagaccgauguaaaaaagaauucacugaucucaugaccgaaaugaccgaucuuacaagcgaccuccuugguucagggauaccauuccuugacuacaagguauacgcggagcggauuuuuuucccagggcaccgagaguccccccugcaucgagaccugggugucccagaaucacgccggcccaccgucgaacaagggcugggucaacugagcaaccuccugaacagcaaacuuuuccuuacaaaauucauccauacucuggagucucaacgcaccuucucagccagggauagagcuuacguggcgaguuugcugaccguugcccugcacggaaaacucgaguacuuuacugacauucuacguacccuguuaagugauuugguggcccaguauguugcaaaaaauccuaaacugauguuacgacguacugagaccguaguagagaagcuccugaccaacuggauguccaucugccuguacaccuuuguacgcgauagcgugggagagccacucuacaugcuguuccggggcaucaaacaccaggucgacaaggggccgguggacagcgugaccgguaaggcuaaauacacgcucaacgauaaucggcugcucagagaagacguagaguaccggccguuaacucucaaugccuugcucgccgucggcccuggagcuggcgaggcucaaggugucccugugaaagugcuagacugugacaccauuucccaagccaaagaaaaaaugcucgaucaacuguacaagggugucccauuaacccaaagaccggacccacgaacucuggaugucgaguggcgaagcggcguugcuggccaccucaucuuauccgaugaggacgugacgucugaaguucaagggcuguggcggagacucaauacucugcaacacuacaaagugccagauggcgccacgguggcccucgugccaugccugacuaagcauguccuccgugaaaaccaggacuacgugccuggcgagcguacuccaaugcuggaagacguagaugagggcgggauccgcccauggcaucuggucaaaccguccgaugaaccugaaccuccucguccgaggcgaggaucauugcgggggggcgagagagaacgcgcaaaagcaaucccugaaaucuaucuuacuagacugcucucaaugaaaggaacccugcagaaauuuguggacgaucuauuccaggugauccuaucgacaagccgaccuguaccacuggccguuaaguacuucuucgacuuguuggaugagcaggcccaacaacacggcauuagcgaccaggacacaauccauaucuggaagacuaacucucugccucugcguuucuggaucaauaucauuaaaaauccccaguucguguuugacguucagaccucugacaauauggaugccguucuccuagucauugcucagacuuuuauggacgcaugcacccuugcugaccacaagcugggaagggacagcccuaucaauaaacugcuguacgccagggauaucccacguuauaaacggaugguagagcgauacuacgcugauauacggcagaccgugcccgcauccgaucaagaaaugaacuccguccuggccgaauugucuuggaauuauuccggggacuugggagcucgugucgcccugcaugaacuguauaaguauauuaacaaguacuaugaucagauuaucacugcccucgaagaagauggcacagcccagaaaaugcaguuaggguauagacugcaacagauagccgcagccguagaaaauaaggugacugaucuuuag

SEQ ID NO: 47528 - RNA, 5859 nt, Artificial Sequence
  derived and/or modified sequence
augccugcccugggccccgcguuguugcaggcccugugggccgggugggugcugacacugcagccacugccuccgaccgcuuucacaccuaauggcacauaccuacagcaccuugcucgggauccgacgagcgggacccuuuaccugggagccacaaacuucuuguuucaauuguccccuggacugcaguuggaagcgacaguuuccaccggucccguuuuggauaguagagacuguuugccuccggugaugcccgaugaguguccccaggcccagccuaccaauaacccaaaccaguuguugcugguuagcccgggggcccucguugucugugggagcguucaccaggguguaugcgagcagagacgucugggacagcuggaacagcuccuccuccggccugaaagacccggagauacacaguacguggcagcuaacgaucccgccgucucgacagucggauuaguugcccaagggcuggcaggcgagccacugcuuuuugucggaaggggguauacgucacgaggggucgguggaggcauaccaccaaucaccacaagagcuuuguggccacccgacccucaagcugcauuuucauaugaggaaacagcgaagcuggcuguggggagacugucggaguauagccaucauuucgugucagccuucgcgagaggcgccucugcuuauuuccuguuucuccgccgggaucuccaggcccagucccgcgccuuucgugcauaugugucuaggguuuguuuaagagaccaacacuacuacagcuacguagaacuuccccuggccugugaaggcgggcgauauggauuaauccaggccgccgcuguggccaccucacgggagguugcccauggggaggugcuuuucgcugcuuucagcucagcagcccccccuacuguugggaggcccccgucugcugccgccggcgcauccggagccagugcccugugugcauucccacuggacgaaguugaccgccuagcaaacagaacucgcgacgcaugcuacacucgagaaggcagggccgaggacgggacagagguggcguacaucgaauaugacgugaauucagacugugcucaguuaccaguagacacucuggacgcauaccccugcggaucugaucacacaccauccccgauggcuucacgggugccacuugaggccacuccaauucuugaauggccuggcauacagcuuaccgccguggccgucaccauggaagauggucacacuaucgcuuuccucggcgauagccaggggcagcuccauagagucuauuuagggccagggagugauggucacccuuauagcacacaaucaauucaacagggcucugccguuucgcgggaucugacuuuugacgguacuuucgaacaccuguaugugaugacucagucuacccugcugaaaguuccaguggccuccugcgcccagcaccucgacugugcaaguuguuuggcucaucgugaucccuacuguggauggugcgugcucuuaggucgauguagccgacggucggaauguagucgcggacaggggccugaacagugguugugguccuuccaacccgaacuggggugucugcaggucgccgcuaugucccccgcaaauauaucccgggaggaaacacgagagguguuucugucugucccagaucucccuccccucuggccgggagagucuuacucaugccacuuuggggagcaucaaagccccgcccugcugacugguaguggggucaugugcccaagcccagaucccucugaggcacccgugcugccucgcggagcagauuacguaagcguguccgucgaacuccgguucggggccgucgugaucgccaagacaagucuaagcuucuaugauugcguugcgguaacagagcugcgaccgucugcacagugccaggcuugugugucuucccgauggggcuguaauugguguguguggcagcacuuaugcacccauaaggcguccugugaugcuggucccaugguggcaucucaucagucuccucuggugucucccgauccacccgcacgaggagauggagacuccgcugagcuugaaggccccccagcacccuugauucucccuuccucacuggacuaucaauaugacaccccaggcuuaugggagcucgaagaggccacccuuggcgccaguucaugcccuugcguggaaaguguucagggauccacccucaugccugugcacgucgagcgugagauacgccuucucgggcgcaaucugcaucucuuccaagacggccccggggacaacgagugcgugauggagcuggagggacuggaaguggugguggaagcacggguggagugcgaaccacccccugauacccaaugucacgugacuugccagcagcaccagcugaguuacgaggcccugcagccagagcuacgcgugggucuuuuccuucgccgagcuggccgauugcggguggauagcgcugagggauuacacgugguacucuaugacugcuccgugggacacggcgauugcucgagaugccagacggccaugccacaauacggcuguguguggugugaaggagagagacccagaugcgugacccgcgaggcgugcggagaagccgaggccguggccacccaguguccagccccgcugauccacuccgucgagccuuuaacaggucccguggauggggguacccgaguuaccauacgcggcagcaaccuaggccaacauguucaggaugugcucgggauggucaccgucgcaggagugccgugugccguagacgcucaggaauaugaagucuccuccucccuuguuugcauuaccggagcgaguggcgaagaagucgcuggggccacugcaguggaggugccuggcagagggaggggagugagcgagcacgacuucgcauaucaggaccccaaggugcauuccaucuuuccagcgagagguccccgagcugguggaaccagacuaacccuuaauggaucuaagcugcucaccgggcgccuggaggacauuagggucguagucggcgaccagccuugucauuuacuuccagagcagcaaucggagcagcugcggugugagacaucucccagaccaacacccgccacgcugccagucgccgugugguucggagcuacagagagaagguuacagcgcggacaguuuaaguauacgcucgacccaaacaucacauccgcuggcccaacuaagagcuuucugagcggggggagggagauaugugucagaggucagaaucuggacguagugcagacaccuaggaucagagugacugucguuucaaggaugcuccagccaucgcagggcuugggucgcagaaggcgagucguuccagaaacagccuguucccuuggcccuuccuguuccucacagcaguuugaagagcccugccacguaaacuccagccagcugauuaccugucguacuccugcccugccuggauugccugaggauccaugggugaggguagaguucauucuugacaaucuggucuuugauuuugccacccuaaacccgacaccuuuuuccuacgaagcagaccccacccuccagccucuaaacccugaagaucccaccaugccuuucagacacaagccuggcucaguguuuucuguugagggcgagaaccuugaucuggcaaugucuaaagaggaaguuguugccaugaucggagacggaccaugcgucguaaagacccugacccggcaucauuuauauugugaaccaccuguggaacaacccuugccacgacaccacgcccugagagaggcuccugauagccuucccgaauuuaccgugcaaaugggcaacuugagauuuucauuaggacauguacaguaugacggagaaucuccaggggcguucccuguggcagcucaggugggccuggguguuggaacaucccuuuuggcucuggguguaauuaucaucguguugauguaccgaagaaagucaaagcaggcccugcgugauuauaagaaaguacagauccaguuggagaaccuggaguccucagugcgcgacagguguaaaaaggaguucacugaccuaaugaccgaaaugacggaucuaaccuccgaccugcuggguucaggaauccccuuuuuggacuacaagguguaugcugaaaggaucuuuuuuccgggacacagggaaagcccuuuacauagagaucuagguguuccugaaucacgacgcccaacuguggagcagggccuggggcagcuauccaaccuccucaauagcaaacuauuccugaccaaguucauucauacccuagaaucgcagcgcacauuuagugccagggauagggcauauguggcuucucuccugacgguggcucuccacggcaaacuggaguauuucacggacauccugagaacccugcuauccgaccucguggcgcaauauguugcaaagaacccaaagcucaugcuccgccggacugagaccgugguggagaagcugcugacuaauuggaugagcauuugucuguauacauuuguucgcgacucagugggugagccacuguauauguuauuccgggguaucaaacaccagguggacaaagggccugucgauagcgugacuggcaaggccaaguacacucucaaugauaacagacuccugagagaggauguggaguacagaccgcuuacucuaaaugcucugcucgcugugggaccaggcgccggcgaggcccagggagugccggugaaggugcuggauugugacacuaucucacaggcuaaggagaaaaugcuagaccagcuauauaaaggcgucccacucacgcagaggccagacccccggacauuggacguggaguggcggucaggcguggccggacaccuuauccugagcgacgaggacgugaccagcgaggugcaggggcuguggagaagacugaacacccuccagcauuacaaggugccugauggugcuacuguggcucucguccccugucugaccaagcacguauuacgagagaaccaggauuacgugcccggcgagcggacccccaugcuggaggacguggaugagggcgggauuaggccauggcaucuggucaaaccuucggaugagccggagccaccacgaccacgccguggcagccucagaggaggcgaacgcgagagggccaaggccauacccgagauauaucugacuagacugcugaguaugaaagggacacugcaaaaguuuguagaugauuuauuccaggugauccugucuacaagccgcccuguucccuuagcagugaaauauuuuuuugaccuguuagaugagcaagcccagcaacacgggauaucagaccaggacaccauucauauauggaaaaccaauucccuuccgcucagguuuuggaucaacauaaucaagaauccgcaguucguguucgacguccagacaagugauaauauggacgcaguccugcuggucauagcacagaccuucauggaugccuguacucuggcugaucacaaacuaggcagagacucuccgaucaacaagcugcucuaugcacgagacauaccgagguauaagagaaugguggaaagguacuacgccgacaucagacagacagucccagcuagugaccaggagaugaacucggucuuggcggaauuauccuggaauuacuccggagaucucggcgcccgagucgcauugcaugaauuguauaaauacauaaacaaguauuacgaucaaauuauaaccgccuuagaggaggacggaaccgcccagaagaugcaacugggguaccguuuacagcagaucgcagcugcaguugagaauaaaguaacugaucuguag

SEQ ID NO: 47529 - RNA, 6408 nt, Artificial Sequence
  derived and/or modified sequence
augccggccuuagggccugcucuacuucaggcccuaugggcaggcuggguccuuacgcugcagccacugcccccuaccgccuuuaccccuaacggcaccuaucuccaacaccuggcuagagacccuacgagcggcacccucuaucugggcgcaaccaauuuuuuguuucaauuaaguccugggcuucagcuggaagcaaccguaagcacuggcccggugcuugacuccagagauuguuugcccccggucaugccagacgaaugcccacaggcgcaaccuaccaauaauccaaaccagcugcugcuugucagcccuggugcccugguaguuugcggcagcguucaucagggugugugugaacagcgacgccucggacagcucgagcaauuacuacugcgucccgagcgcccaggugacacucaguauguugcugcuaacgacccugcagugucuacagugggccuggucgcucagggccuggccggggagccuuuauuguuuguuggacgggguuacacuaguaggggcguaggugguggaaucccaccgauuacuacuagagcucuauggcccccugacccacaagcagcauuuagcuaugaggaaacugcgaaacuagccgucgguagacucucugaguacucccaucacuucgugucugcuuuugcuaggggugcaucagccuauuuccuguuucugcggcgggacuuacaggcucagucccgggccuuccgcgccuacgugucgcgagugugucugagggaccagcacuacuacagcuacguggaacugccauuggcgugcgagggcggaagauacgggcugauucaggcggccgcuguggccacaagccgggagguggcccauggcgagguuuuauucgccgcauucagcuccgcggcaccucccacagugggccgaccucccuccgcugcagcuggggcaucaggugcaucagcucucugcgcuuuuccccucgacgaaguagaucgccuggcuaacagaacacgcgaugcguguuauacccgagaaggaagagcggaggauggaacagaaguagccuacaucgaguacgacgucaacagugacugcgcacagcugcccguggacacgcuggaugccuacccuuguggcagcgaucacacucccagucccauggcaagucgcgugccgcuagaggcaacaccaauucuagaguggccuggaauccaacuuaccgcagucgccgugacaauggaagacggucacacaaucgccuuucugggagacagccaaggacagcuucauaggguguaccugggaccaggguccgauggacauccuuacucgacucagucuauucagcaggguagcgcugucucaagagacuugaccuuugauggcacuuuugagcaccuauacgugaugacacagucuacccugcuuaaggugccggucgcuuccugcgcccagcauuuggauugcgcaagcugccuggcacacagggauccauauugcggguggugcgugcuguuggguaggugcuccagacgcucugaauguucucgcggccaggguccugaacaguggcuguggaguuuucagcccgaacuagggugucuucagguggcugcuauguccccugcuaauauaagucgcgaagaaacaagagaggucuuucuuagcguacccgaccuuccaccucuguggcccggggaguccuacaguugccauuuuggagaacaucaaagcccagcacuccuuaccggaucaggcgucauguguccaucuccagacccuuccgaagccccagugcugccuaggggggccgacuacguaagugucagcguggaauuaagguucggugccguagugauugcgaaaacaagccugaguuucuacgauugcguugcuguuaccgaguuacgcccuagcgcucagugccaagcuuguguuaguucucgauggggauguaacuggugcguuuggcagcauuuauguacucauaaggccucuugcgacgccggccccaugguggcuucccaucagaguccuuuggugagcccugaccccccugcacggggcggaccgagcccaagcccccccaccgccccaaaggccuuagcuaccccggcucccgacacccugccaguggagccaggggcccccucuaccgcaaccgcgucagacauaaguccgggggcuucuccaucacuuuugucucccuggggaccaugggcagggaguggguccauuuccucccccggcuccacugguaguccccugcaugaagaaccgucuccuccaagcccucagaaugggccgggaacagccgugcccgcaccaacugauuuccggcccuccgccacuccagaagaccuccuggcaucaccucucucucccagcgaggucgccgccguaccaccagcugaucccggcccagaagcguugcacccuacagugcccuuagaucuuccucccgcuacaguccccgcuacaacuuucccaggagcaaugggcuccgucaagccagcgcuggauuggcugacccgggaaggaggcgaacucccugaagcagaugaguggacaggcggggacgcucccgcauuuagcacaaguacucuccuauccggcgauggagauuccgcugagcuggaaggcccgccagcaccccugauucugccuaguagccuggauuaucaguaugacacccccggacucugggaauuggaggaggccacccugggcgcuuccaguugccccugcguugaguccgugcagggaucuacucucaugccuguccacguggaacgggaaauacgccuccucgggaggaaccuucaucucuuccaggacggcccaggugauaaugaauguguuauggaguuggaggggcuggaagucguggucgaggcuagaguggagugugagccucccccagacacgcagugccacguuaccugccagcagcaucaacugagcuaugaagcccugcagcccgaacugagggucgggcuguuccuuagaagagcaggcagguugcggguggauucagcugaggggcuccacgugguguuauacgacuguaguguaggacauggugacugcucucguugucaaacggcaaugccacaguaugguugcguguggugugaaggcgagaggccccgcugugucaccagagaggcgugcggcgaggccgaagcuguggccacccaaugccccgcaccacugauucacagcguggaaccucugacuggacccguggacggcggaacacgagugacaauccguggcaguaaccucggacagcauguacaggacgugcuggggauggucacaguggccggagugccgugugccguugaugcgcaggaguacgaggucucgucuagucuuguguguaucacgggcgccucuggagaggagguugcuggugcaaccgcaguggaagugcccgggcgcggaagaggcgucagugaacaugacuucgcuuaccaggaccccaaagugcacucuauuuucccggcgaggggaccccgcgccggaggaacuaggcuuacauuaaacggaaguaaacuuuugacuggccgacuggaagacauucgaguggucgugggggaucagcccugucaucugcugccugaacagcagucugaacagcugcgaugugagaccagcccacgcccgacgccugccacacugccuguggcagugugguuuggagccaccgaacggaggcuccagaggggccaauucaaauauacccuagacccuaacauuaccucagccgggcccacaaagaguuuuuuguccggcggucgggagauuugcgugaggggccagaaucucgauguggugcagacacccagaauuagggugacagucguaagccgaauguugcagccgucucaaggccugggaaggcgucggagagugguuccugagacagcauguucucucgggccuucuugcaguagucagcaguuugaagaacccugucacguuaacucgagccaacugaucacaugccgcacgccagcacugccuggccucccagaggaccccuggguacgaguagaguuuauuuuagacaaucugguuuucgacuuugcuacccuaaacccuacacccuuuucguaugaagcugauccaacacuacagccccuaaaccccgaagacccuaccaugccguuucgacauaagcccggcucuguuuuuaguguggagggagagaaccuugacuuggcuaugucgaaggaggaggucguggccaugauaggagauggaccuugcgucgugaaaacucugacuaggcaccaucucuacugcgaaccuccaguggagcagcccuugccucgacaccaugcacuccgcgaagcuccggacagccugccugaguucacagugcagauggggaacuuaagauuuucccucggccacgugcaguacgauggcgaaucuccaggcgcauucccagucgccgcccaggucggacugggagucggcaccagccuguuggcccuuggcguuauaauuaucgugcuuauguaucguagaaaaagcaaacaggcucucagagauuacaaaaaggugcagauucagcuggagaacuuggaaucuucugugagagaucggugcaagaaggaauucacagauuuaaugaccgaaaugacugaccucacauccgaccugcugggguccggaauuccuuuucuggauuauaagguguacgccgaacgcauauuuuuuccggggcacagagagagcccauugcaucgcgaccugggugugccugaaagcaggcgaccaacgguggagcagggacucggccagcucucaaaucuguugaacagcaagcucuuccuuacaaaauuuauccacacucuggaaucccagcggaccuuuagcgccagagaccgcgcuuacguugcaucacugcugacuguagcccugcacgggaagcuggaauauuuuacagacauccuccggacucuccugagcgaucucguggcccaguacgucgcgaagaaccccaaacuuaugcugaggcguaccgagaccgugguggagaagcugcugacgaauuggaugucgauuuguuuauauacguucgucagagacucagucggugagccacuguacaugcuguuucgcggcauaaagcaucaggucgacaaaggaccaguggauucaguaaccgggaaggccaaauauacucucaacgacaacaggcuucuucgggaggacgucgaguacaggccgcucacacugaacgcucuccuagcaguugggccuggcgcuggcgaagcacaaggagugccuguaaagguucuggacugcgacaccauuucccaagcuaaagaaaaaaugcucgaccagcuguacaagggcgucccacugacccagaggcccgacccucgcaccuuggauguagaguggagaucaggcguggccgggcaccuuauccugagcgacgaggaugugaccagugaggugcagggccuauggaggagacucaacacacuucagcacuacaagguuccagauggcgccacaguugcccuuguaccauguuugacaaagcauguacuucgagagaaccaagauuacguccccggugaacggacucccaugcucgaagacgucgaugaaggcggcaucagaccauggcaccucgucaagcccagcgaugaaccagagccccccaggccucgaaggggaucccugagagggggcgagcgcgaaagagcaaaggcuauuccagaaauuuaucuuacccgccuauugucuaugaagggaacucugcagaaguucgucgaugauuuauuccagguaaucuugucuaccaguaggcccgugccccucgccgugaaguacuucuuugaucucuuagacgaacaggcgcaacagcacggcaucuccgaccaagacaccauucacauuuggaagacuaacagccuuccucuccgauuuuggaucaacaucauuaagaauccacaauuugucuucgaugugcagacuuccgauaacauggacgcagugcuucucgugaucgcgcagaccuucauggaugccuguacucucgcggaccacaagcucgggagagauucacccaucaacaaguuguuguacgccagggauauccccagauauaaaagaauggucgagagguauuaugcagacaucaggcagacugugccagcuuccgaccaagagaugaacaguguacuggcagagcugagcuggaauuacucuggugaccuuggcgcccgcguggcacuucaugagcuguauaaauacauaaauaaauacuacgaucagauuaucacugcccuggaagaagacgguaccgcucagaagaugcaacugggguacagacugcagcaaauugcagcugcugucgagaauaaaguuacagaccuguag

SEQ ID NO: 47530 - RNA, 2241 nt, Artificial Sequence
  derived and/or modified sequence
augccuuuucggcacaagccugggucugucuuuagcguggagggcgagaacuuagaucuggcuaugucaaaagaagaaguaguggcuaugauaggagaugggccauguguggugaagacauugacuaggcaccaucuguacugcgaacccccuguggagcagccacuccccagacaccacgcccugcgcgaggcuccugacucuuugccggaauucacaguacagaugggaaaucugagauucucucucggccaugugcaguacgauggagaguccccuggugcauuuccgguugcggcacaggugggguugggaguuggaacaucccuccuggccuuaggcguuaucauuaucgugcuuauguauaggcguaaaaguaagcaggcccugagagauuauaaaaaaguccagauacagcucgaaaacuuggaauccuccguucgcgaucgcuguaaaaaggaauucacugacuuaaugaccgagaugacugaucucacgagugaccuauuggguuccgguauaccauuucuggacuauaaaguguacgcggagcguaucuucuuuccaggccauagggagucaccccuucacagagaccugggcguucccgaaaguaggagaccgaccgucgaacagggucuugggcaguuaagcaaucuccugaauaguaaacucuucuuaacuaaguuuauucauacgcucgaaucccaacggaccuuuucagcacgagaucgcgcauacguagcaagccuucucacugucgcacugcacgggaagcuggaguauuucaccgauauccuccggacacuccuuuccgaccugguugcccaauaugucgcaaagaauccaaaguugaugcugcgccgcaccgaaacagucguugagaagcugcuaacgaacuggaugucgaucuguuuguacacguuuguucgcgauucugugggggagccgcucuacauguuguuucgcggaaucaagcaccaaguugacaaagggccaguggauuccguaacagggaaggccaaauauacccugaaugacaauagauuauugagagaagauguggaauaucgcccgcucacauugaaugcauuguuggccguggguccuggcgcuggcgaggcucagggcguuccugucaaaguccucgacugcgauacuaucagccaggcaaaggaaaaaaugcucgaucagcuuuacaaaggugugccccuaacacaaaggccugacccccgcacccuggacguggaauggagguccggcgucgcaggccaccuuauccucucugacgaagauguuacuagugaagugcagggacuuuggcgcagacugaacaccuugcagcacuauaaagugccggauggggcuaccguugcccucgugccgugccugacuaaacacgugcuaagagaaaaucaggauuacgugcccggcgagcgaacucccaugcuggaggacguggacgagggaggaauccguccuuggcaccuugucaagccaagugacgaaccagaaccaccacgcccuagacgaggcucacuccgagggggugaacgcgagcgcgcuaaggcgauuccugagaucuaccugacccgucugcugucaaugaaagguacgcuucaaaaauucgucgaugaucuuuuccagguaauucucucuacaucucgaccugugccccuugccgugaaguauuuuuuugaucuuuuagacgaacaggcucagcagcacgggauaucggaccaggauaccauucacauauggaagacuaacucgcugccccuaagguucuggauuaauauuaucaaaaauccacaguucguguucgacgugcagaccucugauaauauggacgccguuuuacucguuaucgcacaaacuuuuauggacgcauguacccuggcagaucacaaacucggacgagacucacccaucaauaagcuccuauaugcuagggacauuccucgcuacaagagaaugguggagagauacuaugcagauauucgccaaacaguuccugccagugaucaggaaaugaauucaguguuggccgaacucagcuggaacuauuccggggaucuuggcgcgcgaguggcccuucaugagcuuuauaaauacauaaacaaguacuacgaccaaauuaucacugcacuggaggaggacgguaccgcccaaaaaaugcagcucggcuacagacugcagcagaucgcagcggcuguggagaauaaagugacagaccuuuag

SEQ ID NO: 47531 - RNA, 5859 nt, Artificial Sequence
  derived and/or modified sequence
augccagcucuggggcccgcacuacugcaggcacucugggccggaugggugcucacucuccagccgcuacccccaaccgcauucacuccaaaugggacguaucuucagcaccucgcuagagaucccacaagcggaacccuguacuugggcgcaacaaacuuucuguuccaacuuucccccggauugcagcucgaagcaacagugucaacaggaccgguacuggauucuagagauugcuugccuccugugaugccggacgaguguccccaggcccaaccuacgaauaaucccaaccaguuacugcucgugucuccaggcgccuuaguaguauguggaagcguccaccaaggggucugcgagcaaagaagacuggggcagcuggagcagcuccugcugcgcccugagcgcccuggugacacucaguacguugcagcgaaugacccugcugugucaacagucggccuggucgcccagggacuugcgggcgaaccacugcuguucgugggucgcgguuacacauccaggggaguuggaggggguauuccuccaaucaccacgagagcacucuggccgccagacccacaagccgccuucuccuaugaagagacagcuaagcuggcggugggcagacucucugaguauagccaccacuuugugucggcauucgcccgaggugcuuccgcauauuuccuuuuccugcgccgcgaccugcaagcccaauccagagccuuccgagccuaugugucuagggugugccuccgcgaucagcacuacuacagcuacgucgaacuaccacuggccugugagggaggacguuacggccugauucaggccgcugccgucgcuacuucucgcgaaguggcccacggggaaguccuguucgccgcuuuuagcucagccgcuccacccacugucggucggccucccucggcagcugccggagcuagcggggcuagcgcacugugcgcuuuuccauuagacgaaguugaucgccucgcaaaucguacacgggacgcaugcuacacuagagagggccgggccgaggacgguaccgaaguggcauacaucgaguacgacgugaacagugacugugcccagcuaccaguagacacucuugaugcuuauccuuguggauccgaccacacaccaucccccauggccaguagagugccccuggaagccaccccaaucuuagaguggccugggauccagcugacagcagucgccgugacaauggaagauggucacacaaucgcuuuuuugggagacucucagggccagcuucacagaguguaucuggggccugguucggaugggcauccauauaguacccagucaauucagcaggggucagcugugagucgcgaucucacuuuugacgggaccuucgagcaccuuuacgugaugacacaguccacuuuguuaaaagucccuguggccaguugugcucagcacuuagacugugccucuugucucgcccaucgggacccuuauugcggcuggugcguucugcucggaaggugcagcaggcgcagcgagugcucucgaggccaggguccugaacaguggcugugguccuuucagccugaacugggaugccuccagguggccgccaugucuccugcgaauaucucacgggaggaaacacgcgaaguguuucucagcgugccggaccuucccccacuguggccuggcgaaaguuacucuugucacuuuggcgagcaucaaagccccgcucuucugacuggaagugguguuaugugucccucucccgauccaagugaagccccuguauugccccgcggcgccgauuacguaagugugaguguugagcucagguuuggggcagucgucaucgcaaaaacaagccugaguuucuacgauugcgucgcagugaccgagcugagaccgagcgcccagugccaggcuugcgugagcucuagauggggcuguaauugguguguguggcagcaccucuguacacauaaggcuaguugcgaugcaggccccaugguugcaucucaucaaagcccauuggucucuccagaucccccagcaaggggggauggagacuccgccgagcuggagggaccucccgcgccacucauccugcccaguagccuggacuaccaguacgauacuccaggccuaugggaauuggaggaggcuacacugggcgcauccucaugccccugcguggaaucggugcagggauccacuuugaugcccguccacguggagagagagauuagacuuuuggggagaaauuugcaucucuuccaggauggcccaggagauaacgagugcgugauggagcucgaaggacucgaggugguagucgaagcaaggguagagugcgaaccucccccagauacacaaugucaugucacgugccagcagcaucaacucucauaugaagcgcuccaaccggagcucaggguggggcuguuuuugagacgggcgggucgucugcgaguugauuccgccgaaggacuccacguuguccucuaugauugcucugugggccacggagauugcucuagaugucaaacagccaugccacaguacggguguguauggugcgagggugagagaccucgaugcguaacacgagaggcauguggggaagcggaggcaguggccacacagugcccagccccacuaauucacagcguugaaccccugacagggcccguggacgguggaacuaggguuacuauuagggggaguaaccuuggucaacaugugcaggaugugcugggcauggugaccguugcugguguucccugugcagucgacgcccaggaauacgaagugucauccagucuugucuguaucacgggugccucaggcgaagaggucgcuggcgcaaccgcgguggaggugccuggacgggggcggggcgugagugagcaugauuucgccuaccaggaucccaaaguccacaguauuuuuccagccagagggccacgagcaggugggaccagacugacucugaacgggaguaagcuccuuacaggucggcucgaagauauuagaguagugguaggggaucagccaugucaccugcugcccgagcagcagucagaacagcugcgaugcgagaccagcccccgccccacacccgcaacccugccaguggccgugugguuuggagcuacagagagaaggcuccagcgcggacaguucaaauauacgcuagacccgaacaucaccucugcuggucccaccaaguccuuccugucuggcggccgggagauuugcgugcgcgggcagaacuuagaugugguucaaacgcccaggauccgggugacugucgucucaaggaugcugcaaccaucacaggguuugggaagacgacgucgaguuguuccagaaacagcaugcaguuugggcccuucuugcagcucucaacaauuugaagagcccugccacguaaauuccagucagcugauaacaugucggacaccagcucugccuggacuucccgaagacccaugggugcguguggaguucauacuggauaaucugguauuugacuucgcaacauugaaccccacccccuucucuuacgaagccgaccccacccugcagcccuuaaacccugaggaucccacaaugcccuucagacacaagccugggagcgucuuuucaguugaaggggagaacuuagauuuggccaugagcaaggaagaagugguggcaaugaucggcgauggacccugcgucgugaagacccuuacgaggcaucaccucuauugcgaacccccugucgaacagccccugccaaggcaccacgcccuucgugaggcacccgauaguuugcccgaguucacuguucagaugggaaaccuccguuuuucuuugggccacguccaguaugauggagaaucuccaggagccuucccaguggcagcucaggugggccuggguguagggacuagucuucuggcccuuggugugauaauuauaguacugauguaccgaaggaaaucaaaacaggcucugcgcgacuacaagaaaguacaaauucagcuggagaaucuagaaagcagcgugcgcgaccgguguaaaaaggaguuuacagacuugaugacugagaugaccgaucugaccuccgaccuucucgggucaggaauucccuucuuggauuauaaaguuuaugcugagcgcaucuucuuuccaggccaucgggaguccccucugcacagggacuuggguguaccugaaagcaggcgcccuacuguggaacagggccugggacaacuuucuaaccuucuaaauagcaaacuguuucuaacuaaauucauccacacucuggagagccaacguaccuucucugccagggaucgcgcauacguagccucuuuacugacagucgcccugcauggaaagcuggaauacuucaccgauauucugaggacgcuccugagcgaucuagucgcucaguacguggccaagaaccccaagcugaugcugagaagaaccgagaccgugguggaaaaauugcugacuaauuggauguccaucugucucuacacguuugucagagacucugugggcgagccucuauacauguuauuuagaggcaucaagcaucagguggauaagggcccagucgauuccgugacagggaaagcuaaauauacacugaacgauaaucgccuacuacgagaggacguggaguauaggccucucacucuuaacgcccuucuggcuguaggacccggagccggcgaggcgcaaggagucccaguuaaaguacucgauugugacaccaucagucaggcgaaggagaaaaugcuugaccagcuguauaaagggguuccccugacgcagagaccagauccucggacacuggauguggaguggcgaucuggcgucgccggccacuugauauugagugaugaagaugucacaagugaagugcaaggccuguggcgaagacugaacacgcugcagcacuauaagguaccggacggcgcaacuguggcguuggucccgugucuuacuaagcaugugcuucgugaaaaucaggauuauguuccaggcgagagaacccccaugcuggaagacguggaugaaggggguauccggcccuggcacuugguuaaaccgagcgaugaacccgaacccccacgaccacgccggggcucccuccgcggaggugagcgagagagagcuaaagcuaucccagagaucuauuuaacccgcuugcuuuccaugaaaggcacacuccagaaguucguugaugaucuauuucaggugauucucuccaccagucguccugucccacuugccgucaaauacuucuuugaucuacuggacgagcaggcccagcagcacgggauuagugaccaggacacaauucauauuuggaagacuaauagccucccccucagguucuggaucaacaucauuaagaauccccaguuuguguucgaugugcagaccucagacaauauggaugccgugcuccuugugaucgcccagaccuuuauggaugccuguacuuuagccgaccauaaacuggggagggauucaccgauaaacaagcuucucuaugcucgcgacaucccucguuauaagcgaauggucgaaagguacuaugccgacaucaggcagaccgugccagccucugaucaagaaaugaacaguguccuugcugaacugucauggaacuauuccggagaccugggagcaagaguagcccuccaugaacucuacaaguacaucaauaaguauuaugaucagauuauuacagcccucgaggaagaugggacugcucagaagaugcaacuuggcuacaggcuacagcagaucgcggcugccguugaaaauaaagucaccgaucucuag

SEQ ID NO: 47532 - RNA, 6408 nt, Artificial Sequence
  derived and/or modified sequence
augccugcccugggaccagcacuccugcaagcacugugggccggcugggucuugacacuccaaccacugcccccuaccgcuuucaccccaaacggaaccuaccugcagcaccuugcacgcgaccccacaucaggcacucuuuaccugggcgcgaccaacuuccucuuucaacucucuccuggacugcaacuggaggccacagugagcaccggacccguacuugauagccgugacugucugcccccagugaugccggacgagugcccucaagcucagccaacaaacaacccaaaucagcuucuucuuguaucuccaggcgcccucgucgugugcggcuccguccaccaagggguaugugaacagcggcgacugggacagcuggaacagcuucuccugagacccgagaggccaggugacacacaguauguggcugccaaugaccccgccguuucaacagucggguuggucgcacagggccuugcuggcgagccauuacuauuuguggguaggggcuacacaucacggggagugggcggcgguaucccuccaauuacuacccgugcccucuggccacccgauccucaggcugccuuuuccuaugaagagaccgcgaaacuugcgguggggagacuuagugaauacucccaucauuuugugucagcauuugcgcggggugccucggcguacuuuuuauuccuucgaagggaucugcaggcacaaaguagagcuuucagagcuuacgugagucgcguaugucuuagggaccagcacuacuauucuuacguugagcuucccuuggcaugugaaggcggaagauacggauugauccaggccgcugcuguggcaacuagucgcgaagucgcccacggugaggugcuuuuugccgcuuuuagcucugccgccccgccaaccguuggccgcccacccagugccgcugcuggagcgucgggcgcaagugcccuaugugccuucccacuggaugagguggacagauuagcaaaucgcacucgggacgcaugcuacacccgcgaaggccgcgcagaggauggaacggaagucgcuuacaucgaguaugaugucaacucugauugugcacaacuucccguagauacauuagaugccuacccaugugggagcgaucacaccccuucaccaauggccuccagaguuccacuggaagcaacaccaauacucgaauggcccggaauccagcuuaccgccguugcaguaaccauggaggauggccacacaaucgcuuuucucggagauucgcagggacaauuacacagaguguaccugggaccagggucagauggacacccuuauucgacacaaucaauucagcagggcucggcugugucuagggaccuaacuuuugacggaacauuugaacacuuauacguuaugacacaaucaacucugcucaaaguaccuguagccagcugugcucagcaucuggacugcgccucaugccuggcucacagggacccauauugcggcugguguguuuuacugggcagguguucccggcggucagagugcagccgaggccagggacccgaacaguggcuaugguccuuccaaccagaauugggcuguuuacagguggcagcuaugagccccgcaaacaucucgcgggaagagacaagagaaguuuuccuuucaguuccugaucuuccccccuuguggccuggugaaucuuauucuugccacuucggggagcaccagucucccgcuuuguugaccgguuccgguguuaugugucccagucccgacccuucugaggccccgguacucccccgcggcgccgauuauguguccguuaguguugagcuaagauuuggggcuguuguuauagcaaagacuagucuguccuucuaugacuguguugcuguaaccgaacuucgaccaucagcccagugccaagccugcgugucuuccagaugggguugcaauugguguguguggcagcaccugugcacucacaaagcgucaugugacgccggccccauggucgcaagucaccagaguccccucgugagcccagacccgccagcuagggguggcccuucccccucuccccccacagcuccuaaggcccucgcaacucccgcaccagacacucugccagucgaaccgggcgcaccgagcaccgcaaccgcaucugacaucucuccuggggcuucuccuucacuucuaucuccauggggcccaugggcuggaucagggagcauuucuucuccagguagcacugguaguccucugcacgaagaaccgucuccgcccagcccgcagaacggaccaggaaccgcaguucccgcaccuacagauuucaggccuucugccacccccgaggaucucuuagccagcccacucuccccguccgaaguggccgccgucccuccagcugaucccgggcccgaggccuuacacccuaccgucccauuagaccugcccccugccacggugccagccacuacuuuucccggggcaauggggucugugaaaccugcucucgacuggcuuaccagggaaggaggcgaacugcccgaagccgacgaauggaccggcggcgaugcuccagcuuucucaaccaguacccugcucagcggcgacggcgacucugcggaauuagagggcccgcccgccccccugauucucccaaguucacuugacuaucaguacgacacaccggggcugugggagcuggaagaagcuacacuuggagccagcuccuguccuugcguugaaucuguacagggaucuacacugaugccaguucauguugagagggaaauccggcuuuuggguagaaaucugcaccuuuuccaagacgguccuggagauaacgaaugcgugauggaauuggagggacuggaagugguagucgaagcccgcgucgagugugaaccuccacccgauacucaaugucacgugacaugccagcagcaucaacuuaguuaugaagcccuacagccugaacuccgggugggauuguucuuacggagagcuggccgucugcgaguggacucugcugaaggacugcacguugugcuuuacgauugcagcgugggucacggagauuguucacgcugucaaaccgcgaugccccaguacggcugugucuggugcgagggugaaagaccaagaugugucaccagggaagcauguggcgaagcagaagccguggcuacacaaugccccgcgccccugauucauuccgucgagccccuuacaggcccgguagauggagggaccagagugacgauaagaggaucaaaucugggacagcauguucaggacguguuagguauggucacuguggccggcgugccgugugcagucgaugcccaagaauaugagguuaguucgagccuggugugcaucacaggggccaguggugaggagguggccggagcaaccgccguugaagugcccgguaggggaaggggcguguccgagcacgauuucgcuuaccaagacccaaaaguacacucgaucuucccugcuagaggaccacgcgcggguggcacuagacucacccugaacggauccaaauuauuaacggggcgccuagaggacauaagggugguggugggagaccagccaugucaucugcuacccgagcagcaguccgagcaauugagaugugaaacguccccacggccaacaccagcaaccuuaccuguggccguaugguuuggcgccacagaacgaaggcuccagcgaggccaauucaaauauacacuggacccaaauauuaccucugcagggccaacaaaaagcuuccucagcggcgggcgggagauaugcgugagaggacagaacuuagauguugugcagaccccucgcauucgcgugacuguagucucuagaaugcuucagcccagccaggggcugggcaggcgcaggcgaguugugccagaaaccgccuguucccucggcccauccuguuccucacagcaguuugaggaaccgugccaugucaauaguagccaacucauuaccugccgcacacccgcucucccaggccucccugaagauccauggguccgagucgaauucauccuugacaaccuagucuuugacuucgccaccuuaaacccaacucccuucuccuacgaagcugaccccacacuccagccacugaauccugaagauccaaccaugcccuuccggcacaaaccuggcuccguauuuucuguggaaggugagaacuuggaucuggccaugagcaaggaagaaguaguagcuaugauuggugacggcccuugugucgugaaaacucucaccaggcaccaucuauacugcgaaccacccguggaacagccccucccuagacaccacgcacuacgcgaggcacccgacucuuuaccugaguuuaccgugcaaaugggaaaucuucgauuuucguuagggcauguacaauaugauggcgaaucuccaggcgcauuccccguggcagcacagguuggccuggggguagggacuucucuccuggcacugggcguaaucaucaucgugcugauguaccgccguaaaagcaagcaggcucugagagacuauaaaaaaguacagauucaacuggaaaaucuagaaucauccgugagagaucgaugcaagaaggaguuuacagaccuaaugacagaaaugacagacuugacuucugacuugcuagguuccggcaucccuuuucuggacuacaagguguacgcggaacgaaucuuuuuuccuggccaccgugaaucuccucugcacagggaccuuggaguaccagagucgcgccgaccaacuguagagcagggccuaggccaacugucaaaucuucugaauucuaaacuauuccucaccaaguucauacacacucucgaaucccagcgcacuuucucagcucgcgauagggcuuauguggccagccuccucaccgucgcccugcauggaaaacuggaguacuuuacagacauccuaagaacacugcucagcgaccugguggcgcaauacgucgcgaaaaacccaaaauuaaugcucagaagaaccgagaccgucgucgaaaaguuacuuacuaauuggaugucaauuugcuuauauacuuuugucagagauucuguaggcgaaccuuuguacaugcucuuccgcggcaucaagcaccagguggauaagggacccgucgacucagugacuggcaaagcuaaauacacacucaacgauaauagauuacuuagggaagaugucgaauaccgcccccugacccuuaacgcucuucuggcuguugguccaggcgcaggggaggcccagggugugccuguuaaaguacucgauugugacacuaucucucaggcuaaggagaaaauguuagaucagcucuacaaaggcgucccucuuacccaacguccggacccacggacccuugauguagaauggcgcaguggagucgcgggacaucugauucugagugacgaagacguuacgucugaaguucagggcuuguggcggcgacucaacacccuccagcauuacaaagucccugauggugcaaccguugcccuuguccccugcuuaaccaaacaugugcugagagagaaccaggauuaugugccaggcgagcguaccccuauguuagaggacguagaugagggcgguauuaggccuuggcaucuuguuaagcccucagaugagcccgagccaccuaggccucgccgagggucccugcgggggggagaaagagaaagagccaaagcaauaccagaaauuuaccugacuagacugcugucuaugaagggaacccuccagaaguuugucgacgauuuauuccagguuauucugucaacaucccgucccguccccuuggccgucaaauacuuuuuugaccuucuugacgaacaggcccagcagcacgguaucuccgaucaggacaccauucacauuuggaagacuaauuccuuaccauuaagauuuuggauuaauaucaucaaaaauccccaguuuguguucgacguccagaccuccgauaauauggacgcagugcugcuggugaucgcacaaaccuucauggaugccuguacccuugccgaucauaagcugggccgggauucccccauuaacaaacugcuguacgcaagagacaucccucgcuauaagcggauggucgaaagauacuacgcugacauccgccaaaccgucccagcuagcgaucaagaaaugaauagugucuuggcugaacuuuccuggaacuacuccggugaccuuggcgcuagaguugcccuccacgaacuguacaaguacauaaacaaauacuacgaucaaaucaucacugcccuggaagaagaugguaccgcucagaagaugcaguuggguuaucgccuucaacagauugccgcugcuguggagaacaaagucaccgaccuauag

SEQ ID NO: 47533 - RNA, 5859 nt, Artificial Sequence
  derived and/or modified sequence
augcccgcucugggacccgcacuucugcaggcccuuugggcuggauggguucucacacugcaacccuugccucccaccgcuuucacccccaauggcacauaccuucagcaccuagcccgagaccccacuucugguacccuguaucucggcgcaacuaacuuccuguuccagcuuucccccggccugcagcuugaggcaacuguuuccacuggacccguucuugacucacgugauugccucccaccggugaugccugaugaguguccucaggcccaaccgacuaauaacccuaaucagcucuugcuggucucaccuggcgcauugguuguguguggguccgugcaccaaggcgugugugagcagagaagauuaggucagcucgaacaguuacugcucaggcccgagagaccgggagacacucaauauguugccgccaaugacccagcaguaagcaccgugggacuuguugcucaggggcucgcaggggagccacugcuguuugucggcaggggguacacaucacgcggcguuggcggcggaauuccuccaaucacuaccagggcacuauggccaccagauccacaggcagcauuuagcuacgaagaaacggcuaagcucgccguugggcgucucucagaauauucccaucauuuuguuuccgcauucgcucggggcgccuccgcguacuuccuguuccugaggagggaccugcaagcacaauccagggcuuuucgggcuuacguguccagaguuugucuacgagaucagcauuauuauaguuacgucgagcugccguuggcaugcgaagggggucgguacggacucauacaggcagcugcaguggccacauccagggagguagcucacggggaaguccuauucgccgcuuuuagcucugcugcccccccuacuguugggaggcccccgucugcugccgccggcgcauccggagccagugcccugugugcauucccacuggacgaaguugaccgccuagcaaacagaacucgcgacgcaugcuacacucgagaaggcagggccgaggacgggacagagguggcguacaucgaauaugacgugaauucagacugugcucaguuaccaguagacacucuggacgcauaccccugcggaucugaucacacaccauccccgauggcuucacgggugccacuugaggccacuccaauucuugaauggcccggaauucaacugacugcuguggccgucaccauggaggauggucacacuaucgcuuuccugggagauagucagggacaauuacaucguguuuaccugggacccgggagugauggacacccauacaguacucagagcauucagcaagguagcgccgugagcagagaccugacauuugaugguacauucgagcaccuuuacgucaugacccaaucuacucuucucaagguuccuguugcuaguugugcccagcaucucgauugcgcauccugucuggcucaucgagacccuuacuguggguggugcguccuguugggucgcugcagccgacggagugaauguucucgcggucaaggcccggagcaauggcuguggucauuucagccugaguugggcugucugcagguugccgcaaugagcccugcuaauaucucucgcgaagagacacgcgaagucuuccuguccguuccagacuuaccuccuuuauggcccggggagucguauucaugccauuuuggcgagcaccaaaguccugcauuauugacggguucaggagugauguguccaucccccgaucccucagaagcaccuguguugccaagaggagcugauuaugucagugucucaguggagcuccgguucggggccguugucaucgcuaaaacaagcuugagcuuuuacgauugcguggcaguaaccgagcuccgacccuccgcucagugccaggccuguguuuccagccgguggggcugcaacuggugcgucuggcagcauuugugcacucauaaagcauccugugacgcuggucccaugguugccucccaucaguccccacucguaucacccgacccccccgccagaggcgauggagauagugcagaguuagaagguccccccgcaccccuuauccuccccuccucccuggacuaucaguaugauacccccgggcuuugggagcuugaagaggcuacacuuggugccaguagcuguccaugcguugagucugugcaggguucuacacugaugccagugcaugucgagagagagauucgcuuacuagggagaaauuugcaucuuuuucaggacggccccggugacaacgaaugcgugauggagcuggaaggacuggaggugguuguggaggcucggguggaaugcgaacccccccccgacacucagugucaugucacaugccagcagcaucagcucucauacgaagcauugcaaccugagcugagaguuggacuguuccugagacgagccggccgucugagaguagauagugccgaggggcuccaugugguccuuuaugauugcuccguaggucacggggauugcagccggugccagacagcuaugccccaguacggaugcguguggugcgaaggugagagaccaaggugcgucacuagggaggccuguggcgaagcggaagcugucgcaacccaaugccccgccccuuugauucacuccguggaaccucugaccgggcccguugauggcggaacaagagucaccaucaggggcaguaaucugggacaacacguucaggauguccucggaaugguuacgguggcuggcguuccaugugcaguggaugcucaagaauacgaagugucaagcucccuggucugcauuaccggcgccagcggggaagaagucgcuggagcuaccgcaguggaggugcccggcagagguagagggguaagcgagcaugacuuugccuaucaggacccuaaaguccauuccauuuucccggcaagagggcccagggcuggggggacacggcugaccuuaaacggcaguaaguugcugacagggcgccuugaagauauccguguggugguuggagaccagccuugccaucuucucccagaacagcaguccgaacaauugagaugugaaacaaguccgaggccuacgccugcuacucugccaguugccgugugguuuggcgcaacagaacgccgguuacagcggggacaauuuaaguacacgcucgacccaaacaucaccagcgccgggcccaccaaaucuuucuugagugggggaagagaaaucuguguucgcggucaaaaccucgacguggugcaaaccccucguauucgagugacagugguguccaggauguuacaaccaucacaaggacugggucgaagacggagagugguuccugaaacagcaugcagucugggccccucuuguuccucacagcaguucgaagaacccugucacgugaacaguucacagcugauuacaugccgaacuccagcacugcccggucuuccagaggaucccugggugcgaguggaauucaucuuagauaaccuggucuuugacuucgcuacauugaaccccacccccuuuuccuaugaagccgacccuacgcuccagccuuuaaacccugaggacccuacuaugccauuucggcacaagccaggaaguguguuuucuguagagggcgagaaccuugacuuggcgaugagcaaggaggaggucguggcuaugauaggggacggaccaugugugguaaaaacucugacccgacaucaccuguacugcgagccaccuguugaacaaccacugccccgccaccacgcccuccgagaggccccugauucccuacccgaauuuacuguccagaugggaaaucugcguuucucccucggccacgugcaguaugacggagaaagccccggcgccuucccugucgccgcacaggugggacucggugucgguacuucucugcucgcccuuggaguuaucauaauaguguugauguaucgccgcaagucuaaacaagcucuccgcgacuauaaaaagguucagauccagcucgaaaaccuggaauccuccgugcgugaccgcuguaaaaaggaauuuaccgaccugaugacagagaugaccgaucucacuagcgaucuacuggggucaggcauccccuuucucgacuauaaaguguacgcggagcgaaucuuuuuuccaggacaucgggaauccccauuacaccgugaucucggagucccugagucccggcgcccuacugucgagcagggccucggccaacuauccaaucugcucaacuccaaacuuuuucugaccaaguucauccauacguuagaaucccagcggacauucagcgcuagagaucgugcauaugucgccagccugcuaaccguggcauuacauggaaagcuggaauacuuuacugacauucuccgaaccuugcugucugacuuaguggcccaguacguugcuaagaacccaaaauuaaugcuucguagaaccgaaaccguggucgaaaaauugcugacuaauuggaugucuaucugccucuacaccuucguacgugacuccguuggugaaccccuauacaugcucuuccggggaaucaagcaccagguggacaaaggcccagucgauagcguuaccggcaaagccaaguacacccucaacgacaaccgguuacugcgagaggacguugaauacaggccccucacauugaaugcacucuuggccguaggccccggggccggugaagcacagggcguuccagugaaaguuuuggacugcgauacuaucagccaggcuaaagagaaaaugcuggaccagcucuauaagggcgucccacugacacagcgccccgauccaagaacucucgacgucgaauggagguccgguguagcuggucauuugauucuuagcgacgaagauguuacauccgagguacaaggucuguggcguagacuuaacacauuacaacauuauaaggugcccgacggcgcgacuguggcacuggugccuugucugacaaaacacguccugagagaaaaccaggauuaugugcccggugagagaaccccaaugcuggaagacguggaugaaggcgguauccgccccuggcaucuggugaagccaucugacgaaccggaacccccccguccgcgccguggcagcuugcgugguggcgagcgcgagcgagccaaagcaaucccggaaaucuaccugacucgcuugcucaguaugaaggggaccuuacaaaaauucgucgacgaucucuuccaggugauacuaucuacaagccggccuguuccucucgcagugaaauauuucuucgaccuucucgacgagcaagcacagcaacacggaaucuccgaccaagacacaauucauaucuggaaaaccaauaguuugcccuuaagauuuuggauaaauauuauaaaaaauccucaguucguauuugacgugcaaaccuccgauaacauggacgcugugcugcugguuaucgcccagaccuucauggacgccuguacacuggccgaccauaaacuuggccgcgacucaccaauuaauaaacuguuguaugcgcgcgacauucccagauauaaaaggaugguugagagauacuacgcugauauacgacaaacaguucccgccagcgaucaggaaaugaacaguguucuggcggagcuauccuggaauuacucuggcgaucugggagcacgaguugcccugcaugagcuguauaaguacaucaacaaauacuaugaucagauuaucaccgcccuggaagaagauggcaccgcccagaaaaugcagcuagguuaccgccuccaacaaauugcggcugcuguagaaaacaaagucacggaucucuag

SEQ ID NO: 47534 - RNA, 6408 nt, Artificial Sequence
  derived and/or modified sequence
augccugcccugggacccgcucugcugcaggcucuuugggccgguuggguacugacccuccagccccuucccccgaccgccuuuacuccuaaugguacauaucuucaacaccuagcacgcgacccgaccaguggcacacuguaucugggcgcuaccaauuuccuauuccagcucucccccggacuucaguuagaagcaacagugucaacaggacccguguuagauucccgugacugccugccaccuguaaugcccgaugaauguccucaggcccaaccuacaaacaacccaaaucaguuacuguuaguuucgcccggcgcccucgugguuugcggaucaguucaccaggggguaugugaacagagaagacucggccagcucgagcagcuguuacugcgcccagagagaccgggggacacacaauacgucgccgccaaugauccagcugugucaacugugggacucguagcccagggccucgcaggagaaccccugcuauuuguuggucgugguuacacgagcaggggggugggcggcggaauuccaccaauuaccacuagggccuuguggccaccagauccucaggccgcuuuuagcuaugaagagacagccaagcuggccgucggucgcuuaagcgaauacagccaucacuucguuuccgccuucgcccguggagccagugccuacuuccuguuuuugaggagggaccuacaagcccagucacgagcuuuccgggccuauguuucccggguaugucugagagaucagcacuauuauucuuacguugaauuaccucuggccugugaaggaggaagauacgguuugauucaggcugccgccguggcuacuagcagagaaguugcacacggagaagucuuguucgcggcuuuuagcucugcugccccuccgacuguggggagaccacccuccgcagcugccggagcuucuggagcaagugcucugugugccuucccuuuggacgaaguggaccgauuagcuaauaggaccagggacgcaugcuacacaagagaaggaagggcugaagacggaacagaaguugccuacaucgaauaugauguuaauucagauugcgcccagcugccgguggacacauuagacgcauaccccuguggcucagaccacacaccaucuccuauggcaucccggguaccccuagaggccacacccauucuggaguggccugguauucagcugacagccguugccgugacgauggaggacggucauacaauugcauuuuugggugauagccagggucaguuacaucggguguaccugggcccagguucagacggccauccuuacucuacccagucgauucaacaaggauccgcgguuuccagggauuugacauucgaugggacauucgagcacuuauacguuaugacgcaguccacucuccucaaagugcccguugccaguugcgcccagcaccuagacugugcgucgugucucgcccaccgggacccauacugugguugguguguccuauuaggccguuguagccggcguagugaauguucuagaggacaggguccagaacaguggcuauggucuuuucaacccgaacuuggaugccuccagguugcggccaugagucccgcuaacaucagucgugaggagacccgugaggucuuucuaucaguaccagaucuuccuccucuguggccuggugagucuuauucaugccauuucggcgagcaccagaguccagcucugcucacugggucagggguuaugugcccuucuccagacccuucugaagcaccugucuugccccgcggcgcugacuacguuucgguuuccguggaauugcguuucggagcugucgugaucgccaaaacaagccuaagcuucuacgauuguguggccguaacugaacugagacccagugcccaaugccaagcaugcguuucgucacggugggguugcaauuggugugucuggcagcaucucuguacacauaaagccucaugcgacgccggaccaaugguagcaagccaucagagcccccuggucucaccugacccccccgcacgagggggacccuccccauccccuccaacugcgccuaaagcccuggccacccccgcuccagacacacugccaguugaacccggugccccuucuacagccacugccuccgacauuuccccgggugccuccccgucccugcucuccccaugggggcccugggcuggaucaggaucuauuaguucaccuggcucuacggguucuccccuccaugaagaaccaucuccaccaucaccccagaacgguccugguacugcugugccugcuccgacugacuuuagaccaagugcgacgcccgaggacuugcuugcaucccccuuaucacccucagagguugcugcggugccacccgcugauccuggccccgaggcccugcacccgaccgucccuuuagauuugccuccagcuaccgugccggcuacaacguuuccgggagcgaugggcucugugaaaccggcacuugauuggcugaccagagagggaggagagcuacccgaagccgacgaauggaccggaggagacgcgccagcuuuuucaaccagcacacuucucagcggagacggggacagcgccgagcucgaaggccccccggccccucugauucucccuuccagccuugacuaccaguaugacaccccagggcucugggaacucgaagaggccacuuugggagccucaaguuguccuuguguggaaucaguccaagggucaacccugaugccugugcaugucgagagggaaauaagacuucucggaaggaaccugcaccuuuuccaggacgggccgggagacaacgaaugcgucauggagcuagagggccuggagguggucguggaggccagaguggagugcgaacccccccccgauacucagugucacguuacaugccaacaacaucaacucaguuacgaagcguuacagcccgagcugcgggugggccuguuccuaaggagagcugguagacugaggguggacucugcugaggggcuucacguuguacuguacgacugcagcgucggacacggagacugcagccgcugucaaacugccaugccucaauauggaugugucuggugugagggagaaaggccaagguguguaacucgggaagcguguggagaagcggaggcuguugcaacucaguguccugcgccccuaauccauucuguggagccucugacuggccccgucgacggcggaacucgcgugacaaucaggggcaguaauuuaggucagcacguccaggaugugcugggcauggucaccguagcuggcguccccugugcugucgaugcccaggaauacgaaguuucuaguaguuuagugugcaucaccggugcgucuggcgaagagguugcaggagccacagccguagaaguuccagggcguggaaggggcgugucugaacacgauuucgcuuaccaggauccaaaagugcauuccauuuuccccgcaagagggccgcgcgcugggggaacucgcuugacccugaacggcucuaagcuccucaccggcagacuggaagacauucggguuguaguuggagaucaaccuugccaccuacuuccggaacagcagagugagcagcugcgaugcgagaccagcccccggccgacccccgcuacacuuccgguagcuguuugguucggugcaacagagcgacgucuucagcgggggcaguuuaaguacacacucgacccuaacauaacaagcgccgguccaaccaagagcuuucugucggggggacgagaaaucuguguucguggucaaaauuuggacguuguacagacaccuaggauccguguaacuguuguuucaaggaugcugcaacccucccagggacucggaaggcgucggagagugguuccugagacagcauguucucucgggccuucuugcaguagucagcaguuugaagaacccugucacguuaacucgagccaacugaucacaugccgcacgccagcacugccuggccucccagaggaccccuggguacgaguagaguuuauuuuagacaaucugguuuucgacuuugcuacccuaaacccuacacccuuuucguaugaagcugauccaacacuacagccccuaaaccccgaagacccuaccaugccguuucgacauaagcccggcucuguuuuuucagucgagggcgaaaaccuggaucuggcgaugucaaaagaagaagugguggcaaugauaggugacggaccaugcgucguuaaaacucucaccagacaccaccucuauugcgaaccccccguugaacaaccacugccgcggcaccacgcccuccgugaagccccagacagccuuccugaauucacugugcaaaugggaaacuugagguucucuuugggacacguucaauaugauggcgagaguccaggcgcuuucccuguggcagcucaagucgggcucggcguggguacgucauuacuggcucuagggguuauuaucauaguacucauguauaggcguaaaaguaaacaggccuugagagauuacaaaaaggugcagauccaauuagagaauuuggagaguuccguuagggaccgcugcaagaaggaauucacggacuugaugacagagaugacggaccugacuagugaccugcucggcaguggaauucccuuccuagacuacaagguauacgcagagcgcauuuuuuucccugggcauagagagagcccauuacauagagaccugggcgugccugaaucaaggaggccgaccgucgaacagggauuaggccagcuuucgaauuugcuuaauucaaaguuauuucuuaccaaguuuauucauacccuagaaagccaaaggaccuucagcgcaagagaccgcgcuuauguagccagccuccugaccguugcguuacaugguaaauuggaguacuuuacggacauacuuaggacccucuuguccgaccugguagcccaauauguagcaaagaauccuaaacugauguugagacgcaccgagaccgugguggagaaacuucucacaaacuggaugaguauaugccuguacacguucguucgcgacuccguaggcgagccacucuauaugcuuuucagggguauuaaacaucagguggacaaaggaccagucgauucugugaccggaaaagcuaaguacacgcucaaugauaauaggcucuugagggaagaugucgaguaccggccucuaacacugaacgcccuccucgccguuggcccuggcgcuggcgaagcgcaaggcguaccagucaaagugcucgauugugacacgauaucucaggcaaaggaaaaaaugcucgaccagcuguauaagggcguaccucucacccagagaccugauccccggacacuggauguugaguggagaagugggguugccggacaucugauccucagugaugaagacguaaccucggaaguucagggauuauggcgcagauugaauacgcugcagcacuauaaagugccugauggugcaacgguggcacugguuccgugccucacaaaacacgugcucagagaaaaucaggacuauguaccaggugaaagaacccccaugcuggaggauguggaugaaggaggcauucgcccuuggcaucucguuaaaccgucggacgaaccggagccaccccggccaaggagagguucccuucgcgguggagaacgagagcgggcuaaggcaauucccgaaauuuacuugacuaggcuguuaucuaugaaggguacgcugcaaaaguuugucgaugaccuauuccagguuauccuguccacuagcagaccugugccauuggcuguuaaauacuucuuugaucugcuagacgagcaagcccaacagcacggaaucucagaucaggauaccauucacauuuggaaaacaaauucucugccccuaagauucuggaucaacaucaucaaaaacccacaauuugucuucgacguccagacauccgacaacauggaugcaguccuauuagucaucgcacaaaccuucauggacgcuugcacgcuagccgaccacaagcucgggcgagauucaccuaucaacaaauugcuguaugccagagauaucccacgcuacaagaggaugguggagcguuacuacgcugacaucagacagaccguacccgcuuccgaucaagagaugaacucggucuuagcagagcucagcuggaauuauuccggagacuuaggagcucgcguagcccuacacgagcuguauaaguauaucaauaaguacuacgaccaaauaauaacagccuuggaagaggaugggacugcccagaaaaugcaauuaggauauagacugcaacaaaucgcugccgcugucgagaauaaagugaccgaccucuag

SEQ ID NO: 47535 - RNA, 2241 nt, Artificial Sequence
  derived and/or modified sequence
augcccuucagacacaagccugggagugucuucagcguugagggggagaacuuggaucucgcaaugucaaaggaggaggucguugcaaugaucggcgaugggccaugugugguaaagacccugacccggcaccaccuguacugugagcccccaguugaacaaccccucccgaggcaucaugcauuacgagaggcacccgacuccuuacccgaguuuacagugcagauggguaaccugcguuucagucuaggacaugugcaauacgacggggagucccccggagcuuucccgguggccgcucaagucgggcugggcgugggcacaucuuuacuggcccucgggguaaucaucaucgugcugauguacagacggaaaucaaagcaggccuugcgagacuauaagaagguccagauacaacuggagaaucucgagucgagugugcgcgacagguguaagaaggaguuuacagaccuuaugaccgaaaugaccgaccucacgucugaucugcuagguucugguauccccuuucuggauuacaaaguauaugcugaaaggaucuuuuucccagggcauagagaaucuccucuccauagggauuugggcguacccgagucgcgcagaccuaccgucgaacaggggcugggccagcucucaaaccugcuaaacucgaagcucuuucugacaaaauucauucauacacuggagagccaacggacauucagcgccagagaucgagcuuacguggccucucugcugacuguggcauugcauggcaaacucgaauauuucacugacaucuuacgaacccugcucuccgauuuaguggcucaguauguugccaaaaaccccaaacucaugcugcgaagaacugagacaguuguggagaagcugcuuacuaauuggauguccauuugccuguauaccuucgugcgagacuccgugggggagccccuuuauaugcuguuccgaggcauuaaacaccagguggauaaaggacccguugacagcgugaccggaaaagcaaaauauacacuuaaugauaaccgacuguugcgagaggauguggaauauagaccacucacucugaaugcucuguuagcugugggucccggggccggagaagcccagggcgugccagugaaggucuuagauugcgauacaauuucccaggccaaggagaagaugcuggaucaacuuuacaaaggagucccacugacgcaacgcccugacccccggacccuugacguugaauggagaagcggugucgcagggcacuugauccugucugacgaggauguaacuagcgaagugcaggggcuguggcggcgacuaaauaccuuacaacauuacaaagucccagauggcgcaaccguggccuuggugccgugucuaaccaagcacguucuaagggaaaaucaggauuacguuccuggagagcggacucccauguuagaagacguggacgagggugguauuaggcccuggcauuuagugaaaccaucugacgaacccgagccaccuagaccccgccggggcaguuuacgcggaggggaaagagaacgcgccaaggcgauucccgagaucuaucucaccagguuauuguccaugaagggcacuuugcagaaguucguagaugaccuauuccaagucauccugucuacaucuagacccguuccacuggcuguuaaguacuuuuucgaucuucuggacgagcaggcccagcaacacggaauuucugaucaagacacaauucacauauggaagaccaacucacugccauugagauucuggauuaauauuaucaaaaauccacaguucguguucgacgugcagaccucugauaauauggacgccguuuuacucguuaucgcacaaacuuuuauggacgcauguacccuggcagaucacaaacucggacgagacucacccaucaauaagcuccuauaugcuagggacauuccucgcuacaagagaaugguggagagauacuaugcagauauucgccaaacaguuccugccagugaucaggaaaugaauucaguguuggccgaacucagcuggaacuauuccggggaucuuggcgcgcgaguggcccuucaugagcuguauaaauacauuaacaaauacuaugaccagauaaucacagcccuggaggaagacggaacggcacagaaaaugcaguuaggcuaucgguuacaacaaaucgccgcugcuguggagaacaaggugacagacuuauag

SEQ ID NO: 47536 - RNA, 5859 nt, Artificial Sequence
  derived and/or modified sequence
augccugcucuuggaccugcccugcuacaggccuugugggcaggcuggguacuuacacugcagccccuccccccuacggcguucacuccuaauggaacauaucuucagcaucucgcacgggacccaacaagugguacauuguaucuaggagccaccaauuuucuuuuccaacuuagccccggccuucagcuggaagcuaccgucucuacuggcccaguucuugacucucgggacuguuugccuccugucaugccugacgagugcccucaggcccagcccacuaacaacccuaaucagcuucugcuggucucgcccggcgcccucguuguguguggaucaguucaucaggguguuugugagcaacggcgacugggacaauuggaacagcuccuucugcgcccggaacgcccuggagacacacaauaugucgcagcgaaugaucccgccgucucgaccguuggccuaguugcucagggacuggcgggggaaccauuguuguucguuggucgcggcuauacuucucgaggggucggcggagguaucccuccaaucacuaccagagcauuguggccaccugauccccaagcggccuucucuuaugaagagacagcuaaacuugcuguuggccggcugucagaguacagccaucacuucguuagugcuuuugcucgcggagcuuccgccuacuuccuguuccugcgccgagaucugcaggcccaaucccgugcguuuagagcauacguaucaagagucugccuccgcgaccaacauuacuauucauacguagagcuaccacucgcuugcgagggagggcguuaugggcucauccaagccgcugcuguggccacaucacgagagguugcccauggggaagugcuguucgcagccuucaguagugcagcccccccaacuguggguaggccaccuuccgccgcagcuggcgcuuccggagcuagcgcccucugugcuuucccacuagacgagguugaucgacuugccaauagaacucgcgacgccugcuacacaagagaagggagagcugaggauggaacugaaguagcuuauaucgaauacgacguaaacucugauugugcucaguugcccguggacacacuggacgccuauccauguggauccgaucauacaccgucuccuauggcgucacgcgugccuuuagaagccaccccgaucuuagaguggcccggcauccagcugacugcugucgccgugacuauggaagacggccacaccauugcauuuuugggagauagucagggccaacuucaccgcguuuaccuaggucccggcagugaugggcauccauauucaacccaguccauucagcagggcucagcuguguccagggacuuaacuuuugaugggacauuugagcaucuguacgucaugacucaauccacccugcucaaagugccuguugcaucaugcgcucagcaccuugauugcgcuucauguuuagcacaucgggauccuuacugcggauggugcgugcuccugggacgcugcucaaggagaagcgagugcuccagaggacaaggaccugagcagugguugugguccuuccaacccgaacuugguugucuccaggucgcagccauguccccugcaaauaucucaagggaagagacuagggagguguuccuaagcgucccagaccucccuccauuauggccuggcgagucauacucuugccauuucggcgaacaccagucccccgccuugcuuacgggcuccggcgucaugugucccagcccugacccaucugaggcucccguucuaccccguggugcagacuaugucucaguaucuguggaacuccgguuuggggcugugguuauugcaaagacuucccucucguuuuaugauuguguugccgucacugaacuccgucccucugcccagugccaggccugcguaucgagucgcuggggguguaauuggugcgucuggcagcaucuguguacacacaaggccuccugcgaugcgggacccaugguagccagucaucaaaguccccugguuagcccagauccaccggcacggggugacggugauucagccgaauuagaaggacccccugccccucugauccucccuucuagccuugacuaccaguaugacacuccuggccuuugggagcucgaagaagccacauugggugcuucuuccuguccaugcguugaaaguguccaaggaaguacuuugaugcccgugcacguggaaagagagauuagacuauugggcagaaaucuccaucuuuuccaggacggccccggagauaacgagugugugauggagcuagaaggacuugaggucgucguggaggcaagaguagaaugugagccaccaccugacacacagugccacgugacaugucaacagcaccaguuguccuacgaagcccuccagccagaacuucguguuggcuuguuccuacgccgggcaggaagacugcgaguggauucugcugagggacugcaugugguucuuuacgacuguagcgugggccacggcgauuguucacgaugucaaaccgcuaugccgcaauaugggugcguauggugugaaggcgaacgcccuagaugcguuaccagggaagcuugcggggaggccgaagcuguggcaacccaaugccccgcucccuugauccacagcgucgagccauuaacagguccuguggacggcggcacaaggguuacgauuaggggaagcaaccugggucagcacgugcaggauguguuagguauggugacggucgcagggguaccuugcgcaguagacgcacaagaauaugaggucucuagcucucuagucugcaucacaggggccaguggagaagagguggcaggugcuacugcgguagagguaccagguagaggacgaggggucagugaacacgauuuugcuuaucaggaucccaagguccacagcauuuuccccgcccgggggccaagagcaggcgggacaaggcugaccuugaauggauccaaacuguuaaccgggagauuagaagauauucgaguaguggucggagaucaacccugccaucuguuaccugagcagcaaagcgagcagcugaggugugaaacaagcccccgccccacaccggccacucucccaguugccguuugguucggugcaacggagcggcggcugcagcgaggccaguucaaauacacucuggacccaaauauuaccagugcgggcccuacaaagaguuuuuuaagugggggaagagaaaucugcguucgaggucaaaaucuugauguggugcagaccccccgaauucgugugacaguugucucuaggaugcuccagcccucacagggccucggaaggaggagaagagucgugccugagacugccugcucccuuggaccuucuuguagcucccaacaguucgaggaacccugccacgugaacagcucacaguuaauaaccugccguacgcccgcauugcccgggcuucccgaagaccccugggugagaguggaguuuauucuggacaaucucguguuugauuuugccaccuugaacccaacacccuucaguuacgaggcugauccuacacugcagccacuaaauccugaagaccccaccaugccuuuuagacauaaaccagguucuguuuucagcguugagggggagaaucuugaccucgcuaugaguaaggaagaaguagucgccaugauuggagacggccccuguguggugaaaacccuuacccggcaccacuuguacugugaaccaccuguggaacagccccugccccgucaccaugcacugagagaggcaccagauucucugcccgaguucacugugcagauggguaacuugcgauuuucccucggacaugugcaauacgauggcgagagcccaggagccuucccagucgccgcucagguaggccugggaguuggaacaagcuuacuggcacugggcguuauaauuauuguucuuauguauaggagaaaguccaaacaggcuuugagggauuacaagaaaguccaaauucaguuggaaaaccuggagucaagugugcgugaccgaugcaagaaggaguuuaccgaccucaugacagagaugacagaucugacuuccgaucuacuaggcucagguaucccguuucuugacuauaaaguuuaugcggagaggaucuuuuuuccgggccaucgcgaaaguccauuacaccgugaucuaggaguccccgagucuagacggccgacaguggaacaaggccugggccagcuaucaaaucuguugaacucaaagcucuuucugaccaaguuuauccacacccuugagucucagcgcaccuuuuccgcccgugaucgcgccuauguggcaucccuucuuacggucgcccuucacggcaaacuggaauauuucacugauauauuacggacccuucucucugaucuugucgcgcaguauguagcaaaaaacccaaaacucauguuacgucgaaccgaaacagugguagagaaacuacugacaaauuggaugaguauuugucuauacaccuuuguaagggauuccguuggagagccucuauauauguuguuccggggaaucaagcaucagguggauaagggcccaguugacucaguuacuggaaaagcgaaguacacucuaaacgacaaccggcugcuucgagaagaugucgaguauaggccccucaccuugaacgcacuacuggccgugggcccuggagcgggugaagcgcagggggugcccgucaaaguccucgacugugauacgauuagucaggcuaaagaaaaaaugcucgaccaauuguacaaaggggugccucucacucagcgcccagauccaagaacucuagacguggaguggagaaguggcguugcuggacacuuaauucucucugacgaggaugucacaagugagguccagggccuguggcgccgccugaauacccuacagcacuauaagguucccgauggcgcgacuguagcccuagugccaugccuuaccaaacacguauugcgggagaaucaggauuacguacccggcgaacgaacccccaugcucgaggacguggaugaagggggaaucagaccguggcaucuggugaaaccuagcgacgagcccgaacccccuaggcccagacgcggaagccuucgcgggggagaaagagagagagccaaagcuaucccagaaaucuacuuaacuagacuucugagcaugaaaggaacucuucagaaauucguggacgaucucuuucaagugauacugucaaccucucgacccguaccccuggcuguuaaguauuucuucgacuuacucgaugaacaggcccaacaacauggaaucuccgaccaggacaccauucacauuuggaagaccaauucccuaccauugagguucuggaucaauauuauuaagaacccacaguucguauucgauguccagacuuccgacaacauggacgccguccuucuagucauugcacagacauucauggaugccugcaccuuagcugaucacaaacuaggacgagauagcccgaucaauaaacugcucuaugcccgcgauaucccaagguacaaacggaugguggagcgcuacuaugccgacauucgccaaacgguaccggccucagaucaagagaugaauaguguccucgccgaauuguccuggaacuacaguggagaccugggcgcgagaguugcccugcaugaauuauauaaguauauuaauaaguauuaugaccagauuauuacagccuuggaggaggacggaacagcacaaaaaaugcagcugggauacagauugcagcagauugcggcagccguggagaauaaagugacagacuuauag

SEQ ID NO: 47537 - protein, 644 aa, Artificial Sequence
  derived and/or modified sequence
MSAVSQPQAAPSPLEKSPSTAILCNTCGNVCKGEVLRVQDKYFHIKCFVCKACGCDLAEGGFFVRQGEYICTLDYQRLYGTRCFSCDQFIEGEVVSALGKTYHPDCFVCAVCRLPFPPGDRVTFNGKECMCQKCSLPVSVGSSAHLSQGLRSCGGCGTEIKNGQALVALDKHWHLGCFKCKSCGKLLNAEYISKDGLPYCEADYHAKFGIRCDSCEKYITGRVLEAGEKHYHPSCALCVRCGQMFAEGEEMYLQGSSIWHPACRQAARTEDRNKETRTSSESIISVPASSTSGSPSRVIYAKLGGEILDYRDLAALPKSKAIYDIDRPDMISYSPYISHSAGDRQSYGEGDQDDRSYKQCRTSSPSSTGSVSLGRYTPTSRSPQHYSRPAGTVSVGTSSCLSLSQHPSPTSVFRHHYIPYFRGSESGRSTPSLSVLSDSKPPPPPTSRHLATHVPDTGVKDNIYRKPPIYRQHAARRSDGEDGSLDQDNRKQKSSWLMLKGDADTRTNSPDLDTQSLSHSSGTDRDPLQRMAGDSFHSRFPYSKSDPLPGHGKNGLDQRNANLAPCGADPDASWGMREYKIYPYDSLIVTNRIRVKLPKDVDRTRLERHLSPEEFQEVFGMSIEEFDRLALWKRNDLKKKALLF

SEQ ID NO: 47538 - protein, 645 aa, Artificial Sequence
  derived and/or modified sequence
MSAVSQPQAAPSPLEKSPSTAILCNTCGNVCKGEVLRVQDKYFHIKCFVCKACGCDLAEGGFFVRQGEYICTLDYQRLYGTRCFSCDQFIEGEVVSALGKTYHPDCFVCAVCRLPFPPGDRVTFNGKECMCQKCSLPVSVGSSAHLSQGLRSCGGCGTEIKNGQALVALDKHWHLGCFKCKSCGKLLNAEYISKDGLPYCEADYHAKFGIRCDSCEKYITGRVLEAGEKHYHPSCALCVRCGQMFAEGEEMYLQGSSIWHPACRQAARTEDRNKETRTSSESIISVPASSTSGSPSRVIYAKLGGEILDYRDLAALPKSKAIYDIDRPDMISYSPYISHSAGDRQSYGEGDQDDRSYKQCRTSSPSSTGSVSLGRYTPTSRSPQHYSRPAGTVSVGTSSCLSLSQHPSPTSVFRHHYIPYFRGSESGRSTPSLSVLSDSKPPPSTYQQAPRHFHVPDTGVKDNIYRKPPIYRQHAARRSDGEDGSLDQDNRKQKSSWLMLKGDADTRTNSPDLDTQSLSHSSGTDRDPLQRMAGDSFHSRFPYSKSDPLPGHGKNGLDQRNANLAPCGADPDASWGMREYKIYPYDSLIVTNRIRVKLPKDVDRTRLERHLSPEEFQEVFGMSIEEFDRLALWKRNDLKKKALLF

SEQ ID NO: 47539 - DNA, 1935 bp, Artificial Sequence
  derived and/or modified sequence
atgtccgccgtttcccagccccaggcagctccatcccccctcgagaaatccccaagtactgctatcctgtgcaatacttgtgggaacgtctgtaaaggggaggtgttacgcgttcaagataagtactttcacatcaaatgctttgtgtgcaaagcctgcgggtgtgacctagccgagggaggcttctttgtccgccagggtgaatacatttgtacactggactaccagagactgtatgggactcgatgtttcagctgcgatcagttcattgaaggggaagtggtttctgcactcgggaaaacttaccacccagactgttttgtctgtgctgtttgtcggctgcctttcccaccgggagacagagtaacattcaatggtaaggagtgcatgtgccagaaatgtagtctacccgtgtccgtaggcagctcagctcatctatcccagggcctcaggtcctgcggaggatgtggaactgaaattaaaaatggtcaggccctggtagccctcgataagcattggcatctggggtgcttcaagtgcaaatcctgcggcaagctcttgaatgccgaatatatttcgaaggatggactgccctattgcgaggccgattaccacgccaagttcggaattcggtgtgattcttgtgagaagtacattacaggaagagtcctcgaggctggagaaaagcactatcatccaagttgtgcactgtgcgtcagatgcgggcaaatgttcgctgaaggggaggaaatgtatctgcagggttcctcgatatggcatccagcctgtaggcaggctgccaggactgaggatcggaacaaagagaccagaacgagtagtgaaagcatcatctctgtgccggcaagcagtacttcaggcagcccctcacgagtgatctacgctaagttgggaggcgaaatcttagattacagagacctcgctgcactacctaagagcaaggctatctatgatatagatcgccccgatatgatttcttactccccgtacatctcccacagcgctggtgaccgccagagttatggagagggcgaccaagatgaccgcagctataagcagtgcaggacttcttctccctctagcaccggcagtgtgtccctcgggcgctataccccaaccagcagaagcccccagcattattcaaggcctgctggaacagtcagcgtaggaacctcgtcatgtttgtccctttctcagcacccttcccccacaagcgtgttccgacatcattacatcccatattttaggggttccgagtcgggaagatcaacaccttcactcagcgtgttgagtgattctaagccacccccacccccaacatctcgccatctggctacacatgtccccgatacaggcgtgaaagacaacatttataggaagccgcccatctatcgtcagcacgcagcccgcaggagtgacggagaagacggctccctggaccaggacaatcggaagcagaagagtagctggctgatgctgaagggcgatgccgacacccgaactaattctcccgacctggacacacagtcattgtcccatagttcagggacagacagggatcctctacagagaatggcgggggactcctttcatagcaggttcccctacagcaagtctgatcccctgcccgggcatggaaaaaatggactcgaccagcggaatgcaaacttggccccctgcggtgcagatccggacgcttcttgggggatgcgggagtataagatttatccttacgattcacttatagtcacaaaccggattcgggtaaaactgcctaaagatgtggatcggactaggttggagcggcacttaagcccagaggaatttcaggaagtgtttgggatgtccatcgaagagtttgaccgcttggccttgtggaagaggaatgaccttaaaaagaaggctctgctgttctag

SEQ ID NO: 47540 - DNA, 1938 bp, Artificial Sequence
  derived and/or modified sequence
atgtccgccgtgtcccagccccaggctgcgccttcaccgttagaaaagagccccagtacggcaattctgtgcaatacctgcggaaatgtgtgtaagggggaagtcctgcgagttcaagataaatacttccacatcaagtgcttcgtgtgtaaggcatgcggctgtgacttagctgagggcggattcttcgtcaggcagggggaatatatatgtacacttgattaccagaggctctatggtactcggtgcttctcttgtgaccaattcatcgagggggaagtagtctccgcgctgggcaagacctaccaccccgactgctttgtgtgcgccgtttgtcggctgccattccctcctggcgatagggtgacgtttaatggaaaggagtgcatgtgccaaaagtgcagtttgccagtcagcgttggctcttccgcccacctctctcaaggactgcgaagctgtggcgggtgcggtactgaaatcaaaaacggccaggcactggtggcattggacaaacactggcacctgggctgtttcaaatgcaagtcatgtggtaaattactcaacgcggagtacataagcaaggatggtctgccatactgtgaggcagactatcatgcaaagttcggcatcaggtgcgactcctgcgaaaaatacattacagggagagtgctggaagcaggcgagaaacactaccacccgtcctgcgctctgtgcgtccgctgtggacagatgtttgcagagggtgaggagatgtacctccagggatcaagcatctggcaccctgcctgcaggcaggcagccaggaccgaggatcgcaataaggagacaagaacctcttcggaatccatcatttctgttccagcaagctcaacgtctgggtcaccttcccgcgtgatatatgctaaactgggaggcgagatcctcgattatagagatctggcggctctccccaagagcaaagccatatacgatatcgataggccggacatgattagctattccccttatatttcccactcagcgggggacagacagtcttatggtgagggtgaccaggatgatcgatcttataaacagtgcagaacgtccagtccatcttccactgggtctgtctctttaggccgctataccccaaccagcaggtctccgcagcattactcccggccggctgggaccgtaagtgtcggcacaagcagttgtcttagcctcagccagcacccttctccgacctctgtgtttagacaccattacataccctatttccggggatctgagtccggccgctctaccccatccctctctgttttatcggatagcaagccaccccccagtacttaccagcaggccccgcgacattttcacgtccctgataccggagtaaaagacaacatctaccgcaaacctccgatatatcgccagcatgcagcgagacgatctgatggcgaggacggcagccttgatcaagacaataggaagcagaagtcttcatggctgatgctgaagggcgatgctgacactcgaacaaattcccccgacctggacactcaatctctgtctcacagttccggtacagatagggatcctctccaacggatggccggcgattcatttcactcccgatttccttactccaaaagcgacccacttcccggacacggaaagaacggtctggaccagcgaaacgcgaatctggctccctgcggcgctgatcctgacgcgtcatggggcatgcgggagtacaagatttatccctacgatagcctgattgtgactaatagaatccgggtgaagcttcctaaagatgtcgaccgaactaggctggaacgccacctgtcgccagaagagttccaggaggtgtttggaatgtctatcgaggagttcgacaggctcgcgctgtggaaacgtaatgacctcaaaaaaaaggctctcctcttttag

SEQ ID NO: 47541 - DNA, 1935 bp, Artificial Sequence
  derived and/or modified sequence
atgtctgctgtgtcccagccccaggccgcccccagccccctggagaagagccccagcacagccatcctgtgcaacacctgtggaaatgtgtgcaagggggaggtgctgcgggtgcaggacaagtacttccacatcaagtgctttgtgtgcaaggcctgtggctgtgacctggccgagggcggcttctttgtgcggcagggcgagtacatctgcaccctggactaccagaggctgtatggcacccgctgcttcagctgtgaccagttcatcgagggggaggtggtgtctgccctgggcaagacctaccacccagactgctttgtgtgtgctgtgtgccgcctgcccttccccccaggggacagagtgaccttcaacgggaaggagtgcatgtgccagaagtgcagcctgcctgtgtctgtgggcagcagcgcccacctgagccagggcctgcggagctgtggcggctgcggcacagagatcaagaatggccaggccctggtggccctggacaagcactggcacctgggctgcttcaagtgcaagagctgtgggaagctgctgaatgctgagtacatcagcaaggatggcctgccctactgtgaggccgactaccacgccaagtttggcatccgctgtgacagctgtgagaagtacatcaccggccgggtgctggaggccggggagaagcactaccaccccagctgtgccctgtgtgtgcgctgtggccagatgtttgctgagggggaggagatgtacctgcagggcagcagcatctggcacccagcctgccggcaggccgccaggacagaggacaggaacaaggagaccaggaccagcagcgagagcatcatctctgtgcctgccagcagcaccagcggcagccccagcagggtcatctatgccaagctgggcggggagatcctggactacagagacctggccgccctgcccaagagcaaggccatctatgacatcgacagaccagacatgatctcctacagcccctacatcagccacagcgctggggaccggcagagctatggagagggggaccaggatgacaggagctacaagcagtgcaggaccagcagccccagcagcacaggctctgtgtccctgggccgctacacccccaccagccgcagcccccagcactacagcaggcctgctggcaccgtgtctgtgggcaccagcagctgcctgagcctgagccagcaccccagccccacctctgtgttccgccaccactacatcccctacttccggggcagcgagagcggccgcagcacccccagcctgtctgtgctgagtgacagcaagcccccacctccacccaccagccgccacctggccacccacgtgcctgacacaggagtgaaggacaacatctacaggaagccacccatctaccggcagcacgccgcccggcggagtgatggagaagatggcagcctggaccaggacaacaggaagcagaagagctcctggctgatgctgaagggagatgctgacaccaggaccaacagcccagacctggacacccagagcctgagccacagcagcggcacagaccgggaccccctgcagaggatggccggggacagcttccacagccgcttcccctacagcaagagtgaccccctgcccggccacggcaagaatggcctggaccagagaaatgccaacctggccccctgtggggctgaccctgatgcctcctggggcatgagggagtacaagatctacccctatgacagcctcatcgtgaccaaccgcatccgggtgaagctgcccaaggatgtggacaggacccggctggagcggcacctgagccctgaggagttccaggaggtgtttggcatgagcattgaggagtttgaccggctggccctgtggaagagaaatgacctgaagaagaaggccctgctcttctag

SEQ ID NO: 47542 - DNA, 1938 bp, Artificial Sequence
  derived and/or modified sequence
atgtctgctgtgtcccagccccaggccgcccccagccccctggagaagagccccagcacagccatcctgtgcaacacctgtggaaatgtgtgcaagggggaggtgctgcgggtgcaggacaagtacttccacatcaagtgctttgtgtgcaaggcctgtggctgtgacctggccgagggcggcttctttgtgcggcagggcgagtacatctgcaccctggactaccagaggctgtatggcacccgctgcttcagctgtgaccagttcatcgagggggaggtggtgtctgccctgggcaagacctaccacccagactgctttgtgtgtgctgtgtgccgcctgcccttccccccaggggacagagtgaccttcaacgggaaggagtgcatgtgccagaagtgcagcctgcctgtgtctgtgggcagcagcgcccacctgagccagggcctgcggagctgtggcggctgcggcacagagatcaagaatggccaggccctggtggccctggacaagcactggcacctgggctgcttcaagtgcaagagctgtgggaagctgctgaatgctgagtacatcagcaaggatggcctgccctactgtgaggccgactaccacgccaagtttggcatccgctgtgacagctgtgagaagtacatcaccggccgggtgctggaggccggggagaagcactaccaccccagctgtgccctgtgtgtgcgctgtggccagatgtttgctgagggggaggagatgtacctgcagggcagcagcatctggcacccagcctgccggcaggccgccaggacagaggacaggaacaaggagaccaggaccagcagcgagagcatcatctctgtgcctgccagcagcaccagcggcagccccagcagggtcatctatgccaagctgggcggggagatcctggactacagagacctggccgccctgcccaagagcaaggccatctatgacatcgacagaccagacatgatctcctacagcccctacatcagccacagcgctggggaccggcagagctatggagagggggaccaggatgacaggagctacaagcagtgcaggaccagcagccccagcagcacaggctctgtgtccctgggccgctacacccccaccagccgcagcccccagcactacagcaggcctgctggcaccgtgtctgtgggcaccagcagctgcctgagcctgagccagcaccccagccccacctctgtgttccgccaccactacatcccctacttccggggcagcgagagcggccgcagcacccccagcctgtctgtgctgagtgacagcaagcccccacccagcacctaccagcaggcccccaggcacttccacgtgcctgacaccggggtgaaggacaacatctacaggaagccacccatctaccggcagcacgccgccaggagaagtgatggagaagatggcagcctggaccaggacaacaggaagcagaagagctcctggctgatgctgaagggagatgctgacaccaggaccaacagcccagacctggacacccagagcctgagccacagcagcggcacagaccgggaccccctgcagaggatggccggggacagcttccacagccgcttcccctacagcaagagtgaccccctgcccggccacggcaagaatggcctggaccagagaaatgccaacctggccccctgtggggctgaccctgatgcctcctggggcatgagggagtacaagatctacccctatgacagcctgattgtgaccaaccgcatccgggtgaagctgcccaaggatgtggacaggacccggctggagcggcacctgagccctgaggagttccaggaggtgtttggcatgagcattgaggagtttgaccggctggccctgtggaagagaaatgacctgaagaagaaggccctgctcttctag

SEQ ID NO: 47543 - DNA, 1935 bp, Artificial Sequence
  derived and/or modified sequence
atgagcgccgtgagccagccccaggccgcccccagccccctggagaaaagtccttccacggctatcctctgcaatacatgcggcaacgtttgcaaaggggaggttttgcgggtgcaggacaagtatttccatattaaatgtttcgtgtgcaaagcgtgtggatgcgatttagccgagggagggttctttgtcagacaaggggaatatatatgtaccctggattatcagcgcctgtatggaactagatgtttcagctgcgaccagtttattgaaggggaggttgtcagcgctctggggaaaacatatcaccccgactgtttcgtatgcgccgtgtgtagactgccttttccaccaggcgaccgcgtgacctttaatggcaaggaatgtatgtgccagaaatgctccctgcccgtatctgttggctcatccgcacatctctctcaggggttacggtcttgtggcggatgcggtaccgaaattaagaatggccaggcacttgttgctctggacaaacattggcaccttggatgcttcaaatgcaagtcatgcggtaaacttctcaacgccgagtatattagtaaggatggcctcccatattgcgaagctgactaccacgctaaattcggcataaggtgcgacagctgtgaaaaatacataactggcagggttctggaggctggggagaagcactaccatcccagctgcgccctgtgtgtgaggtgcggacagatgttcgcagaaggcgaagagatgtacctgcaagggagctccatctggcaccctgcgtgccgccaggccgcgcggactgaggaccgaaacaaggagacaaggaccagttctgagtccataatttccgtgcccgcaagtagcacgagcggaagtccatcaagggtgatctacgcgaagttaggaggtgaaatcctggactatagggacctcgccgcgctccctaagtccaaagcgatatatgacatcgacagaccggacatgatctcttatagtccatacattagccattcagcaggcgacaggcagtcttacggagaaggggaccaggacgataggagttacaagcagtgtcggacgagtagtccaagttccaccggttccgtgagcttggggcggtatacccctacaagtagatccccccagcattacagcaggccagccggaaccgtctccgtcgggacctctagctgcctctctttgtcgcagcaccccagccccacttcagtctttcgtcaccactacattccatattttcgggggagtgagtctgggcgcagtaccccttccctgtcagtcctctctgactctaaacccccacctcctcccaccagtcgccatctcgcaactcatgttcccgacactggagtaaaggacaacatctatcgaaaacctccaatttatcgtcagcacgcagccaggaggtctgatggggaagatggatcccttgaccaggataacaggaaacagaaaagcagctggctcatgcttaaaggcgacgccgacacccgcaccaatagcccagatctggacactcagtccttgagtcattcctcagggacagacagagatcccttgcaacgcatggctggagacagcttccactcgagatttccttattcaaagtccgacccgctaccgggccatggcaaaaatggactggatcagaggaatgcaaatctcgcgccttgtggagccgacccagacgcaagttgggggatgcgcgaatacaagatatatccctatgactcactgattgtgaccaaccgcatcagagtgaaacttcctaaggatgttgaccggacccgtctagaacggcacttgagcccggaggagttccaggaggtattcggtatgtccatcgaagagttcgatagactggcactgtggaaacgcaatgacctaaagaagaaagcactgctcttttag

SEQ ID NO: 47544 - DNA, 1938 bp, Artificial Sequence
  derived and/or modified sequence
atgagcgccgtgagccagccccaggccgcccccagccccctggagaagtcccccagtactgccattctgtgcaacacctgtggtaatgtctgcaaaggtgaggtgctgcgtgtacaggacaagtactttcacatcaaatgtttcgtgtgtaaggcctgcggttgcgatctggccgaaggcggcttttttgttagacagggagagtacatttgcactctcgattatcagcgcctgtacgggacacggtgcttctcttgtgaccagtttatcgaaggcgaggtcgtctctgccctcggaaagacctaccaccctgactgctttgtgtgcgctgtgtgtagattgccttttccgcctggagaccgggtgacttttaatggaaaagagtgcatgtgtcaaaaatgctctctgcctgtgagcgtgggaagctccgcgcatctgagccagggacttaggtcttgtggcggctgtgggaccgaaatcaagaatgggcaggcactggtggccctggacaagcactggcacctcggctgcttcaagtgtaaaagctgcggcaagttgttaaacgctgagtatatctcaaaagatggcctcccctactgcgaagccgactatcatgccaaatttggcatcaggtgcgactcttgtgagaaatacattaccggcagagtgttagaggccggcgagaagcattaccatccaagctgtgctctgtgcgtgcggtgcgggcagatgtttgccgagggagaagagatgtatctgcaggggagtagtatttggcatcccgcttgtcgccaagccgcacgtaccgaggacaggaacaaggagactaggacgtctagtgaatcgattatcagcgtccctgcttccagcacatctgggagcccgagccgagttatctatgcaaaactcggcggcgagatcctggattaccgggatctagctgcactgcccaaatcgaaagctatctacgatatcgacaggcctgacatgatttcttattcaccgtacatctcccacagtgcaggcgaccgccaaagctatggagagggcgaccaggatgatcggtcttacaagcagtgccgcacttcaagtccatcaagcacaggttccgttagtctggggcgatacactcctactagtaggtcgcctcagcactattccagacccgccggcaccgtgtccgtcgggacaagctcttgtctgtccctgagccaacacccaagccctaccagcgtttttcgtcaccactatatcccttatttccggggatccgagagtggaaggtctactccctctctttccgtcttatctgacagcaaacctcccccatcaacatatcagcaggcccctagacattttcatgttcctgatacgggcgtgaaggacaatatataccggaagcctcctatttatagacaacatgcggcccgtagaagtgacggtgaagatgggtccctcgaccaagataaccggaagcagaagtcttcgtggctaatgttgaagggcgacgccgacactcgcactaattcccccgacctggacacccaaagcctgtcacactcaagtggcacagacagagaccctttgcaacgaatggctggggatagcttccattcacgctttccttattcgaaaagtgatcccctgcccgggcacggaaaaaacggtcttgatcagaggaacgccaaccttgcaccctgtggagctgatcctgatgcgtcgtggggcatgagggaatacaaaatctatccatacgactccttaatcgtcaccaacaggatcagagtaaagctccctaaagacgttgacagaactcggctggagcggcacctctcacctgaggaattccaggaggtgtttggcatgagtatcgaggaatttgaccggcttgccctttggaagcggaatgacttgaagaagaaggcacttttattctag

SEQ ID NO: 47545 - DNA, 1935 bp, Artificial Sequence
  derived and/or modified sequence
atgagcgccgtttcccagccccaagccgcaccctcgccgctggaaaagtctccaagcactgctattctgtgcaatacgtgtggtaatgtgtgcaagggcgaggtgctgagggtgcaggacaagtattttcacatcaaatgtttcgtgtgtaaggcttgcggatgtgacctagccgagggaggtttcttcgttcgccaaggggagtacatctgtacgctggattatcagcggttgtatggtacgcgttgctttagctgcgaccaattcattgagggcgaggtggtaagtgcattgggcaaaacctatcaccccgattgcttcgtgtgcgctgtgtgcagactcccattccccccaggcgatagagtgacattcaatggaaaagagtgtatgtgtcaaaagtgcagcctgccggtgtcggtggggtcatcagcccatctgagccaaggacttcgttcttgtggcggatgtgggactgagatcaaaaatggccaggcattggtggctctggacaaacactggcacctggggtgctttaaatgcaagtcatgtggcaagctcctgaacgccgagtacatttcaaaagacgggttgccgtactgcgaagccgattaccatgccaagtttggcatccgctgtgacagctgcgagaagtatatcacgggacgggtgctcgaagcaggggagaaacattaccacccaagctgcgctctgtgcgtgcgatgcggtcagatgttcgccgaaggtgaggaaatgtatctgcagggatcctccatttggcacccagcctgcagacaagcagcacgcacagaagatcgtaacaaggaaactaggacatcgtcggaatctatcattagtgtgccggcttccagtaccagtggttctccctctcgcgtcatttatgctaaacttggcggagaaattttagattatcgcgacctcgccgctcttccgaagagcaaggccatatacgacattgataggccggatatgatctcctatagcccgtacatcagccattctgctggagaccgacagtcatacggggagggggatcaggatgaccgttcctacaaacagtgccgcacctcctcacctagctcaaccggaagcgtaagtctgggcaggtacacgcccacaagtaggagcccacagcattatagccgcccagcaggcaccgtctcagttggaacaagcagttgcctcagtctcagtcaacatccctcccctaccagcgtgtttaggcaccattatatcccctatttccggggatccgagagtggaagatccactccgtcactcagtgtgctctctgactccaaacctccaccaccacctacctcgaggcatctggctacccacgtgcccgatactggcgtgaaggacaacatttatcgtaaacctccgatctataggcagcatgccgctagaaggagtgatggcgaagacggcagccttgatcaggataaccgcaagcagaagagttcatggctcatgctgaaaggagacgccgataccagaactaacagtcccgatctggacactcagtctctttcacattccagtggaactgatcgcgaccctctgcaacggatggctggggactcatttcatagccgattcccttactctaagtccgacccgctgcccggtcatggtaaaaacggtcttgatcagcggaacgccaacctggctccttgtggtgcggatcctgacgcatcatggggcatgagggagtataaaatttatccctatgattcactgatcgtgaccaatcgtattcgcgtaaaactacccaaagacgttgaccgcacacggcttgagcgacacttgagccctgaggagtttcaggaagtattcggcatgagcatcgaagagttcgacaggctggccctgtggaagcggaatgacctcaagaagaaggccctgctgttttag

SEQ ID NO: 47546 - DNA, 1938 bp, Artificial Sequence
  derived and/or modified sequence
atgtctgccgtatctcagcctcaggctgcaccaagccctctggagaagagcccttctactgccatcctgtgtaatacatgcgggaatgtctgcaaaggcgaggttctccgtgtgcaagacaagtacttccacattaagtgttttgtttgtaaggcttgcggctgcgaccttgccgagggcggtttttttgtgaggcagggtgagtacatttgtaccctcgactatcaacgcctctacggcacccgatgcttctcttgcgatcagttcattgaaggcgaagtggtgtctgctctcggcaagacctatcatcctgattgtttcgtttgcgctgtctgccggttgcccttccctccaggggacagggtgacgttcaacggcaaggaatgtatgtgccaaaaatgtagtctgcccgttagcgtgggctcgtctgcacacctcagccagggacttcgcagttgtggcggatgcggcaccgagatcaaaaatggacaggcactggtcgctctggacaagcactggcacttgggctgctttaagtgcaagtcttgcggcaagttactgaacgctgagtacattagcaaagatggactgccatattgtgaagctgattatcacgccaagttcgggatacggtgtgattcatgcgaaaagtacatcacaggaagagttctggaggcaggggaaaagcactatcatccctcttgtgccctgtgcgttagatgtggacaaatgttcgccgagggcgaagaaatgtacttacaaggctcttcaatttggcaccctgcctgcaggcaggctgcaagaactgaagatcggaataaggagactagaactagtagcgagagtatcatctccgtgcccgcaagctctaccagcggcagtccctctagggtgatctacgccaagctgggtggtgagatcctggattatagggacctcgccgctctgcccaagagcaaggcaatctatgatattgataggccagacatgatatcctactccccttatatctcacactccgcgggtgataggcagtcctatggagagggagaccaggatgatcgctcatataagcagtgccggactagcagcccatcctctacgggatccgttagccttggacgctatacgcctaccagccgctctccacagcattattctcggccagccggtacagtgagcgtgggcactagttcttgtctgtccctcagccagcacccctctccgacatcagtgtttagacatcattacataccatactttagggggagcgagtcaggccgttctacaccctctctttcagttttgagcgacagcaagcccccaccctcaacctaccagcaggccccacggcattttcatgttcctgacactggggttaaagacaatatctatcggaaacccccaatttacagacagcacgccgctcggaggtccgatggcgaggatgggtcccttgaccaggacaacagaaaacagaaatcctcctggctgatgctcaagggggacgctgacacacgcacaaacagtcctgatttggacacccagtctctctctcattctagcgggacagaccgagacccccttcagcgcatggctggcgactccttccactcaaggttcccctattctaagtccgatccattgcccggacacgggaaaaacggcctcgatcagcgaaacgcaaatctggcaccctgtggcgcagaccctgacgctagctgggggatgagagagtacaaaatttacccttatgacagcctcatagtgaccaacagaattcgggtcaaattacccaaggacgtggataggacaagactcgagcggcacctgtctcctgaggagttccaggaggtatttgggatgtcaatcgaggagtttgaccgtctagcactctggaaacgcaatgacctcaagaagaaagccctgctgttctag

SEQ ID NO: 47547 - DNA, 3752 bp, Artificial Sequence
  derived and/or modified sequence
tgcggcggcgctgcctggcgtgtgcgcaaggagcgggcgcggagccggcgggcgggcggaggatagcgcgggcgcggcacctgcgggcccgagggtctggctgtcgcagcgccgggccgccccgactccgagcggctgctgagatgagtgcagtgtcgcagccccaggctgctcccagcccgctggagaagtcgcccagcacggcgatcctgtgcaacacgtgtgggaatgtgtgcaagggcgaggtgctgcgggtgcaggacaagtacttccacatcaagtgcttcgtctgtaaagcatgtggctgcgacctggccgagggcggcttcttcgtgcggcagggcgagtacatctgcacgctggactaccagaggctctacggcacccgctgcttcagctgcgaccagttcattgagggtgaggtggtgtcggcgctgggcaagacctaccaccccgactgcttcgtgtgtgccgtctgccggctgcccttcccccccggggaccgagtgaccttcaacgggaaggaatgcatgtgccagaagtgttccctgcccgtatcggtgggcagcagcgcgcacctgtcccagggcctccgaagttgtgggggctgcggcacagaaatcaagaatggccaggccctggtagccttggacaagcactggcacttgggctgttttaagtgcaagagctgtgggaagctcctgaatgccgagtacatcagcaaggatgggctgccctactgcgaagctgactatcacgccaagttcggcatccgctgtgacagctgtgagaaatacatcacggggcgcgtgctggaggccggagagaagcactaccacccttcctgcgcgctatgtgtcaggtgcggccagatgtttgcagaaggcgaagagatgtatcttcaaggttcctccatctggcatccggcgtgtcgacaagcagccagaactgaagacagaaacaaggaaaccagaacttcctcagagagcatcatttctgtccctgcttccagcacctcagggtctccgagccgtgtgatttatgccaagcttggtggtgagatcctggactacagggacttggcagcccttcctaaaagtaaggccatctatgacatcgaccgccccgacatgatctcctactcaccctacatcagccactctgcaggggacaggcagagctacggcgagggggatcaggatgaccggtcctacaagcagtgtcggacctccagcccaagctccactgggtcggttagcctcgggcgctacactccgacctcacggtcaccacagcactacagccgtccagctggtactgtgagtgtgggtaccagtagctgcctctccctgtcccaacacccaagccctacatccgtgttcagacatcattacatcccctacttccgaggcagtgaaagtggccggagcacccccagcctctccgtgctctctgacagcaagccgccccctccacctaccagcaggcacctcgccactcacgtcccagacactggcgtaaaagataacatctataggaaaccccctatctacagacagcatgctgccaggcgatcggatggggaggatggaagcttggaccaggataacaggaagcagaagagcagctggctgatgctcaagggggatgcagacacaaggaccaattctccagacctggacacccagtccttgtcccacagcagcgggaccgacagagaccctctccaaaggatggcaggggacagctttcactcacgattcccctattccaaatctgaccctctcccaggacatggaaagaatggcttggaccagcggaatgccaatctggccccctgtggagcagacccggatgccagctggggcatgcgagaatacaagatctatccgtatgactccctcatcgtcacaaaccgaattcgcgtgaaactgcccaaagacgtggaccggacgagactggagagacacttgtcgcccgaggagttccaggaagtgtttgggatgagcatcgaggagtttgaccgcctggccctctggaagaggaatgaccttaagaagaaagcccttttgttctgacggctgccagcctgccccactggtgtgtgccgggcgccgaggccaggggcccctggcgagaaccgcacacacccctcccacacaccttgctctggcttctctgtgtccatggggtgggcgggagggggtcccccagcaggtgcggcccctgcacctgccggcgacactcctgccggtagtttagggccgagacggctagcttcacgccacccttccccgctgtggcttggtgtcagggagaggctgtagagtggctgtgtcgggcatcagatggagcacacaggtggctgcagcccagcccaccttcccagcgttctcgaggtgccctggccccggtgctgggcacgtgggggacagaggtggccgggacgtgagctgtgaggcttgttgatgatggttgctgacaccatcatcgggggtgggcacacggcccttcggagcctgggcagcctggcctcacaggcagactcgcagacggggcagtgagcgtctgggacagtgccaagagtggggtgtgtgatttttgcaggcgtctgtgatgggtctctttagggacaaatgtcaacaagggacaagacagggcaccttccgccagcgcccctccatgcgctgcgttcctcctccagatcgacccctagatgcctacacaatatctttaaagtaacacagaagtttttattttattaaaaagtatagcctacttaaacgcgagatgacatatatagagtttaattttacggtccctccgcaggggagcggcctccagccttattctccaccgctcggatctgtgtggtttcagtctgttcttggtgtggtcctcatacacagagctccctgtctagtttcttttctttttcttttttctttttctcgtcacacaggtaaccttaaagacagacccctctaaagaacgctttgtaaatacatgtgaggtatagccaccactgttttccttgctgttatttttccaagtcttggggagaaaacatcctcctctgatggccaaagccctggaatcaagggtttccacgtaccctgcctaatacccgacgtagctcttgatgcaccgtccttgtgctgtggctggcggtgtctcagcctgaaacataaaccccacatgccccaggagcgatgtgctccctgaaacagacaaccacacgctgttggggagagaaggatggagataggatggagataggatggagatgtggctcttctcatctttgaagccagcagggcatcccggagcaggaggctggccgggctccccaagcgaaggcgttggtgtctgtcattaggtgtgtgttagggtgcagcaccggccgtcacaggatgctgataagcgcgctgagaggtggatgaaacaccaaagtctgtttccccgtccgcagtgggtgttgcctctttgtgtgtgtcccgatgttcctgcctgtgagtcggccttactccgtttccttagcgcccatgacacgccaagtcccgtttcgcactcggcttctcacccgcccagctcggctagggagggggagtttttagcacctaatatgcttcctgccattgcgcaatctgagcctgagcaactggaaacccccatttctcattagtgcaatgtcatatctgatcccaggaagcctggaaaataaaagacgatgcattataacttgcggaagt

SEQ ID NO: 47548 - DNA, 2902 bp, Artificial Sequence
  derived and/or modified sequence
gactccgagcggctgctgagatgagtgcagtgtcgcagccccaggctgctcccagcccgctggagaagtcgcccagcacggcgatcctgtgcaacacgtgtgggaatgtgtgcaagggcgaggtgctgcgggtgcaggacaagtacttccacatcaagtgcttcgtctgtaaagcatgtggctgcgacctggccgagggcggcttcttcgtgcggcagggcgagtacatctgcacgctggactaccagaggctctacggcacccgctgcttcagctgcgaccagttcattgagggtgaggtggtgtcggcgctgggcaagacctaccaccccgactgcttcgtgtgtgccgtctgccggctgcccttcccccccggggaccgagtgaccttcaacgggaaggaatgcatgtgccagaagtgttccctgcccgtatcggtgggcagcagcgcgcacctgtcccagggcctccgaagttgtgggggctgcggcacagaaatcaagaatggccaggccctggtagccttggacaagcactggcacttgggctgttttaagtgcaagagctgtgggaagctcctgaatgccgagtacatcagcaaggatgggctgccctactgcgaagctgactatcacgccaagttcggcatccgctgtgacagctgtgagaaatacatcacggggcgcgtgctggaggccggagagaagcactaccacccttcctgcgcgctatgtgtcaggtgcggccagatgtttgcagaaggcgaagagatgtatcttcaaggttcctccatctggcatccggcgtgtcgacaagcagccagaactgaagacagaaacaaggaaaccagaacttcctcagagagcatcatttctgtccctgcttccagcacctcagggtctccgagccgtgtgatttatgccaagcttggtggtgagatcctggactacagggacttggcagcccttcctaaaagtaaggccatctatgacatcgaccgccccgacatgatctcctactcaccctacatcagccactctgcaggggacaggcagagctacggcgagggggatcaggatgaccggtcctacaagcagtgtcggacctccagcccaagctccactgggtcggttagcctcgggcgctacactccgacctcacggtcaccacagcactacagccgtccagctggtactgtgagtgtgggtaccagtagctgcctctccctgtcccaacacccaagccctacatccgtgttcagacatcattacatcccctacttccgaggcagtgaaagtggccggagcacccccagcctctccgtgctctctgacagcaagccgcccccctccacctaccagcaggcacctcgccacttccacgtcccagacactggcgtaaaagataacatctataggaaaccccctatctacagacagcatgctgccaggcgatcggatggggaggatggaagcttggaccaggataacaggaagcagaagagcagctggctgatgctcaagggggatgcagacacaaggaccaattctccagacctggacacccagtccttgtcccacagcagcgggaccgacagagaccctctccaaaggatggcaggggacagctttcactcacgattcccctattccaaatctgaccctctcccaggacatggaaagaatggcttggaccagcggaatgccaatctggccccctgtggagcagacccggatgccagctggggcatgcgagaatacaagatctatccgtatgactccctcatcgtcacaaaccgaattcgcgtgaaactgcccaaagacgtggaccggacgagactggagagacacttgtcgcccgaggagttccaggaagtgtttgggatgagcatcgaggagtttgaccgcctggccctctggaagaggaatgaccttaagaagaaagcccttttgttctgacggctgccagcctgccccactggtgtgtgccgggcgccgaggccaggggcccctggcgagaaccgcacacacccctcccacacaccttgctctggcttctctgtgtccatggggtgggcgggagggggtcccccagcaggtgcggcccctgcacctgccggcgacactcctgccggtagtttagggccgagacggctagcttcacgccacccttccccgctgtggcttggtgtcagggagaggctgtagagtggctgtgtcgggcatcagatggagcacacaggtggctgcagcccagcccaccttcccagcgttctcgaggtgccctggccccggtgctgggcacgtgggggacagaggtggccgggacgtgagctgtgaggcttgttgatgatggttgctgacaccatcatcgggggtgggcacacggcccttcggagcctgggcagcctggcctcacaggcagactcgcagacggggcagtgagcgtctgggacagtgccaagagtggggtgtgtgatttttgcaggcgtctgtgatgggtctctttagggacaaatgtcaacaagggacaagacagggcaccttccgccagcgcccctccatgcgctgcgttcctcctccagatcgacccctagatgcctacacaatatctttaaagtaacacagaagtttttattttattaaaaagtatagcctacttaaacgcgagatgacatatatagagtttaattttacggtccctccgcaggggagcggcctccagccttattctccaccgctcggatctgtgtggtttcagtctgttcttggtgtggtcctcatacacagagctccctgtctagtttcttttctttttcttttttctttttctcgtcacacaggtaaccttaaagacagacccctctaaagaacgctttgtaaatacatgtgaggtatagcca

SEQ ID NO: 47549 - DNA, 1935 bp, Artificial Sequence
  derived and/or modified sequence
atgagcgccgtgagccagccccaggccgcccccagccccctggagaagagccccagcaccgccatcctgtgcaacacctgcggcaacgtgtgcaagggcgaggtgctgagagtgcaggacaagtacttccacatcaagtgcttcgtgtgcaaggcctgcggctgcgacctggccgagggcggcttcttcgtgagacagggcgagtacatctgcaccctggactaccagagactgtacggcaccagatgcttcagctgcgaccagttcatcgagggcgaggtggtgagcgccctgggcaagacctaccaccccgactgcttcgtgtgcgccgtgtgcagactgcccttcccccccggcgacagagtgaccttcaacggcaaggagtgcatgtgccagaagtgcagcctgcccgtgagcgtgggcagcagcgcccacctgagccagggcctgagaagctgcggcggctgcggcaccgagatcaagaacggccaggccctggtggccctggacaagcactggcacctgggctgcttcaagtgcaagagctgcggcaagctgctgaacgccgagtacatcagcaaggacggcctgccctactgcgaggccgactaccacgccaagttcggcatcagatgcgacagctgcgagaagtacatcaccggcagagtgctggaggccggcgagaagcactaccaccccagctgcgccctgtgcgtgagatgcggccagatgttcgccgagggcgaggagatgtacctgcagggcagcagcatctggcaccccgcctgcagacaggccgccagaaccgaggacagaaacaaggagaccagaaccagcagcgagagcatcatcagcgtgcccgccagcagcaccagcggcagccccagcagagtgatctacgccaagctgggcggcgagatcctggactacagagacctggccgccctgcccaagagcaaggccatctacgacatcgacagacccgacatgatcagctacagcccctacatcagccacagcgccggcgacagacagagctacggcgagggcgaccaggacgacagaagctacaagcagtgcagaaccagcagccccagcagcaccggcagcgtgagcctgggcagatacacccccaccagcagaagcccccagcactacagcagacccgccggcaccgtgagcgtgggcaccagcagctgcctgagcctgagccagcaccccagccccaccagcgtgttcagacaccactacatcccctacttcagaggcagcgagagcggcagaagcacccccagcctgagcgtgctgagcgacagcaagcccccccccccccccaccagcagacacctggccacccacgtgcccgacaccggcgtgaaggacaacatctacagaaagccccccatctacagacagcacgccgccagaagaagcgacggcgaggacggcagcctggaccaggacaacagaaagcagaagagcagctggctgatgctgaagggcgacgccgacaccagaaccaacagccccgacctggacacccagagcctgagccacagcagcggcaccgacagagaccccctgcagagaatggccggcgacagcttccacagcagattcccctacagcaagagcgaccccctgcccggccacggcaagaacggcctggaccagagaaacgccaacctggccccctgcggcgccgaccccgacgccagctggggcatgagagagtacaagatctacccctacgacagcctgatcgtgaccaacagaatcagagtgaagctgcccaaggacgtggacagaaccagactggagagacacctgagccccgaggagttccaggaggtgttcggcatgagcatcgaggagttcgacagactggccctgtggaagagaaacgacctgaagaagaaggccctgctgttctag

SEQ ID NO: 47550 - DNA, 1938 bp, Artificial Sequence
  derived and/or modified sequence
atgagcgccgtgagccagccccaggccgcccccagccccctggagaagagccccagcaccgccatcctgtgcaacacctgcggcaacgtgtgcaagggcgaggtgctgagagtgcaggacaagtacttccacatcaagtgcttcgtgtgcaaggcctgcggctgcgacctggccgagggcggcttcttcgtgagacagggcgagtacatctgcaccctggactaccagagactgtacggcaccagatgcttcagctgcgaccagttcatcgagggcgaggtggtgagcgccctgggcaagacctaccaccccgactgcttcgtgtgcgccgtgtgcagactgcccttcccccccggcgacagagtgaccttcaacggcaaggagtgcatgtgccagaagtgcagcctgcccgtgagcgtgggcagcagcgcccacctgagccagggcctgagaagctgcggcggctgcggcaccgagatcaagaacggccaggccctggtggccctggacaagcactggcacctgggctgcttcaagtgcaagagctgcggcaagctgctgaacgccgagtacatcagcaaggacggcctgccctactgcgaggccgactaccacgccaagttcggcatcagatgcgacagctgcgagaagtacatcaccggcagagtgctggaggccggcgagaagcactaccaccccagctgcgccctgtgcgtgagatgcggccagatgttcgccgagggcgaggagatgtacctgcagggcagcagcatctggcaccccgcctgcagacaggccgccagaaccgaggacagaaacaaggagaccagaaccagcagcgagagcatcatcagcgtgcccgccagcagcaccagcggcagccccagcagagtgatctacgccaagctgggcggcgagatcctggactacagagacctggccgccctgcccaagagcaaggccatctacgacatcgacagacccgacatgatcagctacagcccctacatcagccacagcgccggcgacagacagagctacggcgagggcgaccaggacgacagaagctacaagcagtgcagaaccagcagccccagcagcaccggcagcgtgagcctgggcagatacacccccaccagcagaagcccccagcactacagcagacccgccggcaccgtgagcgtgggcaccagcagctgcctgagcctgagccagcaccccagccccaccagcgtgttcagacaccactacatcccctacttcagaggcagcgagagcggcagaagcacccccagcctgagcgtgctgagcgacagcaagcccccccccagcacctaccagcaggcccccagacacttccacgtgcccgacaccggcgtgaaggacaacatctacagaaagccccccatctacagacagcacgccgccagaagaagcgacggcgaggacggcagcctggaccaggacaacagaaagcagaagagcagctggctgatgctgaagggcgacgccgacaccagaaccaacagccccgacctggacacccagagcctgagccacagcagcggcaccgacagagaccccctgcagagaatggccggcgacagcttccacagcagattcccctacagcaagagcgaccccctgcccggccacggcaagaacggcctggaccagagaaacgccaacctggccccctgcggcgccgaccccgacgccagctggggcatgagagagtacaagatctacccctacgacagcctgatcgtgaccaacagaatcagagtgaagctgcccaaggacgtggacagaaccagactggagagacacctgagccccgaggagttccaggaggtgttcggcatgagcatcgaggagttcgacagactggccctgtggaagagaaacgacctgaagaagaaggccctgctgttctag

SEQ ID NO: 47551 - protein, 611 aa, Artificial Sequence
  derived and/or modified sequence
MSAVSQPQAAPSPLEKSPSTAILCNTCGNVCKGEVLRVQDKYFHIKCFVCKACGCDLAEGGFFVRQGEYICTLDYQRLYGTRCFSCDQFIEGEVVSALGKTYHPDCFVCAVCRLPFPPGDRVTFNGKECMCQKCSLPVSVGSSAHLSQGLRSCGGCGTEIKNGQALVALDKHWHLGCFKCKSCGKLLNAEYISKDGLPYCEADYHAKFGIRCDSCEKYITGRVLEAGEKHYHPSCALCVRCGQMFAEGEEMYLQGSSIWHPACRQAARTEDRNKETRTSSESIISVPASSTSGSPSRVIYAKLGGEILDYRDLAALPKSKAIYDIDRPDMISYSPYISHSAGDRQSYGEGDQDDRSYKQCRTSSPSSTGSVSLGRYTPTSRSPQHYSRPGSESGRSTPSLSVLSDSKPPPSTYQQAPRHFHVPDTGVKDNIYRKPPIYRQHAARRSDGEDGSLDQDNRKKSSWLMLKGDADTRTNSPDLDTQSLSHSSGTDRDPLQRMAGDSFHSRFPYSKSDPLPGHGKNGLDQRNANLAPCGADPDASWGMREYKIYPYDSLIVTNRIRVKLPKDVDRTRLERHLSPEEFQEVFGMSIEEFDRLALWKRNDLKKKALLF

SEQ ID NO: 47552 - DNA, 1836 bp, Artificial Sequence
  derived and/or modified sequence
atgtctgcggtgagtcagccacaggcagccccttctccgttggagaagagcccttcgactgcaattctctgcaacacatgcggcaacgtatgtaagggggaggtgctgagggtgcaggacaaatattttcacataaagtgttttgtttgcaaggcctgcggctgtgacttagcagaaggggggttcttcgtcagacaaggtgaatatatttgcaccctcgattaccagcggctgtatggtacgcggtgcttctcctgtgaccagtttatcgagggagaagtggtcagcgccttgggcaaaacttaccatccagattgttttgtttgtgcggtttgccgactgccattcccacctggtgaccgtgtgacatttaacggaaaagaatgtatgtgtcagaagtgttcactgccagttagcgtaggttcatcagcccatctgtctcaaggcttgcgctcttgtggcggctgtggaactgagatcaagaatggacaggcactggtcgctctcgataagcactggcacctgggttgttttaaatgtaaatcctgtggtaagctgctgaacgccgaatacattagtaaggacggcttgccctattgcgaagcagactaccacgcaaagttcggcatacggtgtgattcctgcgaaaagtacatcactgggcgtgtcctcgaggctggcgagaagcattatcaccctagttgtgccttgtgtgtacggtgcgggcaaatgttcgctgagggcgaggaaatgtatctgcaaggtagctcgatctggcatcccgcctgtagacaggctgccaggacggaggaccgcaacaaagagacccggaccagcagcgagtccattatctcagtgccggcatcatctacgtccggctcgccgtccagagtgatatacgcaaagctcggcggcgaaattcttgactacagggatctcgccgctttgcccaaatccaaggccatttacgatatcgatcgccccgatatgatttcttacagcccctatatctcccatagtgctggcgaccgacaatcctacggggagggcgaccaggacgatcgttcatacaaacaatgtagaactagcagtccatctagtacagggagcgtgagtcttgggagatatacaccaacaagcaggtctccacaacattactccaggcccggctctgaaagcggtcgctctaccccttcattgtccgttttaagcgatagtaaacccccgccatcgacttatcagcaggccccccgtcattttcacgtccccgacactggagtgaaggacaacatttatcggaagcctcccatctaccggcagcacgcagctcgaagaagcgatggggaggacggaagtctggaccaggacaacaggaaaaagtccagttggctgatgctaaagggagacgccgataccaggacgaacagcccagaccttgatactcaatcactttcacactcatccggcacggacagagaccctctgcagcgaatggctggcgactcgttccatagccgattcccttactctaaatcagaccctctacctgggcacggaaaaaacggtctagaccaacgaaacgccaatttggccccatgtggcgcagatcctgatgcgtcctgggggatgagagagtacaagatatacccctacgattccttgatcgtgactaacagaatcagagtcaagctacccaaagacgtggatcggaccagacttgaaaggcatctttctccggaggagtttcaggaagtattcggcatgagcatagaggagtttgaccgcctggccttatggaaacggaacgatctcaaaaaaaaagcgctgctcttttag

SEQ ID NO: 47553 - DNA, 1836 bp, Artificial Sequence
  derived and/or modified sequence
atgtctgctgtgtcccagccccaggccgcccccagccccctggagaagagccccagcacagccatcctgtgcaacacctgtggaaatgtgtgcaagggggaggtgctgcgggtgcaggacaagtacttccacatcaagtgctttgtgtgcaaggcctgtggctgtgacctggccgagggcggcttctttgtgcggcagggcgagtacatctgcaccctggactaccagaggctgtatggcacccgctgcttcagctgtgaccagttcatcgagggggaggtggtgtctgccctgggcaagacctaccacccagactgctttgtgtgtgctgtgtgccgcctgcccttccccccaggggacagagtgaccttcaacgggaaggagtgcatgtgccagaagtgcagcctgcctgtgtctgtgggcagcagcgcccacctgagccagggcctgcggagctgtggcggctgcggcacagagatcaagaatggccaggccctggtggccctggacaagcactggcacctgggctgcttcaagtgcaagagctgtgggaagctgctgaatgctgagtacatcagcaaggatggcctgccctactgtgaggccgactaccacgccaagtttggcatccgctgtgacagctgtgagaagtacatcaccggccgggtgctggaggccggggagaagcactaccaccccagctgtgccctgtgtgtgcgctgtggccagatgtttgctgagggggaggagatgtacctgcagggcagcagcatctggcacccagcctgccggcaggccgccaggacagaggacaggaacaaggagaccaggaccagcagcgagagcatcatctctgtgcctgccagcagcaccagcggcagccccagcagggtcatctatgccaagctgggcggggagatcctggactacagagacctggccgccctgcccaagagcaaggccatctatgacatcgacagaccagacatgatctcctacagcccctacatcagccacagcgctggggaccggcagagctatggagagggggaccaggatgacaggagctacaagcagtgcaggaccagcagccccagcagcacaggctctgtgtccctgggccgctacacccccaccagccgcagcccccagcactacagcaggcctggcagcgagagcggccgcagcacccccagcctgtctgtgctgagtgacagcaagcccccacccagcacctaccagcaggcccccaggcacttccacgtgcctgacacaggagtgaaggacaacatctacaggaagccacccatctaccggcagcacgccgcccggcggagtgatggagaagatggcagcctggaccaggacaacaggaagaagagctcctggctgatgctgaagggagatgctgacaccaggaccaacagcccagacctggacacccagagcctgagccacagcagcggcacagaccgggaccccctgcagaggatggccggggacagcttccacagccgcttcccctacagcaagagtgaccccctgcccggccacggcaagaatggcctggaccagagaaatgccaacctggccccctgtggggctgaccctgatgcctcctggggcatgagggagtacaagatctacccctatgacagcctgattgtgaccaaccgcatccgggtgaagctgcccaaggatgtggacaggacccggctggagcggcacctgagccctgaggagttccaggaggtgtttggcatgagcattgaggagtttgaccggctggccctgtggaagagaaatgacctgaagaagaaggccctgctcttctag

SEQ ID NO: 47554 - DNA, 1836 bp, Artificial Sequence
  derived and/or modified sequence
atgagcgccgtgagccagccccaggccgcccccagccccctggagaagtccccttccaccgcaatactatgtaacacatgcgggaacgtatgtaaaggcgaggtcttacgcgtacaggacaagtattttcacattaaatgttttgtgtgcaaagcttgtggctgcgatctggctgagggaggattcttcgtgcggcagggagagtatatttgcacccttgattaccagcggttatatgggactcgttgtttttcctgcgaccaattcatcgagggcgaagttgtctcagctcttggaaagacataccaccctgactgcttcgtctgcgctgtgtgtcggctgcccttcccaccaggagaccgagtgaccttcaatggcaaggagtgcatgtgtcagaaatgttcgctgcccgtgtcagtgggctcgtctgcccacctatcacaaggccttagaagctgtggaggctgcggaacggagatcaagaacggacaagcactggtcgccctcgacaagcactggcacctgggatgcttcaaatgtaagtcctgcgggaaacttcttaatgccgaatatatctccaaagacgggctcccttactgtgaggccgattaccacgccaaattcggcatcagatgcgatagttgtgagaagtacatcaccggcagagtcctggaggccggtgagaaacattaccaccccagctgcgccttatgcgtgcgctgtggccagatgttcgccgagggtgaagaaatgtacctccaggggagttccatttggcaccctgcctgtagacaagccgccaggaccgaggacaggaacaaagaaacgagaacctccagcgagagcatcatatccgtcccagcaagctctacgagtggttcaccatccagggtcatttacgctaaactgggaggggagattctggattacagagacctcgccgcactcccaaagagcaaagcgatctatgatatcgacagacctgacatgatctcttattctccatatatcagccatagcgcaggagatcggcagtcgtacggcgagggagatcaggatgatagaagctacaagcagtgcagaactagttcacctagctcaaccggtagtgtgagtctgggcaggtacacccctactagcaggtctcctcaacactattcaagaccagggagtgagtccggcaggtcaactccaagcctttcagtgttgagcgatagcaagccccctccgtctacctatcagcaggctccccggcatttccacgtacccgacacaggagtcaaagataatatttatcggaaaccccctatttaccgtcaacatgctgctcggcgcagtgatggtgaggatggatcgcttgaccaagacaaccgcaagaaatcgtcgtggctgatgctaaagggggacgccgacacccggaccaactctcctgatcttgacacccagagcttaagccattcttctggcacagaccgcgaccctttgcagaggatggcgggagactcattccactcacggtttccatatagcaaatctgatccactccctggacatggaaaaaatgggctcgaccaacgtaatgccaacctagcaccatgcggagcagacccggatgcctcatggggtatgagggaatacaaaatctatccctacgattctctaatagtgaccaaccggatcagggttaaactgccaaaggacgtcgaccgcacccgcctcgagcggcatctcagccccgaggagttccaagaggtgttcggcatgtccattgaagaattcgatcggctggccctgtggaaacggaacgatctcaaaaaaaaagccctcttgttttag

SEQ ID NO: 47555 - DNA, 1836 bp, Artificial Sequence
  derived and/or modified sequence
atgtccgccgtttcacagcctcaggcagcaccgtctccactggaaaaatctccctccacggccatcttgtgcaacacctgcggcaacgtatgcaagggcgaggtcttgagggtgcaggataaatactttcatatcaagtgctttgtctgcaaggcatgcggatgcgatttagccgagggtggctttttcgttcggcaaggagagtacatctgcacgttggactaccagcgactgtacgggacccgctgtttctcatgtgaccagttcattgagggtgaagtagtcagtgctctgggcaagacctatcacccggactgttttgtgtgcgccgtgtgtaggcttcctttccccccaggcgatcgcgttaccttcaacgggaaagagtgcatgtgccagaagtgcagtctgccggtgtccgtagggagctcagctcatctcagccagggcttgaggtcctgcggcggatgtggcactgaaatcaagaatggccaggctctggtggccttagataaacactggcatttgggttgcttcaagtgtaaatcctgtgggaagctcctcaacgccgagtatattagtaaggatgggttaccttactgtgaggcagactaccatgctaaatttggcattagatgcgacagctgtgaaaaatatataaccggcagagtcttggaagccggtgaaaaacattatcacccctcgtgcgcgttatgcgttaggtgcggacaaatgttcgccgagggggaggagatgtatctgcaggggtcctccatatggcacccggcatgtagacaggcagccagaacagaagaccgcaataaggaaacccggacaagtagtgaatcaatcatttccgttccggcatctagcacatccggctctccatctagagtcatctatgcaaagctaggaggagagatcttggattaccgcgatctggccgcactgcccaagagcaaggccatctacgacatagaccggcctgatatgatatcctactccccatacatctctcatagtgcaggcgaccgccagagctatggagaaggcgatcaggacgaccgatcatacaagcaatgccgcacaagtagtccttcaagcaccggatcagtttctctcggaagatatacccctacctcgcgctcaccccagcactattcacggccaggctcggagagcggacggagcacaccatccctctccgtgctgtctgattctaaacctccaccaagcacatatcagcaagcccctaggcacttccatgtgcccgataccggcgtgaaggataatatctatcgcaaacccccaatctatagacagcatgctgccagaaggagcgacggcgaagacggcagtcttgaccaggataatcgtaaaaaatcatcctggctgatgttaaagggtgatgcagacactaggacaaactctccagatctcgatacgcaatcgttgagtcatagttctggtaccgatagagatcccctgcaacggatggcaggagatagcttccactccaggttcccctactctaagtctgatcccctccccggacacggaaaaaacgggttagaccaaagaaacgcaaacctcgccccatgcggcgcagaccccgacgcttcctgggggatgcgggaatacaagatctatccttacgactcacttattgttacaaaccggatccgagtgaagctgccaaaggatgtcgatcgaacgcggcttgaacggcatctcagtcctgaggaatttcaggaagtctttggcatgtccatagaggagtttgataggctggcactgtggaaaaggaacgacctgaaaaagaaagctctactcttctag

SEQ ID NO: 47556 - DNA, 2589 bp, Artificial Sequence
  derived and/or modified sequence
acctgcgggcccgagggtctggctgtcgcagcgccgggccgccccgactccgagcggctgctgagatgagtgcagtgtcgcagccccaggctgctcccagcccgctggagaagtcgcccagcacggcgatcctgtgcaacacgtgtgggaatgtgtgcaagggcgaggtgctgcgggtgcaggacaagtacttccacatcaagtgcttcgtctgtaaagcatgtggctgcgacctggccgagggcggcttcttcgtgcggcagggcgagtacatctgcacgctggactaccagaggctctacggcacccgctgcttcagctgcgaccagttcattgagggtgaggtggtgtcggcgctgggcaagacctaccaccccgactgcttcgtgtgtgccgtctgccggctgcccttcccccccggggaccgagtgaccttcaacgggaaggaatgcatgtgccagaagtgttccctgcccgtatcggtgggcagcagcgcgcacctgtcccagggcctccgaagttgtgggggctgcggcacagaaatcaagaatggccaggccctggtagccttggacaagcactggcacttgggctgttttaagtgcaagagctgtgggaagctcctgaatgccgagtacatcagcaaggatgggctgccctactgcgaagctgactatcacgccaagttcggcatccgctgtgacagctgtgagaaatacatcacggggcgcgtgctggaggccggagagaagcactaccacccttcctgcgcgctatgtgtcaggtgcggccagatgtttgcagaaggcgaagagatgtatcttcaaggttcctccatctggcatccggcgtgtcgacaagcagccagaactgaagacagaaacaaggaaaccagaacttcctcagagagcatcatttctgtccctgcttccagcacctcagggtctccgagccgtgtgatttatgccaagcttggtggtgagatcctggactacagggacttggcagcccttcctaaaagtaaggccatctatgacatcgaccgccccgacatgatctcctactcaccctacatcagccactctgcaggggacaggcagagctacggcgagggggatcaggatgaccggtcctacaagcagtgtcggacctccagcccaagctccactgggtcggttagcctcgggcgctacactccgacctcacggtcaccacagcactacagccgtccaggcagtgaaagtggccggagcacccccagcctctccgtgctctctgacagcaagccgcccccctccacctaccagcaggcacctcgccacttccacgtcccagacactggcgtaaaagataacatctataggaaaccccctatctacagacagcatgctgccaggcgatcggatggggaggatggaagcttggaccaggataacaggaagaagagcagctggctgatgctcaagggggatgcagacacaaggaccaattctccagacctggacacccagtccttgtcccacagcagcgggaccgacagagaccctctccaaaggatggcaggggacagctttcactcacgattcccctattccaaatctgaccctctcccaggacatggaaagaatggcttggaccagcggaatgccaatctggccccctgtggagcagacccggatgccagctggggcatgcgagaatacaagatctatccgtatgactccctcatcgtcacaaaccgaattcgcgtgaaactgcccaaagacgtggaccggacgagactggagagacacttgtcgcccgaggagttccaggaagtgtttgggatgagcatcgaggagtttgaccgcctggccctctggaagaggaatgaccttaagaagaaagcccttttgttctgacggctgccagcctgccccactggtgtgtgccgggcgccgaggccaggggcccctggcgagaaccgcacacacccctcccacacaccttgctctggcttctctgtgtccatggggtgggcgggagggggtcccccagcaggtgcggcccctgcacctgccggcgacactcctgccggtagtttagggccgagacggctagcttcacgccacccttccccgctgtggcttggtgtcagggagaggctgtagagtggctgtgtcgggcatcagatggagcacacaggtggctgcagcccagcccaccttcccagcgttctcgaggtgccctggccccggtgctgggcacgtgggggacagaggtggccgggacgtgagctgtgaggcttgttgatgatggttgctgacaccatcatcgggggtgggcacacggcccttcggagcctgggcagcctggcctcacaggcagactcgcagacggggcagtgagcgtctgggacagtgccaagagtggggtgtgtgatttttgcaggcgtctgtgatgggtctctttagggacaaatgtcaacaagggacaagacagggcaccttccgccagcgcccctccatgcgctgcgttcctcctccagatcgacccctagatgcctacacaatatctttaaagtaacacagaagtttttattttattaaa

SEQ ID NO: 47557 - DNA, 1836 bp, Artificial Sequence
  derived and/or modified sequence
atgagcgccgtgagccagccccaggccgcccccagccccctggagaagagccccagcaccgccatcctgtgcaacacctgcggcaacgtgtgcaagggcgaggtgctgagagtgcaggacaagtacttccacatcaagtgcttcgtgtgcaaggcctgcggctgcgacctggccgagggcggcttcttcgtgagacagggcgagtacatctgcaccctggactaccagagactgtacggcaccagatgcttcagctgcgaccagttcatcgagggcgaggtggtgagcgccctgggcaagacctaccaccccgactgcttcgtgtgcgccgtgtgcagactgcccttcccccccggcgacagagtgaccttcaacggcaaggagtgcatgtgccagaagtgcagcctgcccgtgagcgtgggcagcagcgcccacctgagccagggcctgagaagctgcggcggctgcggcaccgagatcaagaacggccaggccctggtggccctggacaagcactggcacctgggctgcttcaagtgcaagagctgcggcaagctgctgaacgccgagtacatcagcaaggacggcctgccctactgcgaggccgactaccacgccaagttcggcatcagatgcgacagctgcgagaagtacatcaccggcagagtgctggaggccggcgagaagcactaccaccccagctgcgccctgtgcgtgagatgcggccagatgttcgccgagggcgaggagatgtacctgcagggcagcagcatctggcaccccgcctgcagacaggccgccagaaccgaggacagaaacaaggagaccagaaccagcagcgagagcatcatcagcgtgcccgccagcagcaccagcggcagccccagcagagtgatctacgccaagctgggcggcgagatcctggactacagagacctggccgccctgcccaagagcaaggccatctacgacatcgacagacccgacatgatcagctacagcccctacatcagccacagcgccggcgacagacagagctacggcgagggcgaccaggacgacagaagctacaagcagtgcagaaccagcagccccagcagcaccggcagcgtgagcctgggcagatacacccccaccagcagaagcccccagcactacagcagacccggcagcgagagcggcagaagcacccccagcctgagcgtgctgagcgacagcaagcccccccccagcacctaccagcaggcccccagacacttccacgtgcccgacaccggcgtgaaggacaacatctacagaaagccccccatctacagacagcacgccgccagaagaagcgacggcgaggacggcagcctggaccaggacaacagaaagaagagcagctggctgatgctgaagggcgacgccgacaccagaaccaacagccccgacctggacacccagagcctgagccacagcagcggcaccgacagagaccccctgcagagaatggccggcgacagcttccacagcagattcccctacagcaagagcgaccccctgcccggccacggcaagaacggcctggaccagagaaacgccaacctggccccctgcggcgccgaccccgacgccagctggggcatgagagagtacaagatctacccctacgacagcctgatcgtgaccaacagaatcagagtgaagctgcccaaggacgtggacagaaccagactggagagacacctgagccccgaggagttccaggaggtgttcggcatgagcatcgaggagttcgacagactggccctgtggaagagaaacgacctgaagaagaaggccctgctgttctag

SEQ ID NO: 47558 - protein, 573 aa, Artificial Sequence
  derived and/or modified sequence
MSAVSQPQAAPSPLEKSPSTAILCNTCGNVCKGEVLRVQDKYFHIKCFVCKACGCDLAEGGFFVRQGEYICTLDYQRLYGTRCFSCDQFIEGEVVSALGKTYHPDCFVCAVCRLPFPPGDRVTFNGKECMCQKCSLPVSVGSSAHLSQGLRSCGGCGTEIKNGQALVALDKHWHLGCFKCKSCGKLLNAEYISKDGLPYCEADYHAKFGIRCDSCEKYITGRVLEAGEKHYHPSCALCVRCGQMFAEGEEMYLQGSSIWHPACRQAARTEDRNKETRTSSESIISVPASSTSGSPSRVIYAKLGGEILDYRDLAALPKSKAIYDIDRPDMISYSPYISHSAGDRQSYGEGDQDDRSYKQCRTSSPSSTGSVSLGRYTPTSRSPQHYSRPGSESGRSTPSLSVLSDSKPPPSTYQQAPRHFHVPDTGVKDNIYRKPPIYRQHAARRSDGEDGSLDQDNRKQKSSWLMLKGDADTRTNSPDLDTQSLSHSSGTDRDPLQRMAGDSFHSREKIYPYDSLIVTNRIRVKLPKDVDRTRLERHLSPEEFQEVFGMSIEEFDRLALWKRNDLKKKALLF

SEQ ID NO: 47559 - protein, 572 aa, Artificial Sequence
  derived and/or modified sequence
MSAVSQPQAAPSPLEKSPSTAILCNTCGNVCKGEVLRVQDKYFHIKCFVCKACGCDLAEGGFFVRQGEYICTLDYQRLYGTRCFSCDQFIEGEVVSALGKTYHPDCFVCAVCRLPFPPGDRVTFNGKECMCQKCSLPVSVGSSAHLSQGLRSCGGCGTEIKNGQALVALDKHWHLGCFKCKSCGKLLNAEYISKDGLPYCEADYHAKFGIRCDSCEKYITGRVLEAGEKHYHPSCALCVRCGQMFAEGEEMYLQGSSIWHPACRQAARTEDRNKETRTSSESIISVPASSTSGSPSRVIYAKLGGEILDYRDLAALPKSKAIYDIDRPDMISYSPYISHSAGDRQSYGEGDQDDRSYKQCRTSSPSSTGSVSLGRYTPTSRSPQHYSRPGSESGRSTPSLSVLSDSKPPPSTYQQAPRHFHVPDTGVKDNIYRKPPIYRQHAARRSDGEDGSLDQDNRKKSSWLMLKGDADTRTNSPDLDTQSLSHSSGTDRDPLQRMAGDSFHSQYKIYPYDSLIVTNRIRVKLPKDVDRTRLERHLSPEEFQEVFGMSIEEFDRLALWKRNDLKKKALLF

SEQ ID NO: 47560 - protein, 571 aa, Artificial Sequence
  derived and/or modified sequence
MSAVSQPQAAPSPLEKSPSTAILCNTCGNVCKGEVLRVQDKYFHIKCFVCKACGCDLAEGGFFVRQGEYICTLDYQRLYGTRCFSCDQFIEGEVVSALGKTYHPDCFVCAVCRLPFPPGDRVTFNGKECMCQKCSLPVSVGSSAHLSQGLRSCGGCGTEIKNGQALVALDKHWHLGCFKCKSCGKLLNAEYISKDGLPYCEADYHAKFGIRCDSCEKYITGRVLEAGEKHYHPSCALCVRCGQMFAEGEEMYLQGSSIWHPACRQAARTEDRNKETRTSSESIISVPASSTSGSPSRVIYAKLGGEILDYRDLAALPKSKAIYDIDRPDMISYSPYISHSAGDRQSYGEGDQDDRSYKQCRTSSPSSTGSVSLGRYTPTSRSPQHYSRPGSESGRSTPSLSVLSDSKPPPSTYQQAPRHFHVPDTGVKDNIYRKPPIYRQHAARRSDGEDGSLDQDNRKKSSWLMLKGDADTRTNSPDLDTQSLSHSSGTDRDPLQRMAGDSFHSQQIYPYDSLIVTNRIRVKLPKDVDRTRLERHLSPEEFQEVFGMSIEEFDRLALWKRNDLKKKALLF

SEQ ID NO: 47561 - DNA, 1722 bp, Artificial Sequence
  derived and/or modified sequence
atgtctgccgttagccagccccaggcagccccttctcctctcgaaaaaagtccatctactgcgatcctctgtaatacgtgtggcaacgtgtgtaagggcgaggtcctccgcgtacaggacaaatacttccacataaaatgttttgtgtgtaaagcctgcggatgcgatttggcagagggcggcttttttgtgaggcaaggtgagtacatctgcactctggactaccagcggttgtatgggacacgctgtttctcctgcgatcagttcatagaaggcgaggtggtgagcgcactcggcaaaacctaccaccctgactgtttcgtgtgcgcagtgtgccggctacctttcccccccggggaccgcgtgacctttaacgggaaagagtgcatgtgccaaaaatgctccctgccagttagtgtgggttctagcgcacacttgagccaaggacttcggtcctgtggtggctgcggcactgaaattaagaatgggcaagcccttgtggcacttgacaagcattggcatttgggctgttttaaatgcaagagctgtggcaaactcctgaatgcagagtacatctcaaaggatggacttccttactgcgaggcagattatcacgcaaagttcgggattagatgtgattcgtgcgagaagtatatcacaggccgggtgctcgaggccggcgaaaagcactaccatcccagctgtgcgttgtgtgtcaggtgcggacagatgttcgcagagggggaagaaatgtacctacagggctcctcgatctggcatcctgcatgccgtcaagccgcccggactgaagatagaaataaagagacccgaacatcctccgagagtataattagtgtgcctgcctcctctacttctggtagtccctcgagagtgatatacgccaagctgggaggcgagatattagactaccgggatctggctgcgctgccaaaatcaaaggcaatttacgatatcgacagacccgatatgatcagttattccccttatatctcgcatagcgccggagaccgacagtcctatggggagggcgaccaagacgaccgctcttataaacagtgtcgcactagcagcccctcttcgaccggatctgtttcactgggaagatacacacccaccagtcgctcaccgcaacactatagccgtcccggcagcgaatccggacggtctacgcctagcttgtcagtgctgtccgatagcaaacccccaccgagcacgtaccagcaggcccctcgccactttcatgttcccgacacaggcgttaaggataatatatatagaaagccccccatatatcggcaacacgccgctcggcggtcagacggtgaggatggcagccttgaccaagataataggaagcagaagagcagctggctcatgcttaagggcgacgcagatactcgtacaaacagtcctgatctagacacccaatctctgagccatagttcagggacagatcgcgaccctctccagaggatggccggagacagctttcactcccgcgagaagatctatccttatgattcactgatcgttaccaatcgcatcagggttaagctgccgaaggatgtagatcgcacaaggctggagagacacctctcacccgaggaattccaggaagtgtttggtatgagcattgaggagttcgacagattggctctgtggaagcgaaacgatctaaaaaaaaaagcgctgttgttctag

SEQ ID NO: 47562 - DNA, 1719 bp, Artificial Sequence
  derived and/or modified sequence
atgtcagccgtgagtcagccacaggccgctccatctcctcttgaaaaaagcccgtccactgcgattttatgcaacacatgcggaaacgtgtgcaagggtgaagtgcttagggtccaggataagtactttcacattaagtgttttgtgtgcaaagcttgtggctgtgatctggccgagggaggattttttgtcaggcaaggggaatacatatgcacactggactatcagaggctgtatggcactaggtgcttctcttgcgatcagtttatcgaaggcgaagtggtcagtgccctggggaagacatatcatccagactgtttcgtttgcgccgtgtgcaggttgcccttccctcctggcgatcgcgttacttttaacgggaaagaatgcatgtgtcaaaaatgcagtttgcctgtgtcagtcggatccagcgctcacctatcccagggactgagaagctgtgggggttgtggaaccgagattaaaaatgggcaggctcttgttgcacttgacaaacactggcatttaggctgcttcaagtgtaagagctgtggtaaacttttgaacgccgagtatatctcaaaggatggcctgccatactgtgaagcggactaccatgcgaagttcggtattaggtgcgactcgtgtgagaagtacatcaccggccgggtcctcgaggctggggaaaagcactatcatccctcttgcgctctctgcgttcgctgcggccagatgttcgcagagggggaagaaatgtatctacagggtagcagcatttggcaccctgcatgtcgacaagcagcccggaccgaggaccgaaataaggaaacacgtactagctccgaatcgataatctctgtcccagcaagttctacgagcggctccccctcccgagtgatttacgccaaactcggaggcgaaattctggattacagagacctggccgccctgcccaaaagcaaggctatctacgacattgatagacctgacatgatttcttatagtccgtatatatcccattccgcaggcgaccgacaaagttatggcgagggtgatcaagacgatcggtcatacaaacagtgccggactagttcgccatcatctactggaagcgtttccctgggcagatatactccaaccagtcgttcaccacagcactactcacgacctggctccgagtctgggagatccacaccctctctctccgtgctgtccgacagtaagccgccaccttctacttaccagcaagcgcctcgacatttccacgtgcctgacactggcgttaaggataacatttatcggaagcctcccatatatcggcagcacgctgccagacgttccgacggggaggatggctccctcgaccaggataaccgcaaaaaaagttcatggttgatgttaaaaggagatgctgatactagaactaacagccctgatctcgatacccagagcctttcccactcatccgggaccgaccgtgacccactgcagcggatggcaggggattccttccacagtcaatataaaatctatccctatgactctctcatcgtgaccaacagaatacgggtgaagttgccgaaggacgtcgataggaccagactggagagacacttgtccccggaagagtttcaagaggtcttcggcatgagtatagaagaattcgaccgcctagccctgtggaaacgaaatgacctcaagaagaaggcattgctattctag

SEQ ID NO: 47563 - DNA, 1716 bp, Artificial Sequence
  derived and/or modified sequence
atgtccgcagtgtctcagccgcaggcggctcccagtccactggaaaagtccccgtctacagctatcctgtgtaacacctgcggcaatgtatgtaaaggcgaagtccttagggtgcaggacaagtattttcatatcaagtgttttgtatgtaaggcttgtgggtgcgacttagctgaaggcggttttttcgtgagacagggggaatacatctgtactctcgactatcagcggctgtatggtacaagatgcttttcttgtgaccagttcatcgaaggcgaagtggtgtctgcactgggcaagacctaccaccctgactgtttcgtgtgcgcggtgtgcaggttgccttttccccctggagaccgggtcactttcaatgggaaggaatgcatgtgtcagaaatgtagtctgcccgtgagcgtcggtagctctgctcatctgagtcagggtctgcgcagctgtggaggctgtggcaccgagattaagaatggacaggcactcgttgccctcgataaacactggcatctgggctgcttcaagtgcaaatcttgtgggaagctcctgaacgcagagtatatcagcaaggatggactgccgtactgcgaagcagactaccacgcaaagtttgggatccggtgcgactcatgtgagaaatatattacagggagggtgcttgaggccggcgagaaacactatcaccccagttgcgccttgtgcgttagatgcggacagatgttcgctgagggcgaagagatgtacttacaggggtctagcatatggcatcccgcctgtcgccaggccgctcggaccgaagatcgcaataaggaaacccgcacttcctcagaatccataatatcggtacctgccagtagcacctccggctcgcctagccgcgttatctatgccaaactaggtggtgagattcttgactatagagacctggctgcactccccaagtctaaagctatatatgatatcgataggcccgacatgatctcctactcgccgtatattagtcactctgccggggaccggcagagctacggcgaaggcgaccaagatgaccggtcctataaacagtgcaggactagtagcccatccagtaccgggtcagtgtccctcggccgttacacacctacaagccgtagtccccagcattatagccggccgggctctgagtctggtcggagcaccccttccctttctgtgctatcggactcaaaacctcctccatctacatatcagcaggctcctcgtcactttcacgtgcccgataccggtgtgaaggacaacatctaccggaagcctcccatctaccgtcaacacgctgcccgcaggtctgatggcgaggacggtagtctcgaccaagataatcgaaaaaagagctcgtggttaatgctcaagggagacgctgacacaagaacaaacagcccggacctggacactcagtcactgtcccactcgtcaggaaccgaccgggatcctttacagcggatggccggcgactcttttcatagccagcagatctatccatacgactcattaatcgtaacaaacaggattcgggtcaaactacccaaggacgtagaccgcaccagattggaaaggcatctaagtcctgaggaattccaggaagtttttgggatgagcatagaagagttcgatcgcctggccttatggaagcgtaatgacctgaaaaagaaagctctgctgttctag

SEQ ID NO: 47564 - DNA, 1722 bp, Artificial Sequence
  derived and/or modified sequence
atgtctgctgtgtcccagccccaggccgcccccagccccctggagaagagccccagcacagccatcctgtgcaacacctgtggaaatgtgtgcaagggggaggtgctgcgggtgcaggacaagtacttccacatcaagtgctttgtgtgcaaggcctgtggctgtgacctggccgagggcggcttctttgtgcggcagggcgagtacatctgcaccctggactaccagaggctgtatggcacccgctgcttcagctgtgaccagttcatcgagggggaggtggtgtctgccctgggcaagacctaccacccagactgctttgtgtgtgctgtgtgccgcctgcccttccccccaggggacagagtgaccttcaacgggaaggagtgcatgtgccagaagtgcagcctgcctgtgtctgtgggcagcagcgcccacctgagccagggcctgcggagctgtggcggctgcggcacagagatcaagaatggccaggccctggtggccctggacaagcactggcacctgggctgcttcaagtgcaagagctgtgggaagctgctgaatgctgagtacatcagcaaggatggcctgccctactgtgaggccgactaccacgccaagtttggcatccgctgtgacagctgtgagaagtacatcaccggccgggtgctggaggccggggagaagcactaccaccccagctgtgccctgtgtgtgcgctgtggccagatgtttgctgagggggaggagatgtacctgcagggcagcagcatctggcacccagcctgccggcaggccgccaggacagaggacaggaacaaggagaccaggaccagcagcgagagcatcatctctgtgcctgccagcagcaccagcggcagccccagcagggtcatctatgccaagctgggcggggagatcctggactacagagacctggccgccctgcccaagagcaaggccatctatgacatcgacagaccagacatgatctcctacagcccctacatcagccacagcgctggggaccggcagagctatggagagggggaccaggatgacaggagctacaagcagtgcaggaccagcagccccagcagcacaggctctgtgtccctgggccgctacacccccaccagccgcagcccccagcactacagcaggcctggcagcgagagcggccgcagcacccccagcctgtctgtgctgagtgacagcaagcccccacccagcacctaccagcaggcccccaggcacttccacgtgcctgacacaggagtgaaggacaacatctacaggaagccacccatctaccggcagcacgccgcccggcggagtgatggagaagatggcagcctggaccaggacaacaggaagcagaagagctcctggctgatgctgaagggagatgctgacaccaggaccaacagcccagacctggacacccagagcctgagccacagcagcggcacagaccgggaccccctgcagaggatggccggggacagcttccacagccgggagaagatctacccctatgacagcctgattgtgaccaaccgcatccgggtgaagctgcccaaggatgtggacaggacccggctggagcggcacctgagccctgaggagttccaggaggtgtttggcatgagcattgaggagtttgaccggctggccctgtggaagagaaatgacctgaagaagaaggccctgctcttctag

SEQ ID NO: 47565 - DNA, 1719 bp, Artificial Sequence
  derived and/or modified sequence
atgtctgctgtgtcccagccccaggccgcccccagccccctggagaagagccccagcacagccatcctgtgcaacacctgtggaaatgtgtgcaagggggaggtgctgcgggtgcaggacaagtacttccacatcaagtgctttgtgtgcaaggcctgtggctgtgacctggccgagggcggcttctttgtgcggcagggcgagtacatctgcaccctggactaccagaggctgtatggcacccgctgcttcagctgtgaccagttcatcgagggggaggtggtgtctgccctgggcaagacctaccacccagactgctttgtgtgtgctgtgtgccgcctgcccttccccccaggggacagagtgaccttcaacgggaaggagtgcatgtgccagaagtgcagcctgcctgtgtctgtgggcagcagcgcccacctgagccagggcctgcggagctgtggcggctgcggcacagagatcaagaatggccaggccctggtggccctggacaagcactggcacctgggctgcttcaagtgcaagagctgtgggaagctgctgaatgctgagtacatcagcaaggatggcctgccctactgtgaggccgactaccacgccaagtttggcatccgctgtgacagctgtgagaagtacatcaccggccgggtgctggaggccggggagaagcactaccaccccagctgtgccctgtgtgtgcgctgtggccagatgtttgctgagggggaggagatgtacctgcagggcagcagcatctggcacccagcctgccggcaggccgccaggacagaggacaggaacaaggagaccaggaccagcagcgagagcatcatctctgtgcctgccagcagcaccagcggcagccccagcagggtcatctatgccaagctgggcggggagatcctggactacagagacctggccgccctgcccaagagcaaggccatctatgacatcgacagaccagacatgatctcctacagcccctacatcagccacagcgctggggaccggcagagctatggagagggggaccaggatgacaggagctacaagcagtgcaggaccagcagccccagcagcacaggctctgtgtccctgggccgctacacccccaccagccgcagcccccagcactacagcaggcctggcagcgagagcggccgcagcacccccagcctgtctgtgctgagtgacagcaagcccccacccagcacctaccagcaggcccccaggcacttccacgtgcctgacacaggagtgaaggacaacatctacaggaagccacccatctaccggcagcacgccgcccggcggagtgatggagaagatggcagcctggaccaggacaacaggaagaagagctcctggctgatgctgaagggagatgctgacaccaggaccaacagcccagacctggacacccagagcctgagccacagcagcggcacagaccgggaccccctgcagaggatggccggggacagcttccacagccagtacaagatctacccctatgacagcctcatcgtgaccaaccgcatccgggtgaagctgcccaaggatgtggacaggacccggctggagcggcacctgagccctgaggagttccaggaggtgtttggcatgagcattgaggagtttgaccggctggccctgtggaagagaaatgacctgaagaagaaggccctgctcttctag

SEQ ID NO: 47566 - DNA, 1716 bp, Artificial Sequence
  derived and/or modified sequence
atgtctgctgtgtcccagccccaggccgcccccagccccctggagaagagccccagcacagccatcctgtgcaacacctgtggaaatgtgtgcaagggggaggtgctgcgggtgcaggacaagtacttccacatcaagtgctttgtgtgcaaggcctgtggctgtgacctggccgagggcggcttctttgtgcggcagggcgagtacatctgcaccctggactaccagaggctgtatggcacccgctgcttcagctgtgaccagttcatcgagggggaggtggtgtctgccctgggcaagacctaccacccagactgctttgtgtgtgctgtgtgccgcctgcccttccccccaggggacagagtgaccttcaacgggaaggagtgcatgtgccagaagtgcagcctgcctgtgtctgtgggcagcagcgcccacctgagccagggcctgcggagctgtggcggctgcggcacagagatcaagaatggccaggccctggtggccctggacaagcactggcacctgggctgcttcaagtgcaagagctgtgggaagctgctgaatgctgagtacatcagcaaggatggcctgccctactgtgaggccgactaccacgccaagtttggcatccgctgtgacagctgtgagaagtacatcaccggccgggtgctggaggccggggagaagcactaccaccccagctgtgccctgtgtgtgcgctgtggccagatgtttgctgagggggaggagatgtacctgcagggcagcagcatctggcacccagcctgccggcaggccgccaggacagaggacaggaacaaggagaccaggaccagcagcgagagcatcatctctgtgcctgccagcagcaccagcggcagccccagcagggtcatctatgccaagctgggcggggagatcctggactacagagacctggccgccctgcccaagagcaaggccatctatgacatcgacagaccagacatgatctcctacagcccctacatcagccacagcgctggggaccggcagagctatggagagggggaccaggatgacaggagctacaagcagtgcaggaccagcagccccagcagcacaggctctgtgtccctgggccgctacacccccaccagccgcagcccccagcactacagcaggcctggcagcgagagcggccgcagcacccccagcctgtctgtgctgagtgacagcaagcccccacccagcacctaccagcaggcccccaggcacttccacgtgcctgacacaggagtgaaggacaacatctacaggaagccacccatctaccggcagcacgccgcccggcggagtgatggagaagatggcagcctggaccaggacaacaggaagaagagctcctggctgatgctgaagggagatgctgacaccaggaccaacagcccagacctggacacccagagcctgagccacagcagcggcacagaccgggaccccctgcagaggatggccggggacagcttccacagccagcagatctacccctatgacagcctgattgtgaccaaccgcatccgggtgaagctgcccaaggatgtggacaggacccggctggagcggcacctgagccctgaggagttccaggaggtgtttggcatgagcattgaggagtttgaccggctggccctgtggaagagaaatgacctgaagaagaaggccctgctcttctag

SEQ ID NO: 47567 - DNA, 1722 bp, Artificial Sequence
  derived and/or modified sequence
atgagcgccgtgagccagccccaggccgcccccagccccctggagaaatcacctagtacagcaattctgtgcaatacgtgcggaaatgtctgcaagggggaggttctccgagtgcaggacaaatatttccatatcaagtgcttcgtgtgcaaggcctgtggttgtgatctcgctgaaggcggcttctttgtgcgacaaggagagtacatttgcacgctggattaccagcggctgtacggtacacgttgcttcagctgtgatcagttcatagagggggaagtggttagtgccttgggcaagacatatcacccagactgtttcgtctgtgcagtctgtagacttccatttccacccggcgatagagtaacttttaatggaaaggagtgcatgtgtcagaagtgttccctgcctgtgagcgtcggttcctccgcacaccttagccagggcctccgcagctgtgggggctgtggcactgagatcaaaaacggtcaagctctggtggccctggataagcattggcacctgggctgcttcaaatgtaaatcttgtggtaagctgcttaacgcagaatacatatccaaagacggcctaccgtactgcgaggctgattaccacgccaaatttggtatcagatgtgattcctgtgagaaatatattacgggtagggtattagaggcaggcgaaaaacattaccatcccagctgtgccctttgcgtgcgctgtgggcagatgttcgcggaaggagaagagatgtaccttcaggggtcctccatttggcatcctgcctgtagacaggcagcaagaacagaggataggaacaaagagacacgcactagctcagagtcgattatttctgtgccagcgtccagcacctcgggaagcccatctcgggtgatctatgctaagcttggcggtgagatcctagactatcgcgacctggccgccctgcctaaatctaaagctatatacgacattgacagacctgatatgataagttactcaccttacatctcgcactctgcaggggaccggcaatcttatggggaaggcgaccaggacgataggagttacaagcagtgccgaacctctagcccttcctcaacaggtagtgtctcactgggtagatatacccctacatcacgctccccacaacactatagccggcccgggagcgaatcaggcaggagcactcccagcctgtcggtgctgtcagattctaaacctcccccctcaacctatcagcaagcacctaggcatttccatgtcccagatactggcgtcaaggacaatatttacaggaaacccccaatttaccgccaacatgccgcacgtcggtcagatggggaagacggtagcctcgatcaggacaaccggaagcagaagtcatcatggttgatgttaaaaggagatgccgacactcggacaaactcacctgatcttgacacacagtctctgtctcattcttccggaactgaccgggatcctcttcaaaggatggcaggagattcatttcactcacgcgagaaaatttacccttacgattctctgattgtgactaaccgcattagagttaagctgcctaaggatgtagatcggacccgactggagcggcacctgagtcctgaggagtttcaagaagtgttcggaatgtcaatcgaggagttcgatagactcgctctctggaaacgcaatgatttgaagaagaaagcacttctattttag

SEQ ID NO: 47568 - DNA, 1719 bp, Artificial Sequence
  derived and/or modified sequence
atgagcgccgtgagccagccccaggccgcccccagccccctggagaagtccccctctacggccatcctgtgcaatacctgcggtaatgtgtgtaagggcgaggtccttagggtccaggataagtacttccatatcaagtgttttgtctgtaaggcttgcggttgcgacttggccgaaggtggatttttcgtgagacaaggtgagtatatctgcacactggattatcagaggttgtacggtacccggtgtttttcctgtgaccagttcatcgaaggggaggtggtatccgcgcttggcaaaacctatcatccagattgttttgtttgcgccgtttgtcgtctgccttttcccccgggggatcgagtgacctttaatggcaaggagtgtatgtgccagaagtgttctctgccagtgtcagtggggagttccgcccatctctcacagggactgcgcagctgtgggggctgcggcacagaaataaagaatggacaggctctggttgctctcgataagcattggcacttaggatgctttaaatgcaaatcatgcgggaagcttctcaacgccgaatatatctccaaggacggcttgccctactgcgaggcggactatcacgccaaatttggcatcaggtgcgatagctgtgagaagtatatcactggcagggtactagaagccggtgagaagcactaccatccctcctgcgccttgtgtgtccgctgtggacagatgttcgcagagggggaagaaatgtatctgcaggggtcaagcatatggcaccccgcatgcaggcaggcagctcgtacagaggacagaaacaaagaaacccgcacgagtagtgaatctattataagtgtgccagcctcatccacgtccgggtccccaagccgagtgatctacgccaaactaggtggcgaaatactggactatcgggacctggcagcactccctaaatctaaagccatctatgacatagatcgcccggacatgatcagttactcaccctatatctcccacagtgccggcgacaggcaaagctacggtgagggcgaccaggacgaccgcagctataagcagtgccgtacttcttctccatcatccacgggctccgtgagtctcggaagatatacacccacgtcccggagcccgcagcactacagccggcccggcagcgaatctggccggtctaccccttccctcagcgtgctttcggattcaaagcccccaccctctacataccagcaggcacccaggcatttccacgtgcccgacaccggcgtgaaagataacatttaccgaaagcctccgatataccgccaacacgccgcaagaagatcagacggtgaggatggctccctggatcaggacaaccggaagaaaagttcctggctgatgcttaaaggcgacgccgacacccgcactaactctcccgatttagacactcagtccctcagccactcatccggcacagatcgagatcctttgcagagaatggcaggggattccttccacagtcagtacaaaatctacccatacgattccttaattgtgacgaaccgaatccgggtcaaactgcctaaggacgtggaccgcacccgtttagagaggcacttatctccagaagaattccaagaggtcttcggtatgtcgatcgaagaatttgaccggctggcgctgtggaagcgcaacgatctcaaaaagaaagcactgctgttctag

SEQ ID NO: 47569 - DNA, 1716 bp, Artificial Sequence
  derived and/or modified sequence
atgagcgccgtgagccagccccaggccgcccccagccccctggagaagtcacccagtaccgctatcttgtgtaatacatgcggaaacgtttgcaagggcgaggtcctccgcgtgcaagacaaatacttccatatcaaatgtttcgtgtgtaaagcctgcgggtgcgacttggctgagggggggttttttgtcaggcaaggggaatatatatgcaccttggactatcagcgtctgtatggcacaaggtgtttctcatgtgatcagtttattgagggagaagtggtgagcgccctgggcaagacgtatcatcctgattgttttgtgtgtgcagtatgtcgacttcccttccccccaggagatcgagtgacttttaacggcaaggagtgtatgtgtcagaaatgctcgctgccggtctctgtcggttcatctgcacacctgtctcagggactgagaagttgcgggggatgcggcaccgaaattaaaaatggacaggctctggtcgccctggacaagcattggcacctcggatgttttaagtgcaaatcctgtgggaagctgttgaacgccgagtacatcagcaaggatgggctgccatattgtgaggccgactaccacgccaaattcggaatcagatgtgactcatgcgagaagtatattacaggccgcgtgctggaagccggagagaaacattatcatcccagctgcgctctgtgcgtgaggtgcggccagatgttcgccgagggcgaagagatgtacctgcaggggtcttcgatatggcatcctgcttgccgtcaggcagcacgaacagaggacaggaataaagagacaagaactagctccgaatctattatctctgtgccggcatcttctacaagtgggagcccctctagagtgatttacgccaaacttggaggagaaatccttgattaccgcgacctggccgcactccccaagagcaaggccatctacgacattgacaggccggacatgatctcgtattctccttacataagccacagcgctggcgatcgccagtcctacggggagggagaccaggatgaccgctcttacaaacaatgcaggacttcttcccctagcagtactggctcggttagcctggggcgatacacacctacctctcgatccccccaacattactcacggccaggctccgaatccggacgctccaccccatccctgagtgtcctgtctgactctaaacctccacccagtacatatcagcaggctcccaggcacttccacgtgcccgacacaggcgttaaggataacatttatcgtaagcctccaatctacaggcagcacgccgcgagaagaagcgacggcgaagatggcagccttgaccaggataataggaagaagtcatcctggctgatgctgaagggggacgctgacactcgcacaaattcacctgatttggatacccagtctctgtctcacagcagtgggaccgaccgggacccacttcagcgaatggcaggggactcattccattcacagcaaatttacccttatgatagccttatcgtcacgaacagaataagagttaaactgcctaaggatgtcgacagaactaggctggagagacacctcagccccgaagaattccaggaagtattcggcatgtccatagaagagttcgaccgcttggccctctggaaaaggaatgatctgaagaaaaaagcactgttattctag

SEQ ID NO: 47570 - DNA, 1722 bp, Artificial Sequence
  derived and/or modified sequence
atgagtgctgtgagtcagcctcaagccgctcccagccccctggaaaagagcccatccactgctattctgtgtaatacttgcgggaatgtctgtaaaggtgaagtgctgcgagtgcaggataagtattttcatatcaaatgtttcgtctgtaaggcttgtggatgcgatctggcagaaggaggctttttcgttaggcagggtgagtatatctgcacgttggattatcagagactatacggtaccagatgtttctcctgtgaccagttcatcgaaggcgaggtggtgagtgcactggggaagacataccaccctgactgttttgtgtgcgccgtctgccgcctgccctttcccccaggcgatcgggtgacttttaatgggaaagaatgtatgtgtcagaaatgctcgctccctgtatcagtggggtcctctgcccacctgagtcagggcctgcggagctgcggtgggtgtgggactgagatcaagaacggtcaggccttggtggcccttgataagcattggcacttaggctgcttcaagtgcaaatcgtgcggcaaactactgaacgccgaatatatctccaaggatggattgccatattgtgaggctgattaccatgccaagttcggaatccgttgtgactcttgtgagaaatatatcacaggtagggttcttgaagccggtgaaaaacactaccacccctcctgtgccttgtgtgtgcgatgcggacagatgtttgcagagggggaggaaatgtacctgcaaggcagctctatctggcatccagcctgccgccaggctgctaggaccgaagaccgaaacaaggagacaaggaccagttccgagagtattatctccgtgcctgctagcagtacatcaggctctccttctagagtcatctacgccaagctcggaggagagatattggattatcgtgacctggccgcactccccaagtcaaaagccatctacgatatcgacaggcccgatatgattagttatagtccttacattagtcactctgcaggtgatcggcagtcctatggagaaggagatcaggacgatcgatcctataaacaatgtagaacgagttcgccatctagtacagggtctgtcagtctcgggagatataccccgacaagccggtccccccaacattattccagaccgggttctgagagcggacgatcgactccatccctgtccgttctcagcgatagtaagccccctccaagcacataccagcaggcacccaggcacttccacgtgcccgacaccggcgtcaaggacaacatctatcgaaagcccccaatttatcgacagcatgcggcaaggcgatctgatggggaggatggttctctcgatcaggacaataggaagcagaaatcctcttggctcatgctcaaaggagacgccgatactaggaccaactcacccgacctggacacccagtccctgtcccactcatctggcaccgatcgggacccgctgcaaagaatggcaggcgattcctttcatagtcgcgagaagatttacccctatgattcattaattgtaaccaataggataagagttaagctccccaaggacgttgatcgcactcgactggagcgacacttgtctcctgaggagtttcaggaagtgttcggcatgtctatcgaagaatttgaccgcttggcactatggaaaaggaacgacttaaaaaagaaggcactgctgttttag

SEQ ID NO: 47571 - DNA, 1719 bp, Artificial Sequence
  derived and/or modified sequence
atgagtgcggttagtcaaccgcaagctgcacctagccctctggagaagagcccaagcaccgcgattctttgtaatacttgcggcaatgtgtgcaagggagaagtgttgagggtccaggacaagtatttccacatcaagtgttttgtgtgtaaggcatgcggttgcgatcttgccgaagggggattctttgtgcggcagggagagtatatatgcaccctcgactatcaacgactttatggaactcgctgctttagctgtgatcaattcatcgaaggggaggtagtttcagcccttggcaaaacataccacccagactgtttcgtgtgcgccgtttgccgactgccatttcccccaggagatcgggtcacattcaacggtaaggaatgcatgtgccagaagtgctcactcccagtgtccgtcggttcctccgcacacctgagtcaaggcctgcgttcatgcgggggatgtggtacggagattaaaaacggtcaggccctagtagccctggacaaacactggcaccttggctgcttcaagtgcaaatcctgtggcaaactgcttaacgctgaatatatcagcaaagacgggctaccttactgtgaagctgactaccatgccaaatttggcattaggtgcgactcctgtgaaaagtatatcaccggccgagttctcgaagccggtgaaaagcattatcatccctcatgcgccttgtgcgtgaggtgcggtcagatgttcgcagagggcgaggagatgtacctgcagggctcgagtatctggcatcccgcatgcagacaagccgctagaaccgaagataggaacaaggagacaagaacctcatccgagtctatcataagtgtgcccgctagcagtacctcagggtcccccagccgggtcatttatgccaaactaggaggggagattcttgattatcgcgatctggccgctcttccaaagtctaaggctatttacgatatcgaccgtccggatatgatttcctactcaccctacatatctcattctgctggggatcgccagtcatatggcgaaggtgaccaggatgacaggtcttataagcaatgtagaactagctcaccctcttcgaccggctcagtgagcctggggagatacacccccacttctcgctctccacagcattactcacggcctggcagcgagtctgggcgtagcactccatctctctccgtactctccgatagtaaacctccccctagcacctaccagcaagcaccacggcacttccatgtgcctgacacaggcgtcaaggataacatctatcggaagcctccgatttacagacaacacgctgcgaggcggagtgatggagaagacgggagcctggaccaagacaatcggaaaaaatcgagctggttgatgttgaagggcgacgcggatacacggactaacagcccggacctagacacccaaagcctgagccactctagcgggactgaccgcgatcctctgcagagaatggccggtgattcctttcattcacaatacaagatctatccgtatgattcccttatcgtaaccaaccgtatccgcgtgaagctgcctaaggacgtggacaggacccgattggagaggcacttaagccccgaagaattccaagaagtgttcggaatgtcaatcgaggagtttgaccgactggccctctggaaacggaacgatctaaaaaagaaggcccttctgttttag

SEQ ID NO: 47572 - DNA, 1716 bp, Artificial Sequence
  derived and/or modified sequence
atgtctgccgtctcacagccacaggcggctccatcacccctagagaagagtccatctactgccatactctgcaatacctgcggtaatgtatgtaaaggagaggtcctccgggtgcaggataagtacttccatattaagtgctttgtatgtaaagcttgcggctgtgatttggccgagggcggattcttcgtccgccagggggaatatatttgcactttggactatcagaggctgtacggaacccggtgctttagctgcgatcaatttatcgaaggagaagtggtatcggccttgggcaaaacatatcatcctgactgttttgtgtgcgctgtttgccggcttcccttcccgccaggcgatcgagtgacttttaacggcaaggagtgcatgtgccagaagtgcagccttcctgtaagcgtgggtagtagcgcacacctttcccagggcctgagaagttgtggagggtgcgggaccgaaataaaaaacgggcaggcgctcgtagccctcgacaagcattggcatttgggctgcttcaagtgcaaatcatgcgggaagctgctaaacgctgagtacatttctaaggatggcctgccctattgcgaagcggattaccacgctaagtttgggattagatgcgattcatgtgaaaagtatatcaccggtagggtgctcgaggcgggagaaaaacattatcacccctcctgtgccctctgcgtgaggtgtggccaaatgttcgccgagggcgaggagatgtaccttcagggctccagcatctggcacccagcctgtaggcaggcagccagaacagaggacagaaataaagagaccaggacatcatcggaatcgatcatttcagtgcccgcatcctctactagcggttcacctagtcgtgtgatatacgccaaactgggtggggagatcctagactatcgagatttggccgctcttccgaaatctaaagccatttatgacattgatcgcccagatatgatctcatattccccctatattagccacagcgccggagaccgacagtcatacggcgagggcgaccaggatgacagaagttacaaacagtgccgtacttcttcaccttcatcgactggatccgtatcactgggccgttatactcccactagccgctctccccagcactacagtcggcctggttcagagagcggcagaagtaccccctctttaagcgtgctctctgactctaaaccccctccttccacctaccagcaggctcctaggcatttccacgtacccgacaccggcgtaaaggacaacatataccgaaagccccctatttaccgacagcacgcggctcgaaggtctgatggcgaggacggaagcctggaccaggataaccgtaaaaaatcctcttggctgatgctcaagggcgacgcagatacccgcaccaacagccctgatcttgatacacagtctctcagtcatagctctggcaccgatagggaccctcttcagagaatggctggagattcattccacagccaacagatctatccctacgacagtctcattgtgactaataggatccgcgtgaaactgcccaaggatgttgacagaaccaggctggaacggcatctatctcctgaggagttccaggaagtatttggtatgagcatcgaggagttcgataggctagcactttggaagagaaacgacttgaagaagaaggcactcctcttctag

SEQ ID NO: 47573 - DNA, 3539 bp, Artificial Sequence
  derived and/or modified sequence
tgcggcggcgctgcctggcgtgtgcgcaaggagcgggcgcggagccggcgggcgggcggaggatagcgcgggcgcggcacctgcgggcccgagggtctggctgtcgcagcgccgggccgccccgactccgagcggctgctgagatgagtgcagtgtcgcagccccaggctgctcccagcccgctggagaagtcgcccagcacggcgatcctgtgcaacacgtgtgggaatgtgtgcaagggcgaggtgctgcgggtgcaggacaagtacttccacatcaagtgcttcgtctgtaaagcatgtggctgcgacctggccgagggcggcttcttcgtgcggcagggcgagtacatctgcacgctggactaccagaggctctacggcacccgctgcttcagctgcgaccagttcattgagggtgaggtggtgtcggcgctgggcaagacctaccaccccgactgcttcgtgtgtgccgtctgccggctgcccttcccccccggggaccgagtgaccttcaacgggaaggaatgcatgtgccagaagtgttccctgcccgtatcggtgggcagcagcgcgcacctgtcccagggcctccgaagttgtgggggctgcggcacagaaatcaagaatggccaggccctggtagccttggacaagcactggcacttgggctgttttaagtgcaagagctgtgggaagctcctgaatgccgagtacatcagcaaggatgggctgccctactgcgaagctgactatcacgccaagttcggcatccgctgtgacagctgtgagaaatacatcacggggcgcgtgctggaggccggagagaagcactaccacccttcctgcgcgctatgtgtcaggtgcggccagatgtttgcagaaggcgaagagatgtatcttcaaggttcctccatctggcatccggcgtgtcgacaagcagccagaactgaagacagaaacaaggaaaccagaacttcctcagagagcatcatttctgtccctgcttccagcacctcagggtctccgagccgtgtgatttatgccaagcttggtggtgagatcctggactacagggacttggcagcccttcctaaaagtaaggccatctatgacatcgaccgccccgacatgatctcctactcaccctacatcagccactctgcaggggacaggcagagctacggcgagggggatcaggatgaccggtcctacaagcagtgtcggacctccagcccaagctccactgggtcggttagcctcgggcgctacactccgacctcacggtcaccacagcactacagccgtccaggcagtgaaagtggccggagcacccccagcctctccgtgctctctgacagcaagccgcccccctccacctaccagcaggcacctcgccacttccacgtcccagacactggcgtaaaagataacatctataggaaaccccctatctacagacagcatgctgccaggcgatcggatggggaggatggaagcttggaccaggataacaggaagcagaagagcagctggctgatgctcaagggggatgcagacacaaggaccaattctccagacctggacacccagtccttgtcccacagcagcgggaccgacagagaccctctccaaaggatggcaggggacagctttcactcacgtgagaagatctatccgtatgactccctcatcgtcacaaaccgaattcgcgtgaaactgcccaaagacgtggaccggacgagactggagagacacttgtcgcccgaggagttccaggaagtgtttgggatgagcatcgaggagtttgaccgcctggccctctggaagaggaatgaccttaagaagaaagcccttttgttctgacggctgccagcctgccccactggtgtgtgccgggcgccgaggccaggggcccctggcgagaaccgcacacacccctcccacacaccttgctctggcttctctgtgtccatggggtgggcgggagggggtcccccagcaggtgcggcccctgcacctgccggcgacactcctgccggtagtttagggccgagacggctagcttcacgccacccttccccgctgtggcttggtgtcagggagaggctgtagagtggctgtgtcgggcatcagatggagcacacaggtggctgcagcccagcccaccttcccagcgttctcgaggtgccctggccccggtgctgggcacgtgggggacagaggtggccgggacgtgagctgtgaggcttgttgatgatggttgctgacaccatcatcgggggtgggcacacggcccttcggagcctgggcagcctggcctcacaggcagactcgcagacggggcagtgagcgtctgggacagtgccaagagtggggtgtgtgatttttgcaggcgtctgtgatgggtctctttagggacaaatgtcaacaagggacaagacagggcaccttccgccagcgcccctccatgcgctgcgttcctcctccagatcgacccctagatgcctacacaatatctttaaagtaacacagaagtttttattttattaaaaagtatagcctacttaaacgcgagatgacatatatagagtttaattttacggtccctccgcaggggagcggcctccagccttattctccaccgctcggatctgtgtggtttcagtctgttcttggtgtggtcctcatacacagagctccctgtctagtttcttttctttttcttttttctttttctcgtcacacaggtaaccttaaagacagacccctctaaagaacgctttgtaaatacatgtgaggtatagccaccactgttttccttgctgttatttttccaagtcttggggagaaaacatcctcctctgatggccaaagccctggaatcaagggtttccacgtaccctgcctaatacccgacgtagctcttgatgcaccgtccttgtgctgtggctggcggtgtctcagcctgaaacataaaccccacatgccccaggagcgatgtgctccctgaaacagacaaccacacgctgttggggagagaaggatggagataggatggagataggatggagatgtggctcttctcatctttgaagccagcagggcatcccggagcaggaggctggccgggctccccaagcgaaggcgttggtgtctgtcattaggtgtgtgttagggtgcagcaccggccgtcacaggatgctgataagcgcgctgagaggtggatgaaacaccaaagtctgtttccccgtccgcagtgggtgttgcctctttgtgtgtgtcccgatgttcctgcctgtgagtcggccttactccgtttccttagcgcccatgacacgccaagtcccgtttcgcactcggcttctcacccgcccagctcggctagggagggggagtttttagcacctaatatgcttcctgccattgcgcaatctgagcctgagcaactggaaacccccatttctcattagtgcaatgtcatatctgatcccaggaagcctggaaaataaaagacgatgcattataacttgcggaagt

SEQ ID NO: 47574 - DNA, 2472 bp, Artificial Sequence
  derived and/or modified sequence
acctgcgggcccgagggtctggctgtcgcagcgccgggccgccccgactccgagcggctgctgagatgagtgcagtgtcgcagccccaggctgctcccagcccgctggagaagtcgcccagcacggcgatcctgtgcaacacgtgtgggaatgtgtgcaagggcgaggtgctgcgggtgcaggacaagtacttccacatcaagtgcttcgtctgtaaagcatgtggctgcgacctggccgagggcggcttcttcgtgcggcagggcgagtacatctgcacgctggactaccagaggctctacggcacccgctgcttcagctgcgaccagttcattgagggtgaggtggtgtcggcgctgggcaagacctaccaccccgactgcttcgtgtgtgccgtctgccggctgcccttcccccccggggaccgagtgaccttcaacgggaaggaatgcatgtgccagaagtgttccctgcccgtatcggtgggcagcagcgcgcacctgtcccagggcctccgaagttgtgggggctgcggcacagaaatcaagaatggccaggccctggtagccttggacaagcactggcacttgggctgttttaagtgcaagagctgtgggaagctcctgaatgccgagtacatcagcaaggatgggctgccctactgcgaagctgactatcacgccaagttcggcatccgctgtgacagctgtgagaaatacatcacggggcgcgtgctggaggccggagagaagcactaccacccttcctgcgcgctatgtgtcaggtgcggccagatgtttgcagaaggcgaagagatgtatcttcaaggttcctccatctggcatccggcgtgtcgacaagcagccagaactgaagacagaaacaaggaaaccagaacttcctcagagagcatcatttctgtccctgcttccagcacctcagggtctccgagccgtgtgatttatgccaagcttggtggtgagatcctggactacagggacttggcagcccttcctaaaagtaaggccatctatgacatcgaccgccccgacatgatctcctactcaccctacatcagccactctgcaggggacaggcagagctacggcgagggggatcaggatgaccggtcctacaagcagtgtcggacctccagcccaagctccactgggtcggttagcctcgggcgctacactccgacctcacggtcaccacagcactacagccgtccaggcagtgaaagtggccggagcacccccagcctctccgtgctctctgacagcaagccgcccccctccacctaccagcaggcacctcgccacttccacgtcccagacactggcgtaaaagataacatctataggaaaccccctatctacagacagcatgctgccaggcgatcggatggggaggatggaagcttggaccaggataacaggaagaagagcagctggctgatgctcaagggggatgcagacacaaggaccaattctccagacctggacacccagtccttgtcccacagcagcgggaccgacagagaccctctccaaaggatggcaggggacagctttcactcacaatacaagatctatccgtatgactccctcatcgtcacaaaccgaattcgcgtgaaactgcccaaagacgtggaccggacgagactggagagacacttgtcgcccgaggagttccaggaagtgtttgggatgagcatcgaggagtttgaccgcctggccctctggaagaggaatgaccttaagaagaaagcccttttgttctgacggctgccagcctgccccactggtgtgtgccgggcgccgaggccaggggcccctggcgagaaccgcacacacccctcccacacaccttgctctggcttctctgtgtccatggggtgggcgggagggggtcccccagcaggtgcggcccctgcacctgccggcgacactcctgccggtagtttagggccgagacggctagcttcacgccacccttccccgctgtggcttggtgtcagggagaggctgtagagtggctgtgtcgggcatcagatggagcacacaggtggctgcagcccagcccaccttcccagcgttctcgaggtgccctggccccggtgctgggcacgtgggggacagaggtggccgggacgtgagctgtgaggcttgttgatgatggttgctgacaccatcatcgggggtgggcacacggcccttcggagcctgggcagcctggcctcacaggcagactcgcagacggggcagtgagcgtctgggacagtgccaagagtggggtgtgtgatttttgcaggcgtctgtgatgggtctctttagggacaaatgtcaacaagggacaagacagggcaccttccgccagcgcccctccatgcgctgcgttcctcctccagatcgacccctagatgcctacacaatatctttaaagtaacacagaagtttttattttattaaa

SEQ ID NO: 47575 - DNA, 3533 bp, Artificial Sequence
  derived and/or modified sequence
tgcggcggcgctgcctggcgtgtgcgcaaggagcgggcgcggagccggcgggcgggcggaggatagcgcgggcgcggcacctgcgggcccgagggtctggctgtcgcagcgccgggccgccccgactccgagcggctgctgagatgagtgcagtgtcgcagccccaggctgctcccagcccgctggagaagtcgcccagcacggcgatcctgtgcaacacgtgtgggaatgtgtgcaagggcgaggtgctgcgggtgcaggacaagtacttccacatcaagtgcttcgtctgtaaagcatgtggctgcgacctggccgagggcggcttcttcgtgcggcagggcgagtacatctgcacgctggactaccagaggctctacggcacccgctgcttcagctgcgaccagttcattgagggtgaggtggtgtcggcgctgggcaagacctaccaccccgactgcttcgtgtgtgccgtctgccggctgcccttcccccccggggaccgagtgaccttcaacgggaaggaatgcatgtgccagaagtgttccctgcccgtatcggtgggcagcagcgcgcacctgtcccagggcctccgaagttgtgggggctgcggcacagaaatcaagaatggccaggccctggtagccttggacaagcactggcacttgggctgttttaagtgcaagagctgtgggaagctcctgaatgccgagtacatcagcaaggatgggctgccctactgcgaagctgactatcacgccaagttcggcatccgctgtgacagctgtgagaaatacatcacggggcgcgtgctggaggccggagagaagcactaccacccttcctgcgcgctatgtgtcaggtgcggccagatgtttgcagaaggcgaagagatgtatcttcaaggttcctccatctggcatccggcgtgtcgacaagcagccagaactgaagacagaaacaaggaaaccagaacttcctcagagagcatcatttctgtccctgcttccagcacctcagggtctccgagccgtgtgatttatgccaagcttggtggtgagatcctggactacagggacttggcagcccttcctaaaagtaaggccatctatgacatcgaccgccccgacatgatctcctactcaccctacatcagccactctgcaggggacaggcagagctacggcgagggggatcaggatgaccggtcctacaagcagtgtcggacctccagcccaagctccactgggtcggttagcctcgggcgctacactccgacctcacggtcaccacagcactacagccgtccaggcagtgaaagtggccggagcacccccagcctctccgtgctctctgacagcaagccgcccccctccacctaccagcaggcacctcgccacttccacgtcccagacactggcgtaaaagataacatctataggaaaccccctatctacagacagcatgctgccaggcgatcggatggggaggatggaagcttggaccaggataacaggaagaagagcagctggctgatgctcaagggggatgcagacacaaggaccaattctccagacctggacacccagtccttgtcccacagcagcgggaccgacagagaccctctccaaaggatggcaggggacagctttcactcacaacagatctatccgtatgactccctcatcgtcacaaaccgaattcgcgtgaaactgcccaaagacgtggaccggacgagactggagagacacttgtcgcccgaggagttccaggaagtgtttgggatgagcatcgaggagtttgaccgcctggccctctggaagaggaatgaccttaagaagaaagcccttttgttctgacggctgccagcctgccccactggtgtgtgccgggcgccgaggccaggggcccctggcgagaaccgcacacacccctcccacacaccttgctctggcttctctgtgtccatggggtgggcgggagggggtcccccagcaggtgcggcccctgcacctgccggcgacactcctgccggtagtttagggccgagacggctagcttcacgccacccttccccgctgtggcttggtgtcagggagaggctgtagagtggctgtgtcgggcatcagatggagcacacaggtggctgcagcccagcccaccttcccagcgttctcgaggtgccctggccccggtgctgggcacgtgggggacagaggtggccgggacgtgagctgtgaggcttgttgatgatggttgctgacaccatcatcgggggtgggcacacggcccttcggagcctgggcagcctggcctcacaggcagactcgcagacggggcagtgagcgtctgggacagtgccaagagtggggtgtgtgatttttgcaggcgtctgtgatgggtctctttagggacaaatgtcaacaagggacaagacagggcaccttccgccagcgcccctccatgcgctgcgttcctcctccagatcgacccctagatgcctacacaatatctttaaagtaacacagaagtttttattttattaaaaagtatagcctacttaaacgcgagatgacatatatagagtttaattttacggtccctccgcaggggagcggcctccagccttattctccaccgctcggatctgtgtggtttcagtctgttcttggtgtggtcctcatacacagagctccctgtctagtttcttttctttttcttttttctttttctcgtcacacaggtaaccttaaagacagacccctctaaagaacgctttgtaaatacatgtgaggtatagccaccactgttttccttgctgttatttttccaagtcttggggagaaaacatcctcctctgatggccaaagccctggaatcaagggtttccacgtaccctgcctaatacccgacgtagctcttgatgcaccgtccttgtgctgtggctggcggtgtctcagcctgaaacataaaccccacatgccccaggagcgatgtgctccctgaaacagacaaccacacgctgttggggagagaaggatggagataggatggagataggatggagatgtggctcttctcatctttgaagccagcagggcatcccggagcaggaggctggccgggctccccaagcgaaggcgttggtgtctgtcattaggtgtgtgttagggtgcagcaccggccgtcacaggatgctgataagcgcgctgagaggtggatgaaacaccaaagtctgtttccccgtccgcagtgggtgttgcctctttgtgtgtgtcccgatgttcctgcctgtgagtcggccttactccgtttccttagcgcccatgacacgccaagtcccgtttcgcactcggcttctcacccgcccagctcggctagggagggggagtttttagcacctaatatgcttcctgccattgcgcaatctgagcctgagcaactggaaacccccatttctcattagtgcaatgtcatatctgatcccaggaagcctggaaaataaaagacgatgcattataacttgcggaagt

SEQ ID NO: 47576 - DNA, 1722 bp, Artificial Sequence
  derived and/or modified sequence
atgagcgccgtgagccagccccaggccgcccccagccccctggagaagagccccagcaccgccatcctgtgcaacacctgcggcaacgtgtgcaagggcgaggtgctgagagtgcaggacaagtacttccacatcaagtgcttcgtgtgcaaggcctgcggctgcgacctggccgagggcggcttcttcgtgagacagggcgagtacatctgcaccctggactaccagagactgtacggcaccagatgcttcagctgcgaccagttcatcgagggcgaggtggtgagcgccctgggcaagacctaccaccccgactgcttcgtgtgcgccgtgtgcagactgcccttcccccccggcgacagagtgaccttcaacggcaaggagtgcatgtgccagaagtgcagcctgcccgtgagcgtgggcagcagcgcccacctgagccagggcctgagaagctgcggcggctgcggcaccgagatcaagaacggccaggccctggtggccctggacaagcactggcacctgggctgcttcaagtgcaagagctgcggcaagctgctgaacgccgagtacatcagcaaggacggcctgccctactgcgaggccgactaccacgccaagttcggcatcagatgcgacagctgcgagaagtacatcaccggcagagtgctggaggccggcgagaagcactaccaccccagctgcgccctgtgcgtgagatgcggccagatgttcgccgagggcgaggagatgtacctgcagggcagcagcatctggcaccccgcctgcagacaggccgccagaaccgaggacagaaacaaggagaccagaaccagcagcgagagcatcatcagcgtgcccgccagcagcaccagcggcagccccagcagagtgatctacgccaagctgggcggcgagatcctggactacagagacctggccgccctgcccaagagcaaggccatctacgacatcgacagacccgacatgatcagctacagcccctacatcagccacagcgccggcgacagacagagctacggcgagggcgaccaggacgacagaagctacaagcagtgcagaaccagcagccccagcagcaccggcagcgtgagcctgggcagatacacccccaccagcagaagcccccagcactacagcagacccggcagcgagagcggcagaagcacccccagcctgagcgtgctgagcgacagcaagcccccccccagcacctaccagcaggcccccagacacttccacgtgcccgacaccggcgtgaaggacaacatctacagaaagccccccatctacagacagcacgccgccagaagaagcgacggcgaggacggcagcctggaccaggacaacagaaagcagaagagcagctggctgatgctgaagggcgacgccgacaccagaaccaacagccccgacctggacacccagagcctgagccacagcagcggcaccgacagagaccccctgcagagaatggccggcgacagcttccacagcagagagaagatctacccctacgacagcctgatcgtgaccaacagaatcagagtgaagctgcccaaggacgtggacagaaccagactggagagacacctgagccccgaggagttccaggaggtgttcggcatgagcatcgaggagttcgacagactggccctgtggaagagaaacgacctgaagaagaaggccctgctgttctag

SEQ ID NO: 47577 - DNA, 1719 bp, Artificial Sequence
  derived and/or modified sequence
atgagcgccgtgagccagccccaggccgcccccagccccctggagaagagccccagcaccgccatcctgtgcaacacctgcggcaacgtgtgcaagggcgaggtgctgagagtgcaggacaagtacttccacatcaagtgcttcgtgtgcaaggcctgcggctgcgacctggccgagggcggcttcttcgtgagacagggcgagtacatctgcaccctggactaccagagactgtacggcaccagatgcttcagctgcgaccagttcatcgagggcgaggtggtgagcgccctgggcaagacctaccaccccgactgcttcgtgtgcgccgtgtgcagactgcccttcccccccggcgacagagtgaccttcaacggcaaggagtgcatgtgccagaagtgcagcctgcccgtgagcgtgggcagcagcgcccacctgagccagggcctgagaagctgcggcggctgcggcaccgagatcaagaacggccaggccctggtggccctggacaagcactggcacctgggctgcttcaagtgcaagagctgcggcaagctgctgaacgccgagtacatcagcaaggacggcctgccctactgcgaggccgactaccacgccaagttcggcatcagatgcgacagctgcgagaagtacatcaccggcagagtgctggaggccggcgagaagcactaccaccccagctgcgccctgtgcgtgagatgcggccagatgttcgccgagggcgaggagatgtacctgcagggcagcagcatctggcaccccgcctgcagacaggccgccagaaccgaggacagaaacaaggagaccagaaccagcagcgagagcatcatcagcgtgcccgccagcagcaccagcggcagccccagcagagtgatctacgccaagctgggcggcgagatcctggactacagagacctggccgccctgcccaagagcaaggccatctacgacatcgacagacccgacatgatcagctacagcccctacatcagccacagcgccggcgacagacagagctacggcgagggcgaccaggacgacagaagctacaagcagtgcagaaccagcagccccagcagcaccggcagcgtgagcctgggcagatacacccccaccagcagaagcccccagcactacagcagacccggcagcgagagcggcagaagcacccccagcctgagcgtgctgagcgacagcaagcccccccccagcacctaccagcaggcccccagacacttccacgtgcccgacaccggcgtgaaggacaacatctacagaaagccccccatctacagacagcacgccgccagaagaagcgacggcgaggacggcagcctggaccaggacaacagaaagaagagcagctggctgatgctgaagggcgacgccgacaccagaaccaacagccccgacctggacacccagagcctgagccacagcagcggcaccgacagagaccccctgcagagaatggccggcgacagcttccacagccagtacaagatctacccctacgacagcctgatcgtgaccaacagaatcagagtgaagctgcccaaggacgtggacagaaccagactggagagacacctgagccccgaggagttccaggaggtgttcggcatgagcatcgaggagttcgacagactggccctgtggaagagaaacgacctgaagaagaaggccctgctgttctag

SEQ ID NO: 47578 - DNA, 1716 bp, Artificial Sequence
  derived and/or modified sequence
atgagcgccgtgagccagccccaggccgcccccagccccctggagaagagccccagcaccgccatcctgtgcaacacctgcggcaacgtgtgcaagggcgaggtgctgagagtgcaggacaagtacttccacatcaagtgcttcgtgtgcaaggcctgcggctgcgacctggccgagggcggcttcttcgtgagacagggcgagtacatctgcaccctggactaccagagactgtacggcaccagatgcttcagctgcgaccagttcatcgagggcgaggtggtgagcgccctgggcaagacctaccaccccgactgcttcgtgtgcgccgtgtgcagactgcccttcccccccggcgacagagtgaccttcaacggcaaggagtgcatgtgccagaagtgcagcctgcccgtgagcgtgggcagcagcgcccacctgagccagggcctgagaagctgcggcggctgcggcaccgagatcaagaacggccaggccctggtggccctggacaagcactggcacctgggctgcttcaagtgcaagagctgcggcaagctgctgaacgccgagtacatcagcaaggacggcctgccctactgcgaggccgactaccacgccaagttcggcatcagatgcgacagctgcgagaagtacatcaccggcagagtgctggaggccggcgagaagcactaccaccccagctgcgccctgtgcgtgagatgcggccagatgttcgccgagggcgaggagatgtacctgcagggcagcagcatctggcaccccgcctgcagacaggccgccagaaccgaggacagaaacaaggagaccagaaccagcagcgagagcatcatcagcgtgcccgccagcagcaccagcggcagccccagcagagtgatctacgccaagctgggcggcgagatcctggactacagagacctggccgccctgcccaagagcaaggccatctacgacatcgacagacccgacatgatcagctacagcccctacatcagccacagcgccggcgacagacagagctacggcgagggcgaccaggacgacagaagctacaagcagtgcagaaccagcagccccagcagcaccggcagcgtgagcctgggcagatacacccccaccagcagaagcccccagcactacagcagacccggcagcgagagcggcagaagcacccccagcctgagcgtgctgagcgacagcaagcccccccccagcacctaccagcaggcccccagacacttccacgtgcccgacaccggcgtgaaggacaacatctacagaaagccccccatctacagacagcacgccgccagaagaagcgacggcgaggacggcagcctggaccaggacaacagaaagaagagcagctggctgatgctgaagggcgacgccgacaccagaaccaacagccccgacctggacacccagagcctgagccacagcagcggcaccgacagagaccccctgcagagaatggccggcgacagcttccacagccagcagatctacccctacgacagcctgatcgtgaccaacagaatcagagtgaagctgcccaaggacgtggacagaaccagactggagagacacctgagccccgaggagttccaggaggtgttcggcatgagcatcgaggagttcgacagactggccctgtggaagagaaacgacctgaagaagaaggccctgctgttctag

SEQ ID NO: 47579 - protein, 559 aa, Artificial Sequence
  derived and/or modified sequence
MSAVSQPQAAPSPLEKSPSTAILCNTCGNVCKGEVLRVQDKYFHIKCFVCKACGCDLAEGGFFVRQGEYICTLDYQRLYGTRCFSCDQFIEGEVVSALGKTYHPDCFVCAVCRLPFPPGDRVTFNGKECMCQKCSLPVSVGSSAHLSQGLRSCGGCGTEIKNGQALVALDKHWHLGCFKCKSCGKLLNAEYISKDGLPYCEADYHAKFGIRCDSCEKYITGRVLEAGEKHYHPSCALCVRCGQMFAEGEEMYLQGSSIWHPACRQAARTEDRNKETRTSSESIISVPASSTSGSPSRVIYAKLGGEILDYRDLAALPKSKAIYDIDRPDMISYSPYISHSAGDRQSYGEGDQDDRSYKQCRTSSPSSTGSVSLGRYTPTSRSPQHYSRPAARRSDGEDGSLDQDNRKKSSWLMLKGDADTRTNSPDLDTQSLSHSSGTDRDPLQRMAGDSFHSRFPYSKSDPLPGHGKNGLDQRNANLAPCGADPDASWGMREYKIYPYDSLIVTNRIRVKLPKDVDRTRLERHLSPEEFQEVFGMSIEEFDRLALWKRNDLKKKALLF

SEQ ID NO: 47580 - DNA, 1680 bp, Artificial Sequence
  derived and/or modified sequence
atgtcggccgtgtcacagccacaggccgccccaagtcctttagaaaagagtccatccactgcaattctgtgcaatacttgtggcaatgtttgcaaaggagaggtgcttagggtgcaggacaagtacttccacattaagtgttttgtgtgcaaggcctgtggttgtgacctggccgaaggaggttttttcgtccgtcagggcgagtatatctgcacactcgattaccagaggttatacggtactagatgcttctcctgcgatcagtttatagaaggcgaggtggtgagcgcactaggcaagacatatcatcccgattgcttcgtgtgcgctgtctgcaggctgccatttccacctggggatcgagttacttttaacggaaaagaatgcatgtgccagaagtgctctctcccagtctcggtcggaagttcagcccatctgtctcagggcctcaggtcatgcggcggttgcggcaccgagataaaaaatgggcaagcactagtggccctcgataaacattggcatctcggctgttttaagtgtaagtcgtgtggaaaattattgaacgccgaatacatatcaaaggatggcctgccctactgcgaggctgattaccacgctaaattcggaatccgatgcgatagttgcgaaaaatatattacaggccgtgtgctcgaggcgggagagaaacattaccatccgtcctgcgccctgtgcgtgaggtgtggccaaatgttcgctgagggagaagaaatgtacctgcagggatcaagtatctggcaccctgcctgcaggcaggcagcccgaactgaggatcgaaataaggaaacgagaacctcctctgagtctatcatcagtgttccagcctccagtaccagcgggagcccttcccgtgtcatctatgcaaaactgggaggcgaaatactggactaccgagatctcgctgctttacccaagtccaaagccatctatgatattgatagaccagatatgatatcttactccccgtatataagccattcggccggtgaccggcagtcctatggggaaggcgaccaggatgacagatcatacaaacagtgtagaacttcatctccttccagtaccggttccgtcagcctggggcggtatacccctacctcaagaagcccacaacattactcaaggcccgccgccagacggtcggatggtgaggatggcagtctggatcaggataatcgcaagaagagctcctggctcatgctgaagggcgacgcagacactagaacaaacagtcccgatctcgacactcagtcactctctcatagcagtggaacagatcgagaccccctccaacgcatggccggcgattcctttcactccagatttccctactcaaagagtgaccctctccccggccacgggaagaatggacttgaccaacgaaatgcaaacctggcaccttgcggagcagacccggatgcctcatggggcatgagagaatacaaaatatatccatacgattctctaatcgtcaccaatcggatccgcgtcaagctccctaaggacgttgacaggacaaggctagagagacatctgtcccccgaagaattccaagaagtgttcggcatgagcatagaagagttcgatagactggccctatggaaaagaaacgacctcaagaaaaaggccctgctgttctag

SEQ ID NO: 47581 - DNA, 1680 bp, Artificial Sequence
  derived and/or modified sequence
atgtctgctgtgtcccagccccaggccgcccccagccccctggagaagagccccagcacagccatcctgtgcaacacctgtggaaatgtgtgcaagggggaggtgctgcgggtgcaggacaagtacttccacatcaagtgctttgtgtgcaaggcctgtggctgtgacctggccgagggcggcttctttgtgcggcagggcgagtacatctgcaccctggactaccagaggctgtatggcacccgctgcttcagctgtgaccagttcatcgagggggaggtggtgtctgccctgggcaagacctaccacccagactgctttgtgtgtgctgtgtgccgcctgcccttccccccaggggacagagtgaccttcaacgggaaggagtgcatgtgccagaagtgcagcctgcctgtgtctgtgggcagcagcgcccacctgagccagggcctgcggagctgtggcggctgcggcacagagatcaagaatggccaggccctggtggccctggacaagcactggcacctgggctgcttcaagtgcaagagctgtgggaagctgctgaatgctgagtacatcagcaaggatggcctgccctactgtgaggccgactaccacgccaagtttggcatccgctgtgacagctgtgagaagtacatcaccggccgggtgctggaggccggggagaagcactaccaccccagctgtgccctgtgtgtgcgctgtggccagatgtttgctgagggggaggagatgtacctgcagggcagcagcatctggcacccagcctgccggcaggccgccaggacagaggacaggaacaaggagaccaggaccagcagcgagagcatcatctctgtgcctgccagcagcaccagcggcagccccagcagggtcatctatgccaagctgggcggggagatcctggactacagagacctggccgccctgcccaagagcaaggccatctatgacatcgacagaccagacatgatctcctacagcccctacatcagccacagcgctggggaccggcagagctatggagagggggaccaggatgacaggagctacaagcagtgcaggaccagcagccccagcagcacaggctctgtgtccctgggccgctacacccccaccagccgcagcccccagcactacagcaggcctgctgcccggcggagtgatggagaagatggcagcctggaccaggacaacaggaagaagagctcctggctgatgctgaagggagatgctgacaccaggaccaacagcccagacctggacacccagagcctgagccacagcagcggcacagaccgggaccccctgcagaggatggccggggacagcttccacagccgcttcccctacagcaagagtgaccccctgcccggccacggcaagaatggcctggaccagagaaatgccaacctggccccctgtggggctgaccctgatgcctcctggggcatgagggagtacaagatctacccctatgacagcctgattgtgaccaaccgcatccgggtgaagctgcccaaggatgtggacaggacccggctggagcggcacctgagccctgaggagttccaggaggtgtttggcatgagcattgaggagtttgaccggctggccctgtggaagagaaatgacctgaagaagaaggccctgctcttctag

SEQ ID NO: 47582 - DNA, 1680 bp, Artificial Sequence
  derived and/or modified sequence
atgagcgccgtgagccagccccaggccgcccccagccccctggagaagtccccctctactgcaatactctgcaatacttgcggcaacgtctgcaagggggaagtactccgcgtgcaagacaagtactttcacatcaagtgcttcgtgtgcaaagcttgcggatgtgacctggccgagggaggcttcttcgtgcgtcagggagaatatatatgtacactggactaccagcgactgtacggtactaggtgcttcagctgtgatcagtttatcgaaggggaggtggtgtccgcgctcggaaagacttaccaccccgattgttttgtgtgcgcagtgtgccgcttgcccttcccacccggcgatcgcgtgacctttaacggaaaagagtgcatgtgtcagaaatgttccctccctgtgtcagttgggtccagtgcccacctgtcacagggcctccgctcgtgtggcgggtgtggtacagagattaaaaacgggcaggccctggttgccctcgataagcattggcatcttggttgtttcaagtgtaaaagttgcggtaaactcctgaacgcggagtacatatcaaaggatggactgccttactgcgaagcagactaccatgcgaaatttgggatcagatgcgattcctgtgagaaatacatcaccggccgtgtgctcgaagctggagagaagcattatcacccttcgtgcgcactctgtgttcgttgcgggcagatgtttgcagagggagaggagatgtacctgcaaggcagctccatatggcaccctgcttgtagacaggctgctcgaacggaggatagaaataaggagacaaggacctcaagtgaatcgattatctctgttccggcttcgagcacttctgggtctccttctcgggtgatatatgctaagctgggtggggaaattctggactatcgggacctcgccgcgctccccaaatctaaagccatctatgatattgatcggcccgacatgattagttattccccgtacataagtcactcagccggggataggcaatcctatggagaaggagaccaggatgaccgatcatacaagcaatgccggacatctagcccctcctctactggtagcgtgtccctgggacggtacacaccaacttctcgatccccccagcattattcgagacccgccgctagaagatctgacggggaggacggatctctcgatcaagacaacaggaagaagtcatcatggctcatgttaaagggagatgccgacactcggaccaactctccagatctagatacccagagtctttcgcattcgagtggaacagaccgagacccactgcagaggatggccggggactcttttcacagccggttcccgtacagcaagagtgacccgctgcccggacatgggaaaaacggacttgatcagcggaacgcgaatctagccccttgtggggcagacccggacgccagctgggggatgagagagtacaagatctacccatatgatagtctgatcgtgaccaatagaattcgagtcaagctgcccaaagacgtggacaggaccaggttagaacgacatctgagtcctgaagaattccaggaggtttttgggatgtccattgaggagtttgatagattggctctttggaagcgtaacgatctaaaaaaaaaggctttactgttctag

SEQ ID NO: 47583 - DNA, 1680 bp, Artificial Sequence
  derived and/or modified sequence
atgtctgccgtgtcccagccccaggctgctccatcgcccctcgagaaaagtcctagcaccgcaatactgtgtaatacttgcggaaacgtgtgcaagggcgaggtgttgcgcgtgcaggacaagtatttccacattaaatgcttcgtttgcaaagcgtgtggttgtgacttagctgaaggtggctttttcgttagacaaggcgagtacatatgtaccctggactatcagcgtttgtacgggacgagatgtttctcatgtgaccagttcattgaaggcgaggtcgtttcggcactggggaagacctatcatcccgactgctttgtctgtgcagtgtgtcgattacctttcccgcctggtgaccgtgttactttcaacggcaaagaatgtatgtgtcaaaaatgctctttacctgtgtccgttggaagcagcgcacatctgtcccagggactgaggtcctgtggcggatgcgggacagagatcaagaatggacaagctcttgtggcgctggacaagcactggcatctcgggtgctttaagtgtaagtcttgcggcaaacttctgaacgctgaatatatctcaaaagacggcttgccatactgtgaggccgactaccacgccaagttcggaatacgctgtgacagttgcgagaaatatattacaggacgcgtgctggaggcaggggaaaaacattaccacccgtcttgcgccttgtgtgtgagatgtggccagatgtttgctgaaggcgaagaaatgtatctccagggatccagtatctggcacccagcctgtcgacaggcagctcgcacagaagacagaaataaggagaccagaacatccagcgagtccattatctctgtgccagcgagcagcacatccggtagtcctagtagagtcatctatgccaaactggggggagaaatcctcgactaccgagatctggctgccctgccaaaatccaaagccatctatgatattgaccgtccggatatgatcagttatagtccctacatctcccacagcgcaggagatcgccagagttacggggaaggagaccaggacgatagatcttacaaacagtgtcgtactagctcaccatcaagcacagggagcgtcagtttgggtcgctacacgcctacatcccggtccccacagcactattcacgaccagcagcacggcgtagcgacggcgaggatggttctctcgaccaagacaatcggaagaaatcttcctggctcatgctcaaaggggatgcggatacacggacaaatagccctgacttggatacacaatccctgagtcactctagtggcacggatcgagacccactgcagaggatggcaggagacagttttcacagccgattcccatattccaaaagcgacccactgcctggacatggaaagaacgggctggaccagaggaacgccaatctcgccccatgtggggcagatcccgatgcaagctgggggatgcgcgagtacaaaatctatccatacgacagcctgattgttactaatcgtatccgcgtcaagttgccgaaggacgttgacaggacacggctggaacgccacttgtcacccgaagaatttcaagaagtattcggtatgtctatagaagagttcgatcggttggctctttggaagcggaacgaccttaaaaagaaggcactgctgttctag

SEQ ID NO: 47584 - DNA, 1680 bp, Artificial Sequence
  derived and/or modified sequence
atgagtgcagtgtcgcagccccaggctgctcccagcccgctggagaagtcgcccagcacggcgatcctgtgcaacacgtgtgggaatgtgtgcaagggcgaggtgctgcgggtgcaggacaagtacttccacatcaagtgcttcgtctgtaaagcatgtggctgcgacctggccgagggcggcttcttcgtgcggcagggcgagtacatctgcacgctggactaccagaggctctacggcacccgctgcttcagctgcgaccagttcattgagggtgaggtggtgtcggcgctgggcaagacctaccaccccgactgcttcgtgtgtgccgtctgccggctgcccttcccccccggggaccgagtgaccttcaacgggaaggaatgcatgtgccagaagtgttccctgcccgtatcggtgggcagcagcgcgcacctgtcccagggcctccgaagttgtgggggctgcggcacagaaatcaagaatggccaggccctggtagccttggacaagcactggcacttgggctgttttaagtgcaagagctgtgggaagctcctgaatgccgagtacatcagcaaggatgggctgccctactgcgaagctgactatcacgccaagttcggcatccgctgtgacagctgtgagaaatacatcacggggcgcgtgctggaggccggagagaagcactaccacccttcctgcgcgctatgtgtcaggtgcggccagatgtttgcagaaggcgaagagatgtatcttcaaggttcctccatctggcatccggcgtgtcgacaagcagccagaactgaagacagaaacaaggaaaccagaacttcctcagagagcatcatttctgtccctgcttccagcacctcagggtctccgagccgtgtgatttatgccaagcttggtggtgagatcctggactacagggacttggcagcccttcctaaaagtaaggccatctatgacatcgaccgccccgacatgatctcctactcaccctacatcagccactctgcaggggacaggcagagctacggcgagggggatcaggatgaccggtcctacaagcagtgtcggacctccagcccaagctccactgggtcggttagcctcgggcgctacactccgacctcacggtcaccacagcactacagccgtccagctgccaggcgatcggatggggaggatggaagcttggaccaggataacaggaagaagagcagctggctgatgctcaagggggatgcagacacaaggaccaattctccagacctggacacccagtccttgtcccacagcagcgggaccgacagagaccctctccaaaggatggcaggggacagctttcactcacgattcccctattccaaatctgaccctctcccaggacatggaaagaatggcttggaccagcggaatgccaatctggccccctgtggagcagacccggatgccagctggggcatgcgagaatacaagatctatccgtatgactccctcatcgtcacaaaccgaattcgcgtgaaactgcccaaagacgtggaccggacgagactggagagacacttgtcgcccgaggagttccaggaagtgtttgggatgagcatcgaggagtttgaccgcctggccctctggaagaggaatgaccttaagaagaaagcccttttgttctga

SEQ ID NO: 47585 - DNA, 1680 bp, Artificial Sequence
  derived and/or modified sequence
atgagcgccgtgagccagccccaggccgcccccagccccctggagaagagccccagcaccgccatcctgtgcaacacctgcggcaacgtgtgcaagggcgaggtgctgagagtgcaggacaagtacttccacatcaagtgcttcgtgtgcaaggcctgcggctgcgacctggccgagggcggcttcttcgtgagacagggcgagtacatctgcaccctggactaccagagactgtacggcaccagatgcttcagctgcgaccagttcatcgagggcgaggtggtgagcgccctgggcaagacctaccaccccgactgcttcgtgtgcgccgtgtgcagactgcccttcccccccggcgacagagtgaccttcaacggcaaggagtgcatgtgccagaagtgcagcctgcccgtgagcgtgggcagcagcgcccacctgagccagggcctgagaagctgcggcggctgcggcaccgagatcaagaacggccaggccctggtggccctggacaagcactggcacctgggctgcttcaagtgcaagagctgcggcaagctgctgaacgccgagtacatcagcaaggacggcctgccctactgcgaggccgactaccacgccaagttcggcatcagatgcgacagctgcgagaagtacatcaccggcagagtgctggaggccggcgagaagcactaccaccccagctgcgccctgtgcgtgagatgcggccagatgttcgccgagggcgaggagatgtacctgcagggcagcagcatctggcaccccgcctgcagacaggccgccagaaccgaggacagaaacaaggagaccagaaccagcagcgagagcatcatcagcgtgcccgccagcagcaccagcggcagccccagcagagtgatctacgccaagctgggcggcgagatcctggactacagagacctggccgccctgcccaagagcaaggccatctacgacatcgacagacccgacatgatcagctacagcccctacatcagccacagcgccggcgacagacagagctacggcgagggcgaccaggacgacagaagctacaagcagtgcagaaccagcagccccagcagcaccggcagcgtgagcctgggcagatacacccccaccagcagaagcccccagcactacagcagacccgccgccagaagaagcgacggcgaggacggcagcctggaccaggacaacagaaagaagagcagctggctgatgctgaagggcgacgccgacaccagaaccaacagccccgacctggacacccagagcctgagccacagcagcggcaccgacagagaccccctgcagagaatggccggcgacagcttccacagcagattcccctacagcaagagcgaccccctgcccggccacggcaagaacggcctggaccagagaaacgccaacctggccccctgcggcgccgaccccgacgccagctggggcatgagagagtacaagatctacccctacgacagcctgatcgtgaccaacagaatcagagtgaagctgcccaaggacgtggacagaaccagactggagagacacctgagccccgaggagttccaggaggtgttcggcatgagcatcgaggagttcgacagactggccctgtggaagagaaacgacctgaagaagaaggccctgctgttctag

SEQ ID NO: 47586 - protein, 531 aa, Artificial Sequence
  derived and/or modified sequence
MSAVSQPQAAPSPLEKSPSTAILCNTCGNVCKGEVLRVQDKYFHIKCFVCKACGCDLAEGGFFVRQGEYICTLDYQRLYGTRCFSCDQFIEGEVVSALGKTYHPDCFVCAVCRLPFPPGDRVTFNGKECMCQKCSLPVSVGSSAHLSQGLRSCGGCGTEIKNGQALVALDKHWHLGCFKCKSCGKLLNAEYISKDGLPYCEADYHAKFGIRCDSCEKYITGRVLEAGEKHYHPSCALCVRCGQMFAEGEEMYLQGSSIWHPACRQAARTEDRNKETRTSSESIISVPASSTSGSPSRVIYAKLGGEILDYRDLAALPKSKAIYDIDRPDMISYSPYISHSAGDRQSYGESPQLLSPTPTEGDQDDRSYKQCRTSSPSSTGSVSLGRYTPTSRSPQHYSRPAARRSDGEDGSLDQDNRKKSSWLMLKGDADTRTNSPDLDTQSLSHSSGTDRDPLQRMAGDSFHSQYKIYPYDSLIVTNRIRVKLPKDVDRTRLERHLSPEEFQEVFGMSIEEFDRLALWKRNDLKKKALLF

SEQ ID NO: 47587 - protein, 531 aa, Artificial Sequence
  derived and/or modified sequence
MSAVSQPQAAPSPLEKSPSTAILCNTCGNVCKGEVLRVQDKYFHIKCFVCKACGCDLAEGGFFVRQGEYICTLDYQRLYGTRCFSCDQFIEGEVVSALGKTYHPDCFVCAVCRLPFPPGDRVTFNGKECMCQKCSLPVSVGSSAHLSQGLRSCGGCGTEIKNGQALVALDKHWHLGCFKCKSCGKLLNAEYISKDGLPYCEADYHAKFGIRCDSCEKYITGRVLEAGEKHYHPSCALCVRCGQMFAEGEEMYLQGSSIWHPACRQAARTEDRNKETRTSSESIISVPASSTSGSPSRVIYAKLGGEILDYRDLAALPKSKAIYDIDRPDMISYSPYISHSAGDRQSYGESPQLLSPTPTEGDQDDRSYKQCRTSSPSSTGSVSLGRYTPTSRSPQHYSRPAARRSDGEDGSLDQDNRKKSSWLMLKGDADTRTNSPDLDTQSLSHSSGTDRDPLQRMAGDSFHSREQIYPYDSLIVTNRIRVKLPKDVDRTRLERHLSPEEFQEVFGMSIEEFDRLALWKRNDLKKKALLF

SEQ ID NO: 47588 - DNA, 1596 bp, Artificial Sequence
  derived and/or modified sequence
atgagtgctgttagccagcctcaggccgctccctctcccctggagaaatccccaagcacagccatcctgtgcaatacatgcgggaacgtgtgtaaaggggaagtgctgcgcgtgcaggataagtactttcatataaagtgcttcgtctgtaaggcctgtggctgtgatctagccgagggaggcttctttgtgaggcaaggggaatatatttgtactctcgactaccaacgtctgtatggcaccagatgttttagctgtgaccagttcatagagggagaagtggtgtcagcattgggtaagacgtaccaccccgactgcttcgtctgcgctgtgtgtaggctgcccttcccacccggagatagagtcacctttaatgggaaagagtgtatgtgccaaaaatgtagcctgcctgtgtctgttggctcatcggcccacctgagccagggtctacgctcatgcggaggctgtggcacagaaatcaagaacggccaggccctggttgccttagataaacattggcacctgggatgtttcaagtgtaagtcctgcgggaagttactcaacgcggagtatatctctaaggacggcctgccgtactgtgaagctgattaccacgccaaattcggtataagatgtgactcttgtgagaaatacattacaggaagggtgctagaagccggagagaagcactatcacccaagttgtgccctatgtgtgagatgtggtcaaatgtttgcagaaggggaggagatgtacctgcaggggtcatctatctggcacccagcatgcagacaggcggctcgcactgaggatagaaataaggagacccggacttcaagcgagtcgataattagcgtcccagcatcaagtacgtccggctcaccctctagggtgatctacgccaagctcggaggggaaatcttggactatagggacctggctgcccttccaaaaagcaaggccatttacgacattgaccgccccgatatgatttcgtattcaccgtatattagccattcagccggcgacagacaatcctacggcgagtccccccagctcttgagcccaacccccacagagggggaccaggacgatcgcagttacaagcagtgccggaccagcagcccaagctccaccggctctgtgtcccttggccggtatacccctacttcacggagtccacaacattactctcgtcccgcggccagacgatccgatggtgaggacgggagccttgaccaagacaacagaaagaaatcttcctggctgatgcttaagggggacgcagatacaaggaccaattctcctgacttagacacacagagcctatcccacagttcaggtacagacagagacccacttcagaggatggcaggagacagctttcactctcagtacaagatttatccttacgacagcctgattgtgacaaaccgtattcgggtgaagctgcctaaagacgtggatcgaacacggcttgaacgacacctgagcccagaagagtttcaggaggtatttggtatgtcgattgaggaattcgaccgattagccctgtggaaacgcaacgatctcaagaaaaaggcccttttgttttag

SEQ ID NO: 47589 - DNA, 1596 bp, Artificial Sequence
  derived and/or modified sequence
atgtcagctgtgagtcagcctcaggcagccccatctccactggagaaatctccgtccactgcaatcctgtgcaacacctgtggcaatgtgtgtaaaggagaggttcttagggttcaggacaaatatttccatattaaatgtttcgtctgtaaggcctgtggatgcgacctagctgaggggggcttttttgtccggcaaggagaatacatctgtacccttgattatcaacggctgtacgggacccgctgcttcagctgtgaccagttcatcgagggagaggtcgtgagtgctttgggtaagacttatcaccctgactgctttgtgtgcgctgtctgtaggttgccctttccgccaggtgacagagtcacctttaacggcaaggagtgtatgtgccagaaatgcagcctgcccgtttcagttgggagctctgcacatctgtcccaggggctccgcagttgcggggggtgtggcacggaaataaaaaatgggcaggctttagtggcactggataagcactggcacctggggtgcttcaaatgcaaatcgtgtggaaagctgctcaatgccgagtacatctctaaggacggattaccctactgtgaggccgactaccacgcaaagtttggaatcagatgcgactcttgtgaaaagtacatcacgggacgcgtgctagaagccggggaaaagcactatcatccgagttgtgctctctgtgtgcgatgtgggcagatgtttgccgagggcgaagaaatgtaccttcaaggctccagtatttggcaccctgcttgtaggcaggcggcccgaactgaagacaggaacaaggaaacacggacttcctccgaaagtatcatcagcgttcccgcctctagtacctccggctccccgagcagggtcatctacgcgaaactcggcggggaaattctcgactacagagatctggccgccttacctaagagcaaggccatctacgatattgacaggccagatatgatctcttattcaccatacatatcccattctgccggagacagacagagctacggcgagagtccccaactcctttccccaacacctactgaaggtgatcaggacgataggtcctataaacagtgccgcacctcatctccatctagtacaggatccgttagcctcggcaggtatacccccactagtaggagtcctcagcattattccagacccgcagcccggcgttcagacggcgaagacggctccctcgaccaagataaccgcaaaaaaagttcctggcttatgctgaagggcgacgctgacacccgcacaaatagcccggacctggacacacagagcttatcccactccagtggcacggatagggatcccctccagcgtatggctggagattcattccactcacgtgaacagatttacccatatgattctttgatagttactaatagaatacgcgtcaagctgccaaaggacgtggatcgcacacggcttgagcgccatttgtcacccgaggaattccaggaggtgtttggcatgagtattgaggagttcgacagactggcgttgtggaagaggaatgatctgaagaagaaggccctccttttttag

SEQ ID NO: 47590 - DNA, 1596 bp, Artificial Sequence
  derived and/or modified sequence
atgtctgctgtgtcccagccccaggccgcccccagccccctggagaagagccccagcacagccatcctgtgcaacacctgtggaaatgtgtgcaagggggaggtgctgcgggtgcaggacaagtacttccacatcaagtgctttgtgtgcaaggcctgtggctgtgacctggccgagggcggcttctttgtgcggcagggcgagtacatctgcaccctggactaccagaggctgtatggcacccgctgcttcagctgtgaccagttcatcgagggggaggtggtgtctgccctgggcaagacctaccacccagactgctttgtgtgtgctgtgtgccgcctgcccttccccccaggggacagagtgaccttcaacgggaaggagtgcatgtgccagaagtgcagcctgcctgtgtctgtgggcagcagcgcccacctgagccagggcctgcggagctgtggcggctgcggcacagagatcaagaatggccaggccctggtggccctggacaagcactggcacctgggctgcttcaagtgcaagagctgtgggaagctgctgaatgctgagtacatcagcaaggatggcctgccctactgtgaggccgactaccacgccaagtttggcatccgctgtgacagctgtgagaagtacatcaccggccgggtgctggaggccggggagaagcactaccaccccagctgtgccctgtgtgtgcgctgtggccagatgtttgctgagggggaggagatgtacctgcagggcagcagcatctggcacccagcctgccggcaggccgccaggacagaggacaggaacaaggagaccaggaccagcagcgagagcatcatctctgtgcctgccagcagcaccagcggcagccccagcagggtcatctatgccaagctgggcggggagatcctggactacagagacctggccgccctgcccaagagcaaggccatctatgacatcgacagaccagacatgatctcctacagcccctacatcagccacagcgctggggaccggcagagctatggagagagcccccagctgctgagccccacccccacagaaggagaccaggatgacaggagctacaagcagtgcaggaccagcagccccagcagcactggatctgtgtccctgggccgctacacccccaccagccgcagcccccagcactacagcaggcctgctgccaggagaagtgatggagaagatggcagcctggaccaggacaacaggaagaagagctcctggctgatgctgaagggagatgctgacaccaggaccaacagcccagacctggacacccagagcctgagccacagcagcggcacagaccgggaccccctgcagaggatggccggggacagcttccacagccagtacaagatctacccctatgacagcctgattgtgaccaaccgcatccgggtgaagctgcccaaggatgtggacaggacccggctggagcggcacctgagccctgaggagttccaggaggtgtttggcatgagcattgaggagtttgaccggctggccctgtggaagagaaatgacctgaagaagaaggccctgctcttctag

SEQ ID NO: 47591 - DNA, 1596 bp, Artificial Sequence
  derived and/or modified sequence
atgtctgctgtgtcccagccccaggccgcccccagccccctggagaagagccccagcacagccatcctgtgcaacacctgtggaaatgtgtgcaagggggaggtgctgcgggtgcaggacaagtacttccacatcaagtgctttgtgtgcaaggcctgtggctgtgacctggccgagggcggcttctttgtgcggcagggcgagtacatctgcaccctggactaccagaggctgtatggcacccgctgcttcagctgtgaccagttcatcgagggggaggtggtgtctgccctgggcaagacctaccacccagactgctttgtgtgtgctgtgtgccgcctgcccttccccccaggggacagagtgaccttcaacgggaaggagtgcatgtgccagaagtgcagcctgcctgtgtctgtgggcagcagcgcccacctgagccagggcctgcggagctgtggcggctgcggcacagagatcaagaatggccaggccctggtggccctggacaagcactggcacctgggctgcttcaagtgcaagagctgtgggaagctgctgaatgctgagtacatcagcaaggatggcctgccctactgtgaggccgactaccacgccaagtttggcatccgctgtgacagctgtgagaagtacatcaccggccgggtgctggaggccggggagaagcactaccaccccagctgtgccctgtgtgtgcgctgtggccagatgtttgctgagggggaggagatgtacctgcagggcagcagcatctggcacccagcctgccggcaggccgccaggacagaggacaggaacaaggagaccaggaccagcagcgagagcatcatctctgtgcctgccagcagcaccagcggcagccccagcagggtcatctatgccaagctgggcggggagatcctggactacagagacctggccgccctgcccaagagcaaggccatctatgacatcgacagaccagacatgatctcctacagcccctacatcagccacagcgctggggaccggcagagctatggagagagcccccagctgctgagccccacccccacagaaggagaccaggatgacaggagctacaagcagtgcaggaccagcagccccagcagcactggatctgtgtccctgggccgctacacccccaccagccgcagcccccagcactacagcaggcctgctgccaggagaagtgatggagaagatggcagcctggaccaggacaacaggaagaagagctcctggctgatgctgaagggagatgctgacaccaggaccaacagcccagacctggacacccagagcctgagccacagcagcggcacagaccgggaccccctgcagaggatggccggggacagcttccacagccgggagcagatctacccctatgacagcctgattgtgaccaaccgcatccgggtgaagctgcccaaggatgtggacaggacccggctggagcggcacctgagccctgaggagttccaggaggtgtttggcatgagcattgaggagtttgaccggctggccctgtggaagagaaatgacctgaagaagaaggccctgctcttctag

SEQ ID NO: 47592 - DNA, 1596 bp, Artificial Sequence
  derived and/or modified sequence
atgagcgccgtgagccagccccaggccgcccccagccccctggagaagagccccagcactgctatactgtgtaatacctgtgggaacgtgtgtaaaggtgaggttctgagggtacaggataagtacttccatattaaatgtttcgtatgcaaagcttgtgggtgtgatttggcggaggggggcttttttgtgcgtcagggcgagtatatttgcacattagactaccagagactgtatggcacccgctgttttagctgtgatcagtttatagagggagaggtggtatcagccctggggaagacgtatcacccagattgtttcgtgtgcgccgtctgtagacttccctttcctcctggggacagggtcacattcaacggaaaggagtgcatgtgccagaaatgtagcctgcccgtttccgtcgggagctctgcccacctgagccaaggcctgcgctcgtgtggaggatgcggcactgagattaagaatggccaagcactggtggctctcgacaagcattggcaccttggatgtttcaagtgcaaatcctgtggaaaactgttgaacgcagaatatatctcaaaagacggcctgccttattgcgaggctgactaccatgcaaaatttggcatcagatgtgattcctgcgagaaatacatcacgggcagggtcctggaagccggagagaagcactatcacccttcttgtgctctctgtgtaaggtgcgggcaaatgttcgctgaaggtgaggagatgtatctccagggatcttcgatatggcatcccgcatgtagacaggctgcccggaccgaggacagaaataaggagacccggacatcgagcgagagcatcatttccgtgcctgcttctagcacttctggttccccctctcgcgttatttacgcgaaactgggtggggaaatcctggattatcgcgatctcgctgcgttacccaaatctaaggccatctatgacatcgataggccagacatgatttcctattctccgtatattagccatagcgcaggagacaggcaatcatatggtgagagtcctcaactcctttcgcccactcctacagagggcgaccaggacgaccgttcttacaaacagtgcaggacaagcagtccatcttctaccgggagcgtaagcctaggtaggtataccccaacttcacggtctccacagcactattcccggccagctgccaggcgatctgacggggaagatggcagcctggatcaggataataggaaaaagtcatcctggttgatgctcaagggcgacgccgataccaggaccaactctcctgacctcgatacgcagtcactgtcgcattcgagtggaactgatcgcgaccccctgcagaggatggccggcgactcattccactctcaatacaaaatctatccatacgacagcctgatcgtgaccaatcgcatcagggtgaaacttcctaaggacgtggaccggacacgcctagaacggcatctctccccagaagaatttcaggaagtgttcggtatgtcaattgaggagttcgatagattggccctgtggaagcggaatgaccttaaaaagaaggccctccttttttag

SEQ ID NO: 47593 - DNA, 1596 bp, Artificial Sequence
  derived and/or modified sequence
atgagcgccgtgagccagccccaggccgcccccagccccctggagaaatcgcctagtacagcaattttatgcaatacctgtggtaatgtgtgcaagggggaggtactgagagtgcaggataagtactttcacattaagtgttttgtctgtaaagcctgcggctgcgatctcgcagagggcggtttcttcgtcagacagggtgaatatatctgtactctggattatcagagactttacgggacacgctgcttctcatgcgatcagtttatcgaaggcgaggtggtgtcagctctgggcaagacgtatcaccccgactgcttcgtgtgcgcggtctgccggcttccattcccaccaggcgatagagtgactttcaacgggaaagagtgcatgtgccaaaaatgtagtctgcccgtgagcgtcggatcatccgcgcatctgagtcaaggcctccggtcttgtggcggttgcggaaccgagatcaagaatggccaggctctggtggcactggataaacactggcacctaggctgttttaagtgcaaatcctgcggcaaactcttgaacgccgagtacatcagtaaagacggtctgccatattgcgaagcagactaccacgccaagtttggcatccgatgtgacagctgtgaaaaatacatcaccggtcgggtactcgaagcaggtgagaagcattatcacccctcgtgtgccctgtgcgtccggtgtgggcagatgtttgcagagggagaggaaatgtatttgcaggggtctagtatctggcatcctgcatgccgccaggccgcccgcacagaagaccggaataaagagacccggacatcctctgaatcaatcatttcagtgcctgcgtcatcgacctcaggtagtccgagtagggtcatctatgccaaactgggtggcgagatcctggattacagggaccttgccgctttaccaaaatctaaagccatctacgatatagataggccagatatgatttcgtattccccatatattagtcactccgcaggagataggcagtcatacggggaaagccctcagctgttgagccccaccccgactgagggagaccaggatgacagatcctacaagcaatgtcggacatcctccccatccagcacgggctctgtctcactgggacgatacactcctacaagtaggagtcctcagcactattcgcgccctgccgcacggagatccgatggcgaggacggcagcctggatcaggataaccggaagaagagcagctggctcatgctcaaaggggatgcggatacccgtaccaatagtcctgacctggacacccagtcactgagccattcctctggcaccgatagagatcccctgcagcgcatggccggggactcgttccactctcgggagcagatctacccttacgatagtttgatcgtgaccaaccggattcgagtgaagctgccgaaggacgttgatcgcacaagacttgagagacatttgagccctgaggagtttcaagaggtgttcgggatgagcattgaagaattcgacaggctggcactgtggaagagaaacgaccttaagaagaaagccctgttgttttag

SEQ ID NO: 47594 - DNA, 1596 bp, Artificial Sequence
  derived and/or modified sequence
atgtctgcagtttcacagccccaggctgctccctcacctctggagaaatcccctagcacggctatcttatgtaatacctgcggcaacgtgtgcaagggcgaggtgcttcgcgttcaggacaaatacttccatatcaagtgcttcgtctgtaaggcctgcgggtgcgacctggctgaaggcggtttttttgtgcgtcagggcgagtacatctgcactctcgactatcaaagactctatggaacgcgctgtttctcctgcgaccagttcatcgaaggagaagtggtcagcgccctggggaaaacctatcaccccgattgctttgtgtgtgccgtctgccgcctgccgtttccgcctggagatagagtgacatttaacgggaaagagtgtatgtgccagaagtgttctttgcctgtgagcgtaggaagttcagcccacttaagccaggggttgagatcatgcgggggatgcggcactgagatcaagaacggccaagctctagtggcattagacaaacattggcatctggggtgctttaagtgcaagagctgcggcaagttgttaaatgcagaatatatcagcaaagacgggcttccatactgcgaggccgactatcacgcgaagttcggaattaggtgtgacagctgtgaaaagtacatcacaggtcgagtgctggaggccggtgagaagcactatcaccctagctgcgccctctgcgtaaggtgcgggcagatgttcgccgagggcgaagaaatgtatctccaggggtcatccatctggcatcctgcttgtagacaggcggcacggactgaagaccgtaacaaagaaacacgcaccagcagcgaatccatcattagcgtgccagcttcatccaccagcggcagcccgtcacgcgtaatctacgcaaagctgggcggagagattctagattacagggacttggctgctctccccaaatctaaggctatctatgatattgatcggccagatatgatcagctacagtccatatatttcccattcagccggtgatcgacagagctacggcgaaagtccccagttactcagtccaactcccaccgagggggatcaagatgaccgttcttataagcagtgcagaactagctcaccgagctctacagggagcgtgtcactgggaagatatacgccgacatcaaggtccccacagcactacagtaggcctgcagcgaggcgttcagatggagaggatggctcacttgatcaggataatcgcaagaaatcctcatggctgatgcttaagggggatgctgatacccgcaccaacagcccggatctggatacgcagtcactcagccactcatccgggactgacagagaccccctccagcgcatggcaggagactcttttcacagtcagtataagatctacccttatgacagtctgattgttaccaataggatcagagtgaagctgccaaaggacgtcgatcggaccagactagagagacatctgagccctgaagagtttcaagaggtctttggaatgtctattgaagagttcgaccgtctcgccctctggaaacggaatgatctgaagaagaaagctctcctgttttag

SEQ ID NO: 47595 - DNA, 1596 bp, Artificial Sequence
  derived and/or modified sequence
atgagcgccgttagtcagcctcaggcggcaccctctccactggagaaatcccccagcaccgcgatcctgtgcaatacctgtggtaacgtctgcaagggagaggtcctgcgggtgcaggacaaatacttccacataaagtgctttgtgtgcaaggcttgcggctgtgacctggcagagggagggttttttgtccggcagggagagtatatctgcacgctggattatcagcggctgtacgggacacgatgcttctcgtgcgatcagttcatcgaaggagaagttgtcagcgccctcgggaaaacttatcatccagactgctttgtgtgcgctgtgtgtaggctgccatttcctcccggtgacagagtcacgtttaacggaaaagaatgcatgtgccagaagtgttcgctgcctgtgagcgtaggatccagtgctcatctctctcaaggcctgcgctcttgtggagggtgcggcacggagattaagaacggacaagctctggtggccctcgataaacactggcatctcgggtgcttcaagtgcaagagctgcgggaaactgttgaatgccgagtacatcagtaaagatgggctgccctactgcgaggctgattatcacgccaagttcggaataaggtgcgattcgtgtgagaagtacatcacagggagagtgcttgaggccggtgagaaacattatcacccctcttgtgccctgtgtgttcgttgtggacagatgttcgccgagggcgaagaaatgtacctgcagggaagctcaatttggcaccccgcatgtcggcaggctgcgagaactgaggaccggaacaaagagacaaggacttccagtgaatccataatctccgtgcctgccagcagcaccagtggatcacccagcagggtaatctatgccaaactggggggtgaaattcttgactaccgagacctcgccgctcttcctaaaagcaaggctatttatgacatcgatcggccagacatgatctcttacagcccgtatatctcccactcagctggcgacagacagagttatggtgagtcaccccaactgctgagccccacaccaaccgagggggaccaagatgacaggtcctacaaacagtgccgtacctccagccccagttctacggggtcagtgtcccttggcaggtacacacccacatctagaagtcctcagcactactcacgaccagctgccagaaggtctgacggtgaggacggctcattggaccaagataacaggaaaaaaagctcatggctaatgttgaagggcgatgcagatacgcggaccaactcacctgatttagacacacaatccctgagtcattcaagcggaaccgaccgagacccactccagcgcatggcaggagactcatttcacagccgcgagcagatatatccctacgactcgctcattgtgactaacaggatccgcgttaaactgcctaaggacgtggaccgcactcgactagagaggcacctcagcccagaggaattccaagaagtctttgggatgtcaattgaggaattcgaccggctggcgctgtggaagcggaacgatctcaagaagaaggctctgttgttctag

SEQ ID NO: 47596 - DNA, 3396 bp, Artificial Sequence
  derived and/or modified sequence
gtgcgcaaggagcgggcgcggagccggcgggcgggcggaggatagcgcgggcgcggcacctgcgggcccgagggtctggctgtcgcagcgccgggccgccccgactccgagcggctgctgagatgagtgcagtgtcgcagccccaggctgctcccagcccgctggagaagtcgcccagcacggcgatcctgtgcaacacgtgtgggaatgtgtgcaagggcgaggtgctgcgggtgcaggacaagtacttccacatcaagtgcttcgtctgtaaagcatgtggctgcgacctggccgagggcggcttcttcgtgcggcagggcgagtacatctgcacgctggactaccagaggctctacggcacccgctgcttcagctgcgaccagttcattgagggtgaggtggtgtcggcgctgggcaagacctaccaccccgactgcttcgtgtgtgccgtctgccggctgcccttcccccccggggaccgagtgaccttcaacgggaaggaatgcatgtgccagaagtgttccctgcccgtatcggtgggcagcagcgcgcacctgtcccagggcctccgaagttgtgggggctgcggcacagaaatcaagaatggccaggccctggtagccttggacaagcactggcacttgggctgttttaagtgcaagagctgtgggaagctcctgaatgccgagtacatcagcaaggatgggctgccctactgcgaagctgactatcacgccaagttcggcatccgctgtgacagctgtgagaaatacatcacggggcgcgtgctggaggccggagagaagcactaccacccttcctgcgcgctatgtgtcaggtgcggccagatgtttgcagaaggcgaagagatgtatcttcaaggttcctccatctggcatccggcgtgtcgacaagcagccagaactgaagacagaaacaaggaaaccagaacttcctcagagagcatcatttctgtccctgcttccagcacctcagggtctccgagccgtgtgatttatgccaagcttggtggtgagatcctggactacagggacttggcagcccttcctaaaagtaaggccatctatgacatcgaccgccccgacatgatctcctactcaccctacatcagccactctgcaggggacaggcagagctacggcgagtcccctcagttgctctcgccaacgccgaccgagggggatcaggatgaccggtcctacaagcagtgtcggacctccagcccaagctccactgggtcggttagcctcgggcgctacactccgacctcacggtcaccacagcactacagccgtccagctgccaggcgatcggatggggaggatggaagcttggaccaggataacaggaagaagagcagctggctgatgctcaagggggatgcagacacaaggaccaattctccagacctggacacccagtccttgtcccacagcagcgggaccgacagagaccctctccaaaggatggcaggggacagctttcactcacaatacaagatctatccgtatgactccctcatcgtcacaaaccgaattcgcgtgaaactgcccaaagacgtggaccggacgagactggagagacacttgtcgcccgaggagttccaggaagtgtttgggatgagcatcgaggagtttgaccgcctggccctctggaagaggaatgaccttaagaagaaagcccttttgttctgacggctgccagcctgccccactggtgtgtgccgggcgccgaggccaggggcccctggcgagaaccgcacacacccctcccacacaccttgctctggcttctctgtgtccatggggtgggcgggagggggtcccccagcaggtgcggcccctgcacctgccggcgacactcctgccggtagtttagggccgagacggctagcttcacgccacccttccccgctgtggcttggtgtcagggagaggctgtagagtggctgtgtcgggcatcagatggagcacacaggtggctgcagcccagcccaccttcccagcgttctcgaggtgccctggccccggtgctgggcacgtgggggacagaggtggccgggacgtgagctgtgaggcttgttgatgatggttgctgacaccatcatcgggggtgggcacacggcccttcggagcctgggcagcctggcctcacaggcagactcgcagacggggcagtgagcgtctgggacagtgccaagagtggggtgtgtgatttttgcaggcgtctgtgatgggtctctttagggacaaatgtcaacaagggacaagacagggcaccttccgccagcgcccctccatgcgctgcgttcctcctccagatcgacccctagatgcctacacaatatctttaaagtaacacagaagtttttattttattaaaaagtatagcctacttaaacgcgagatgacatatatagagtttaattttacggtccctccgcaggggagcggcctccagccttattctccaccgctcggatctgtgtggtttcagtctgttcttggtgtggtcctcatacacagagctccctgtctagtttcttttctttttcttttttctttttctcgtcacacaggtaaccttaaagacagacccctctaaagaacgctttgtaaatacatgtgaggtatagccaccactgttttccttgctgttatttttccaagtcttggggagaaaacatcctcctctgatggccaaagccctggaatcaagggtttccacgtaccctgcctaatacccgacgtagctcttgatgcaccgtccttgtgctgtggctggcggtgtctcagcctgaaacataaaccccacatgccccaggagcgatgtgctccctgaaacagacaaccacacgctgttggggagagaaggatggagataggatggagataggatggagatgtggctcttctcatctttgaagccagcagggcatcccggagcaggaggctggccgggctccccaagcgaaggcgttggtgtctgtcattaggtgtgtgttagggtgcagcaccggccgtcacaggatgctgataagcgcgctgagaggtggatgaaacaccaaagtctgtttccccgtccgcagtgggtgttgcctctttgtgtgtgtcccgatgttcctgcctgtgagtcggccttactccgtttccttagcgcccatgacacgccaagtcccgtttcgcactcggcttctcacccgcccagctcggctagggagggggagtttttagcacctaatatgcttcctgccattgcgcaatctgagcctgagcaactggaaacccccatttctcattagtgcaatgtcatatctgatcccaggaagcctggaaaataaaagacgatgcattataacttgcggaagtacaa

SEQ ID NO: 47597 - DNA, 3413 bp, Artificial Sequence
  derived and/or modified sequence
tgcggcggcgctgcctggcgtgtgcgcaaggagcgggcgcggagccggcgggcgggcggaggatagcgcgggcgcggcacctgcgggcccgagggtctggctgtcgcagcgccgggccgccccgactccgagcggctgctgagatgagtgcagtgtcgcagccccaggctgctcccagcccgctggagaagtcgcccagcacggcgatcctgtgcaacacgtgtgggaatgtgtgcaagggcgaggtgctgcgggtgcaggacaagtacttccacatcaagtgcttcgtctgtaaagcatgtggctgcgacctggccgagggcggcttcttcgtgcggcagggcgagtacatctgcacgctggactaccagaggctctacggcacccgctgcttcagctgcgaccagttcattgagggtgaggtggtgtcggcgctgggcaagacctaccaccccgactgcttcgtgtgtgccgtctgccggctgcccttcccccccggggaccgagtgaccttcaacgggaaggaatgcatgtgccagaagtgttccctgcccgtatcggtgggcagcagcgcgcacctgtcccagggcctccgaagttgtgggggctgcggcacagaaatcaagaatggccaggccctggtagccttggacaagcactggcacttgggctgttttaagtgcaagagctgtgggaagctcctgaatgccgagtacatcagcaaggatgggctgccctactgcgaagctgactatcacgccaagttcggcatccgctgtgacagctgtgagaaatacatcacggggcgcgtgctggaggccggagagaagcactaccacccttcctgcgcgctatgtgtcaggtgcggccagatgtttgcagaaggcgaagagatgtatcttcaaggttcctccatctggcatccggcgtgtcgacaagcagccagaactgaagacagaaacaaggaaaccagaacttcctcagagagcatcatttctgtccctgcttccagcacctcagggtctccgagccgtgtgatttatgccaagcttggtggtgagatcctggactacagggacttggcagcccttcctaaaagtaaggccatctatgacatcgaccgccccgacatgatctcctactcaccctacatcagccactctgcaggggacaggcagagctacggcgagtcccctcagttgctctcgccaacgccgaccgagggggatcaggatgaccggtcctacaagcagtgtcggacctccagcccaagctccactgggtcggttagcctcgggcgctacactccgacctcacggtcaccacagcactacagccgtccagctgccaggcgatcggatggggaggatggaagcttggaccaggataacaggaagaagagcagctggctgatgctcaagggggatgcagacacaaggaccaattctccagacctggacacccagtccttgtcccacagcagcgggaccgacagagaccctctccaaaggatggcaggggacagctttcactcacgtgagcagatctatccgtatgactccctcatcgtcacaaaccgaattcgcgtgaaactgcccaaagacgtggaccggacgagactggagagacacttgtcgcccgaggagttccaggaagtgtttgggatgagcatcgaggagtttgaccgcctggccctctggaagaggaatgaccttaagaagaaagcccttttgttctgacggctgccagcctgccccactggtgtgtgccgggcgccgaggccaggggcccctggcgagaaccgcacacacccctcccacacaccttgctctggcttctctgtgtccatggggtgggcgggagggggtcccccagcaggtgcggcccctgcacctgccggcgacactcctgccggtagtttagggccgagacggctagcttcacgccacccttccccgctgtggcttggtgtcagggagaggctgtagagtggctgtgtcgggcatcagatggagcacacaggtggctgcagcccagcccaccttcccagcgttctcgaggtgccctggccccggtgctgggcacgtgggggacagaggtggccgggacgtgagctgtgaggcttgttgatgatggttgctgacaccatcatcgggggtgggcacacggcccttcggagcctgggcagcctggcctcacaggcagactcgcagacggggcagtgagcgtctgggacagtgccaagagtggggtgtgtgatttttgcaggcgtctgtgatgggtctctttagggacaaatgtcaacaagggacaagacagggcaccttccgccagcgcccctccatgcgctgcgttcctcctccagatcgacccctagatgcctacacaatatctttaaagtaacacagaagtttttattttattaaaaagtatagcctacttaaacgcgagatgacatatatagagtttaattttacggtccctccgcaggggagcggcctccagccttattctccaccgctcggatctgtgtggtttcagtctgttcttggtgtggtcctcatacacagagctccctgtctagtttcttttctttttcttttttctttttctcgtcacacaggtaaccttaaagacagacccctctaaagaacgctttgtaaatacatgtgaggtatagccaccactgttttccttgctgttatttttccaagtcttggggagaaaacatcctcctctgatggccaaagccctggaatcaagggtttccacgtaccctgcctaatacccgacgtagctcttgatgcaccgtccttgtgctgtggctggcggtgtctcagcctgaaacataaaccccacatgccccaggagcgatgtgctccctgaaacagacaaccacacgctgttggggagagaaggatggagataggatggagataggatggagatgtggctcttctcatctttgaagccagcagggcatcccggagcaggaggctggccgggctccccaagcgaaggcgttggtgtctgtcattaggtgtgtgttagggtgcagcaccggccgtcacaggatgctgataagcgcgctgagaggtggatgaaacaccaaagtctgtttccccgtccgcagtgggtgttgcctctttgtgtgtgtcccgatgttcctgcctgtgagtcggccttactccgtttccttagcgcccatgacacgccaagtcccgtttcgcactcggcttctcacccgcccagctcggctagggagggggagtttttagcacctaatatgcttcctgccattgcgcaatctgagcctgagcaactggaaacccccatttctcattagtgcaatgtcatatctgatcccaggaagcctggaaaataaaagacgatgcattataacttgcggaagt

SEQ ID NO: 47598 - DNA, 1596 bp, Artificial Sequence
  derived and/or modified sequence
atgagcgccgtgagccagccccaggccgcccccagccccctggagaagagccccagcaccgccatcctgtgcaacacctgcggcaacgtgtgcaagggcgaggtgctgagagtgcaggacaagtacttccacatcaagtgcttcgtgtgcaaggcctgcggctgcgacctggccgagggcggcttcttcgtgagacagggcgagtacatctgcaccctggactaccagagactgtacggcaccagatgcttcagctgcgaccagttcatcgagggcgaggtggtgagcgccctgggcaagacctaccaccccgactgcttcgtgtgcgccgtgtgcagactgcccttcccccccggcgacagagtgaccttcaacggcaaggagtgcatgtgccagaagtgcagcctgcccgtgagcgtgggcagcagcgcccacctgagccagggcctgagaagctgcggcggctgcggcaccgagatcaagaacggccaggccctggtggccctggacaagcactggcacctgggctgcttcaagtgcaagagctgcggcaagctgctgaacgccgagtacatcagcaaggacggcctgccctactgcgaggccgactaccacgccaagttcggcatcagatgcgacagctgcgagaagtacatcaccggcagagtgctggaggccggcgagaagcactaccaccccagctgcgccctgtgcgtgagatgcggccagatgttcgccgagggcgaggagatgtacctgcagggcagcagcatctggcaccccgcctgcagacaggccgccagaaccgaggacagaaacaaggagaccagaaccagcagcgagagcatcatcagcgtgcccgccagcagcaccagcggcagccccagcagagtgatctacgccaagctgggcggcgagatcctggactacagagacctggccgccctgcccaagagcaaggccatctacgacatcgacagacccgacatgatcagctacagcccctacatcagccacagcgccggcgacagacagagctacggcgagagcccccagctgctgagccccacccccaccgagggcgaccaggacgacagaagctacaagcagtgcagaaccagcagccccagcagcaccggcagcgtgagcctgggcagatacacccccaccagcagaagcccccagcactacagcagacccgccgccagaagaagcgacggcgaggacggcagcctggaccaggacaacagaaagaagagcagctggctgatgctgaagggcgacgccgacaccagaaccaacagccccgacctggacacccagagcctgagccacagcagcggcaccgacagagaccccctgcagagaatggccggcgacagcttccacagccagtacaagatctacccctacgacagcctgatcgtgaccaacagaatcagagtgaagctgcccaaggacgtggacagaaccagactggagagacacctgagccccgaggagttccaggaggtgttcggcatgagcatcgaggagttcgacagactggccctgtggaagagaaacgacctgaagaagaaggccctgctgttctag

SEQ ID NO: 47599 - DNA, 1596 bp, Artificial Sequence
  derived and/or modified sequence
atgagcgccgtgagccagccccaggccgcccccagccccctggagaagagccccagcaccgccatcctgtgcaacacctgcggcaacgtgtgcaagggcgaggtgctgagagtgcaggacaagtacttccacatcaagtgcttcgtgtgcaaggcctgcggctgcgacctggccgagggcggcttcttcgtgagacagggcgagtacatctgcaccctggactaccagagactgtacggcaccagatgcttcagctgcgaccagttcatcgagggcgaggtggtgagcgccctgggcaagacctaccaccccgactgcttcgtgtgcgccgtgtgcagactgcccttcccccccggcgacagagtgaccttcaacggcaaggagtgcatgtgccagaagtgcagcctgcccgtgagcgtgggcagcagcgcccacctgagccagggcctgagaagctgcggcggctgcggcaccgagatcaagaacggccaggccctggtggccctggacaagcactggcacctgggctgcttcaagtgcaagagctgcggcaagctgctgaacgccgagtacatcagcaaggacggcctgccctactgcgaggccgactaccacgccaagttcggcatcagatgcgacagctgcgagaagtacatcaccggcagagtgctggaggccggcgagaagcactaccaccccagctgcgccctgtgcgtgagatgcggccagatgttcgccgagggcgaggagatgtacctgcagggcagcagcatctggcaccccgcctgcagacaggccgccagaaccgaggacagaaacaaggagaccagaaccagcagcgagagcatcatcagcgtgcccgccagcagcaccagcggcagccccagcagagtgatctacgccaagctgggcggcgagatcctggactacagagacctggccgccctgcccaagagcaaggccatctacgacatcgacagacccgacatgatcagctacagcccctacatcagccacagcgccggcgacagacagagctacggcgagagcccccagctgctgagccccacccccaccgagggcgaccaggacgacagaagctacaagcagtgcagaaccagcagccccagcagcaccggcagcgtgagcctgggcagatacacccccaccagcagaagcccccagcactacagcagacccgccgccagaagaagcgacggcgaggacggcagcctggaccaggacaacagaaagaagagcagctggctgatgctgaagggcgacgccgacaccagaaccaacagccccgacctggacacccagagcctgagccacagcagcggcaccgacagagaccccctgcagagaatggccggcgacagcttccacagcagagagcagatctacccctacgacagcctgatcgtgaccaacagaatcagagtgaagctgcccaaggacgtggacagaaccagactggagagacacctgagccccgaggagttccaggaggtgttcggcatgagcatcgaggagttcgacagactggccctgtggaagagaaacgacctgaagaagaaggccctgctgttctag

SEQ ID NO: 47600 - protein, 470 aa, Artificial Sequence
  derived and/or modified sequence
MSAVSQPQAAPSPLEKSPSTAILCNTCGNVCKGEVLRVQDKYFHIKCFVCKACGCDLAEGGFFVRQGEYICTLDYQRLYGTRCFSCDQFIEGEVVSALGKTYHPDCFVCAVCRLPFPPGDRVTFNGKECMCQKCSLPVSVGSSAHLSQGLRSCGGCGTEIKNGQALVALDKHWHLGCFKCKSCGKLLNAEYISKDGLPYCEADYHAKFGIRCDSCEKYITGRVLEAGEKHYHPSCALCVRCGQMFAEGEEMYLQGSSIWHPACRQAARTEDRNKETRTSSESIISVPASSTSGSPSRVIYAKLGGEILDYRDLAALPKSKAIYDIDRPDMISYSPYISHSAGDRQSYGESPQLLSPTPTEGDQDDRSYKQCRTSSPSSTGSVSLGRYTPTSRSPQHYSRPAARRSDGEDGSLDQDNRKQKSSWLMLKGDADTRTNSPDLDTQSLSHSSGTDRDPLQRMAGDSFHSREWFF

SEQ ID NO: 47601 - DNA, 1413 bp, Artificial Sequence
  derived and/or modified sequence
atgagcgctgtgtctcagccccaggccgctccgagcccacttgaaaagagccctagcacagccatactgtgcaacacttgcggcaatgtttgcaagggcgaggtactgcgggtgcaggataagtacttccacataaaatgttttgtttgtaaagcatgtgggtgcgatctcgcggaggggggtttttttgtgcggcaaggcgaatacatctgtaccttggactaccagcggctctacggaaccaggtgctttagttgtgatcagttcatcgagggggaggtagtctcagcactggggaagacttatcatcccgactgttttgtgtgtgccgtgtgcaggctcccattccccccaggtgaccgggtcacatttaacgggaaggagtgtatgtgtcagaaatgttccctgcccgtgtccgtgggaagctctgctcacctgtctcagggacttaggtcatgcggggggtgcggcactgagataaaaaacggccaagcactcgtggccctggataaacattggcatcttggatgcttcaaatgtaaatcctgcgggaagctgctgaacgctgagtacattagtaaggacggtttgccttactgcgaggccgactatcatgcaaaatttggcattaggtgcgacagctgcgaaaagtatatcacaggaagggttctggaggccggggagaagcactatcatccaagttgtgccttgtgtgtgcgctgcggacagatgttcgctgaaggagaggaaatgtaccttcaaggcagttcaatctggcaccctgcgtgtagacaggccgccagaacagaagaccgcaataaagagaccagaacgtcctcagaaagtatcatttccgttcccgcaagctctacttcgggcagcccttctagagtgatctacgcgaaattaggtggagagatcctggactaccgagacctagcggctctcccgaagtcgaaggcaatttatgacattgaccgacctgatatgatctcgtacagtccttacatctctcacagcgcaggcgaccgtcaatcatacggagaatccccccagcttttgagccctacacccaccgagggggaccaagacgaccgaagttataaacagtgtaggacctcctcaccttcaagtactggctcagtgagcctgggccggtacacccctacaagccgttcccctcaacattactcccgcccagcagcgagacgcagtgacggcgaagacgggagcctggaccaggataatagaaagcagaagagtagctggctaatgcttaagggtgacgctgacacaagaaccaacagccctgatctggatacccagtctttgtcccacagttccgggacagaccgagaccccctgcagcgcatggctggagatagcttccactcccgtgaatggttcttctag

SEQ ID NO: 47602 - DNA, 1413 bp, Artificial Sequence
  derived and/or modified sequence
atgtctgctgtgtcccagccccaggccgcccccagccccctggagaagagccccagcacagccatcctgtgcaacacctgtggaaatgtgtgcaagggggaggtgctgcgggtgcaggacaagtacttccacatcaagtgctttgtgtgcaaggcctgtggctgtgacctggccgagggcggcttctttgtgcggcagggcgagtacatctgcaccctggactaccagaggctgtatggcacccgctgcttcagctgtgaccagttcatcgagggggaggtggtgtctgccctgggcaagacctaccacccagactgctttgtgtgtgctgtgtgccgcctgcccttccccccaggggacagagtgaccttcaacgggaaggagtgcatgtgccagaagtgcagcctgcctgtgtctgtgggcagcagcgcccacctgagccagggcctgcggagctgtggcggctgcggcacagagatcaagaatggccaggccctggtggccctggacaagcactggcacctgggctgcttcaagtgcaagagctgtgggaagctgctgaatgctgagtacatcagcaaggatggcctgccctactgtgaggccgactaccacgccaagtttggcatccgctgtgacagctgtgagaagtacatcaccggccgggtgctggaggccggggagaagcactaccaccccagctgtgccctgtgtgtgcgctgtggccagatgtttgctgagggggaggagatgtacctgcagggcagcagcatctggcacccagcctgccggcaggccgccaggacagaggacaggaacaaggagaccaggaccagcagcgagagcatcatctctgtgcctgccagcagcaccagcggcagccccagcagggtcatctatgccaagctgggcggggagatcctggactacagagacctggccgccctgcccaagagcaaggccatctatgacatcgacagaccagacatgatctcctacagcccctacatcagccacagcgctggggaccggcagagctatggagagagcccccagctgctgagccccacccccacagaaggagaccaggatgacaggagctacaagcagtgcaggaccagcagccccagcagcactggatctgtgtccctgggccgctacacccccaccagccgcagcccccagcactacagcaggcctgctgccaggagaagtgatggagaagatggcagcctggaccaggacaacaggaagcagaagagctcctggctgatgctgaagggagatgctgacaccaggaccaacagcccagacctggacacccagagcctgagccacagcagcggcacagaccgggaccccctgcagaggatggccggggacagcttccacagccgggagtggttcttctag

SEQ ID NO: 47603 - DNA, 1413 bp, Artificial Sequence
  derived and/or modified sequence
atgagcgccgtgagccagccccaggccgcccccagccccctggagaagagtccgtccactgcaattctgtgtaacacatgcggaaacgtgtgtaagggggaagtgctccgggtacaagacaagtacttccatattaagtgcttcgtttgcaaggcgtgcgggtgtgatttggcggaaggaggattttttgtccgccaaggggagtatatctgtaccttagattaccagcgtttgtatggcacacgctgttttagctgcgatcagttcatagagggggaagtggtatctgctctcggaaagacctatcatcctgactgcttcgtgtgtgctgtgtgccgcctcccctttccccctggcgatagggtaactttcaacggcaaggaatgtatgtgccagaagtgctccctccctgtttccgtggggagcagtgcccatctcagtcagggtctacggtcttgcggaggatgcggcacggagataaagaacggccaagctctggtcgccctggataagcattggcacttgggatgctttaaatgcaaatcatgcggaaagttgttgaacgccgagtacattagcaaggatggactgccatactgcgaggcagactatcatgcaaaatttggaatcaggtgcgatagctgtgagaagtacataactggccgggtgctcgaagcaggagagaagcactaccacccatcttgtgcactgtgtgtcagatgcgggcaaatgtttgctgagggtgaagaaatgtacttacaggggtcatctatctggcatccagcctgccggcaggcagcacgcactgaagaccgtaataaggaaacgcggacgtccagcgaatctattatatcagtccccgctagctccacttccggaagtccttctcgcgtcatctacgctaaactgggcggagaaatactggattacagggacctggccgccctacctaagtccaaagcgatctacgacatagacaggcctgacatgatcagttacagcccatatattagtcatagcgcgggcgatcggcagtcgtacggagagagtccacagttgctctctcctacaccaacagaaggtgaccaagatgaccgctcatataagcagtgccgtacctcgtcacctagcagcacaggttcagtgagcctgggacggtatacccctacatccagaagcccacagcattacagtcggcccgccgcacgtagaagcgatggtgaggatggaagcctggaccaagacaatcggaagcagaaatcaagctggctgatgctgaagggagacgccgatactcgaactaacagtcccgacttggacacccagagcttgtctcacagcagcgggactgacagggaccctctccagagaatggctggtgactcttttcattcccgagaatggttcttttag

SEQ ID NO: 47604 - DNA, 1413 bp, Artificial Sequence
  derived and/or modified sequence
atgagtgctgtgtctcagccacaggcagccccttcaccactggagaagagccctagcaccgccattctctgtaatacatgcgggaatgtctgtaagggcgaagtcttacgtgtccaggataaatacttccatattaaatgcttcgtatgtaaagcttgtggctgtgacctggccgaaggcggatttttcgtgagacaaggtgagtatatttgcaccctggactaccagagactttacggcacccggtgcttcagctgtgatcagtttatcgagggcgaagtggtgtccgcactgggcaagacctatcaccctgactgcttcgtatgcgctgtctgcagattgccgttccctcctggcgacagagtcacatttaacgggaaggaatgcatgtgccaaaagtgcagcttgcctgtgagtgtgggcagctctgcccacttatcacagggcttgcgtagctgcggcggttgcgggacagagatcaagaatgggcaggccctggttgctctggataaacattggcatcttggttgcttcaaatgcaaatcttgcgggaaactgctcaatgccgagtacatcagtaaagatggacttccttattgtgaggctgactaccacgctaagttcggtatcagatgtgatagctgcgaaaagtacatcaccgggcgtgtactcgaagccggagagaagcactaccacccctcctgtgctctgtgcgttagatgcggccaaatgttcgccgagggtgaagaaatgtatctgcaaggatcatcaatctggcatcctgcatgccggcaggctgcccgaaccgaggaccggaacaaagagacaaggaccagctccgagagtataatctcagtgccggcttcttcgacaagcggctcaccctcccgggttatttatgctaagctcgggggagaaattctcgactatagagatctagccgcactccccaaatccaaagcgatttatgatatcgataggcccgatatgattagttacagtccttacatttctcactccgcgggagaccggcagtcctacggagaatcccctcagctgctctcgccaacccccaccgagggggaccaggacgatcggagttacaaacagtgccgtacgagctccccctccagtaccggctcagtgtcccttggcaggtatacgcccacatcaagatccccgcaacattattcgagacctgcagccaggcgaagcgacggagaggacggaagtttggaccaggataataggaaacagaaatccagttggctgatgttgaagggcgacgctgacaccaggacaaacagtccagatctagatactcaatccctgtcccatagttcaggtaccgacagggacccacttcagagaatggccggagactcttttcacagccgagagtggttcttctag

SEQ ID NO: 47605 - DNA, 2573 bp, Artificial Sequence
  derived and/or modified sequence
tgcggcggcgctgcctggcgtgtgcgcaaggagcgggcgcggagccggcgggcgggcggaggatagcgcgggcgcggcacctgcgggcccgagggtctggctgtcgcagcgccgggccgccccgactccgagcggctgctgagatgagtgcagtgtcgcagccccaggctgctcccagcccgctggagaagtcgcccagcacggcgatcctgtgcaacacgtgtgggaatgtgtgcaagggcgaggtgctgcgggtgcaggacaagtacttccacatcaagtgcttcgtctgtaaagcatgtggctgcgacctggccgagggcggcttcttcgtgcggcagggcgagtacatctgcacgctggactaccagaggctctacggcacccgctgcttcagctgcgaccagttcattgagggtgaggtggtgtcggcgctgggcaagacctaccaccccgactgcttcgtgtgtgccgtctgccggctgcccttcccccccggggaccgagtgaccttcaacgggaaggaatgcatgtgccagaagtgttccctgcccgtatcggtgggcagcagcgcgcacctgtcccagggcctccgaagttgtgggggctgcggcacagaaatcaagaatggccaggccctggtagccttggacaagcactggcacttgggctgttttaagtgcaagagctgtgggaagctcctgaatgccgagtacatcagcaaggatgggctgccctactgcgaagctgactatcacgccaagttcggcatccgctgtgacagctgtgagaaatacatcacggggcgcgtgctggaggccggagagaagcactaccacccttcctgcgcgctatgtgtcaggtgcggccagatgtttgcagaaggcgaagagatgtatcttcaaggttcctccatctggcatccggcgtgtcgacaagcagccagaactgaagacagaaacaaggaaaccagaacttcctcagagagcatcatttctgtccctgcttccagcacctcagggtctccgagccgtgtgatttatgccaagcttggtggtgagatcctggactacagggacttggcagcccttcctaaaagtaaggccatctatgacatcgaccgccccgacatgatctcctactcaccctacatcagccactctgcaggggacaggcagagctacggcgagtcccctcagttgctctcgccaacgccgaccgagggggatcaggatgaccggtcctacaagcagtgtcggacctccagcccaagctccactgggtcggttagcctcgggcgctacactccgacctcacggtcaccacagcactacagccgtccagctgccaggcgatcggatggggaggatggaagcttggaccaggataacaggaagcagaagagcagctggctgatgctcaagggggatgcagacacaaggaccaattctccagacctggacacccagtccttgtcccacagcagcgggaccgacagagaccctctccaaaggatggcaggggacagctttcactcacgtgagtggttcttttgaagaaggagccgtgatgtgcacaaaatgcctcgcggcaaagaggccccagaactcagagctatccccctacatctaagccttgcctgttaaaaagcatgaaagcaaagcccacaaatctaaggaccgaccggaaggaaatatggggcttttgcagtttgccggcttcccaagaactgtccccgagccagtgtgctaacgagggccacgcctgcatgtcccctcacagatttccaaggtgtgcaagaatgcagaaacccagacctgctcctgggctgtttaggagaaaggcgtccgggctgccgggtggaagtcagggcctgttccctccagagcagacatgggcatggtccggctgatgagtgcagacttggagttggtgatgggcaccatccctgtcccctgtgactcatcctgaacgaggcacagcctcaggcttcatagagagacagtgatggtgtctgcctgaccctaggggtgttttgaagactgaatcaggagtgattttcaaatgtagagaaaactccagataatgctgtttgcttccggccgctgtaaatcataggtgaaaaccagtagcaagtgctcactcagtgcctcccagaagcggtctgcgggtctcagctgggctgggggcagttttcattgggcaaggcttgggcttagcttcgaagcaggggctgggagaggatggatgggggtgtgagagcagaagaaagacctggctttgcagtgaggcagtcccaagttcaaatctgagctcaccactgacccgtcgtgtgatgggcgccaggtgttaggagactggaactgggtatgtgtgtggcattcggccggccatagtagctgctcagtaaacagaaactgtttctcatcctcatcctcatcctcatgcctgcaaactgtaaaccgtcctacttaacaatgaaagtagaaaagtgtttcaatgtgacaggaaagagtgaagacacagaagcttggaaatgatgatgtgttaaagaatcactttaaacaaagaaa

SEQ ID NO: 47606 - DNA, 1413 bp, Artificial Sequence
  derived and/or modified sequence
atgagcgccgtgagccagccccaggccgcccccagccccctggagaagagccccagcaccgccatcctgtgcaacacctgcggcaacgtgtgcaagggcgaggtgctgagagtgcaggacaagtacttccacatcaagtgcttcgtgtgcaaggcctgcggctgcgacctggccgagggcggcttcttcgtgagacagggcgagtacatctgcaccctggactaccagagactgtacggcaccagatgcttcagctgcgaccagttcatcgagggcgaggtggtgagcgccctgggcaagacctaccaccccgactgcttcgtgtgcgccgtgtgcagactgcccttcccccccggcgacagagtgaccttcaacggcaaggagtgcatgtgccagaagtgcagcctgcccgtgagcgtgggcagcagcgcccacctgagccagggcctgagaagctgcggcggctgcggcaccgagatcaagaacggccaggccctggtggccctggacaagcactggcacctgggctgcttcaagtgcaagagctgcggcaagctgctgaacgccgagtacatcagcaaggacggcctgccctactgcgaggccgactaccacgccaagttcggcatcagatgcgacagctgcgagaagtacatcaccggcagagtgctggaggccggcgagaagcactaccaccccagctgcgccctgtgcgtgagatgcggccagatgttcgccgagggcgaggagatgtacctgcagggcagcagcatctggcaccccgcctgcagacaggccgccagaaccgaggacagaaacaaggagaccagaaccagcagcgagagcatcatcagcgtgcccgccagcagcaccagcggcagccccagcagagtgatctacgccaagctgggcggcgagatcctggactacagagacctggccgccctgcccaagagcaaggccatctacgacatcgacagacccgacatgatcagctacagcccctacatcagccacagcgccggcgacagacagagctacggcgagagcccccagctgctgagccccacccccaccgagggcgaccaggacgacagaagctacaagcagtgcagaaccagcagccccagcagcaccggcagcgtgagcctgggcagatacacccccaccagcagaagcccccagcactacagcagacccgccgccagaagaagcgacggcgaggacggcagcctggaccaggacaacagaaagcagaagagcagctggctgatgctgaagggcgacgccgacaccagaaccaacagccccgacctggacacccagagcctgagccacagcagcggcaccgacagagaccccctgcagagaatggccggcgacagcttccacagcagagagtggttcttctag

SEQ ID NO: 47607 - protein, 625 aa, Artificial Sequence
  derived and/or modified sequence
MLTQAAVRLVRGSLRKTSWAEWGHRELRLGQLAPFTAPHKDKSFSDQRSELKRRLKAEKKVAEKEAKQKELSEKQLSQATAAATNHTTDNGVGPEEESVDPNQYYKIRSQAIHQLKVNGEDPYPHKFHVDISLTDFIQKYSHLQPGDHLTDITLKVAGRIHAKRASGGKLIFYDLRGEGVKLQVMANSRNYKSEEEFIHINNKLRRGDIIGVQGNPGKTKKGELSIIPYEITLLSPCLHMLPHLHFGLKDKETRYRQRYLDLILNDFVRQKFIIRSKIITYIRSFLDELGFLEIETPMMNIIPGGAVAKPFITYHNELDMNLYMRIAPELYHKMLVVGGIDRVYEIGRQFRNEGIDLTHNPEFTTCEFYMAYADYHDLMEITEKMVSGMVKHITGSYKVTYHPDGPEGQAYDVDFTPPFRRINMVEELEKALGMKLPETNLFETEETRKILDDICVAKAVECPPPRTTARLLDKLVGEFLEVTCINPTFICDHPQIMSPLAKWHRSKEGLTERFELFVMKKEICNAYTELNDPMRQRQLFEEQAKAKAAGDDEAMFIDENFCTALEYGLPPTAGWGMGIDRVAMFLTDSNNIKEVLLFPAMKPEDKKENVATTDTLESTTVGTSV

SEQ ID NO: 47608 - DNA, 1878 bp, Artificial Sequence
  derived and/or modified sequence
atgttaacccaggcagcagtgcgccttgtccgggggtccctcagaaagacatcttgggctgagtgggggcacagggaactgagactgggccagctggccccctttactgctcctcacaaggacaaaagctttagcgaccagcgctcagaactgaaaaggcggcttaaggcggagaagaaggtggctgagaaggaggcgaaacagaaggaactgtctgagaaacagctgagccaggctactgcagctgccacgaatcatacaactgacaacggcgtcggtccagaggaggagagtgtagatcccaaccagtattacaaaatccgcagtcaggccatacaccaattgaaggtgaatggagaggacccctacccccataagttccatgtggacatctcgctgacagatttcatccaaaagtactcccatttacaaccaggcgaccatctcactgacatcaccctgaaggtggcagggcgtatacatgcaaaacgagcatccggcggtaagctgattttttatgatctgcgaggagaaggtgttaagttgcaagtgatggccaactctcgcaactataagtcagaggaagagtttattcacataaacaataagctccgccgaggcgacataattggtgtccaggggaaccccggaaaaactaagaagggtgaactgtccataatcccgtacgaaattactctgctgtccccctgtctccatatgttaccacatttgcatttcggactcaaagataaagagacccgttatcggcaacgctaccttgacctgatcttaaacgattttgtgcgacagaagtttatcatacgttccaaaatcatcacttacatccggagtttcctagacgaactgggctttcttgaaatcgagacccccatgatgaacatcatccccggaggtgcagtggccaaacctttcatcacttaccataatgaactggacatgaacctgtatatgcgcattgcccctgagctgtaccacaaaatgctggtcgtgggaggcatcgatcgggtctacgaaatcggccgtcagttcagaaacgaaggcatcgacctgactcataaccctgagtttaccacctgcgagttttacatggcctatgctgattatcatgaccttatggagatcactgaaaagatggtaagtggcatggtgaagcacatcacagggtcctacaaggtaacctaccaccccgacgggcccgagggccaggcttacgatgtggacttcaccccacctttcaggcggatcaacatggtggaggaactggagaaggctcttgggatgaaactgcccgagacgaatctttttgaaacggaggaaacgaggaaaatcttagatgacatatgcgtggccaaggccgtggagtgtcccccgccacgcactacagccaggctcttagacaagctagtcggggagttcctggaggtcacctgtatcaatcccaccttcatttgcgaccacccccagattatgtccccacttgctaagtggcataggtcgaaagagggtctgactgagcgcttcgagttgtttgttatgaagaaagaaatatgcaacgcatatacagaacttaatgaccccatgaggcagcgtcagctcttcgaagagcaggctaaggcgaaggccgctggcgatgacgaagccatgtttatagacgagaacttttgcaccgccctggagtacggtcttccaccaacggctgggtggggcatgggaatcgatcgcgtcgctatgttcctgaccgactccaacaacataaaagaagtcctcctgtttcctgctatgaagcccgaagacaaaaaagaaaacgtcgcgaccactgatacactggagagtaccaccgtaggcacttcagtctag

SEQ ID NO: 47609 - DNA, 1878 bp, Artificial Sequence
  derived and/or modified sequence
atgctgacccaggccgctgtgcggctggtgcggggcagcctgaggaagacctcctgggccgagtggggccaccgggagctgcggctgggccagctggcccccttcaccgccccccacaaggacaagagcttcagtgaccagaggtctgagctgaagaggcggctgaaggccgagaagaaggtggccgagaaggaggccaagcagaaggagctgtctgagaagcagctgagccaggccacagctgctgccaccaaccacaccacagacaacggggtgggccctgaggaggagagcgtggaccccaaccagtactacaagatccgcagccaggccatccaccagctgaaggtgaatggagaggacccctacccccacaagttccacgtggacatcagcctgacagacttcatccagaagtacagccacctgcagcccggggaccacctgacagacatcaccctgaaggtggccggccgcatccacgccaagagggccagcggcggcaagctgatcttctatgacctgcggggggagggcgtgaagctgcaggtgatggccaacagcaggaactacaagtctgaggaggagttcatccacatcaacaacaagctgcggcggggggacatcatcggcgtgcagggcaaccctgggaagaccaagaagggggagctgagcatcatcccctatgagatcaccctgctgagcccctgcctgcacatgctgccccacctgcacttcggcctgaaggacaaggagacccgctaccggcagcgctacctggacctgatcctgaatgactttgtgcggcagaagttcatcatccgcagcaagatcatcacctacatccgctccttcctggatgagctgggcttcctggagattgagacccccatgatgaacatcatccctggaggagctgtggccaagcccttcatcacctaccacaatgagctggacatgaacctgtacatgagaattgcccctgagctgtaccacaagatgctggtggtgggcggcatcgacagagtgtatgagatcggccggcagttcagaaatgaaggaattgacctgacccacaaccctgagttcaccacctgtgagttctacatggcctatgctgactaccatgacctgatggagatcacagagaagatggtgtctggcatggtgaagcacatcaccggcagctacaaggtgacctaccacccagatggccctgagggccaggcctatgatgtggacttcaccccacccttccgccgcatcaacatggtggaggagctggagaaggccctgggcatgaagctgcctgagaccaacctgtttgaaacagaggagaccaggaagatcctggatgacatctgtgtggccaaggctgtggagtgccccccacccaggaccacagcccggctgctggacaagctggtgggggagttcctggaggtgacctgcatcaaccccaccttcatctgtgaccacccccagatcatgagccccctggccaagtggcacaggagcaaggagggcctgacagaaagatttgagctgtttgtgatgaagaaggagatctgcaatgcctacacagagctgaatgaccccatgaggcagaggcagctgtttgaggagcaggccaaggccaaggctgctggagatgatgaggccatgtttattgatgagaacttctgcacagccctggagtatggcctgcccccaacagctggctggggcatgggcatcgacagagtggccatgttcctgacagacagcaacaacatcaaggaggtgctgctcttccctgccatgaagccagaggacaagaaggaaaatgtggccaccacagacaccctggagagcaccaccgtgggcacctctgtgtag

SEQ ID NO: 47610 - DNA, 2171 bp, Artificial Sequence
  derived and/or modified sequence
acttttgggtcgggccctccgggaagatggcggccgtgcaggcggccgaggtgaaagtggatggcagcgagccgaaactgagcaagaagtggtggtaatcattagttccagggtgctctgccatgttgacgcaagctgctgtaaggcttgttagggggtccctgcgcaaaacctcctgggcagagtggggtcacagggaactgcgactgggtcaacttgctcctttcacagcgcctcacaaggacaagtcattttctgatcaaagaagtgagctgaagagacgcctgaaagctgagaagaaagtagcagagaaggaggccaaacagaaagagctcagtgagaaacagctaagccaagccactgctgctgccaccaaccacaccactgataatggtgtgggtcctgaggaagagagcgtggacccaaatcaatactacaaaatccgcagtcaagcaattcatcagctgaaggtcaatggggaagacccatacccacacaagttccatgtagacatctcactcactgacttcatccaaaaatatagtcacctgcagcctggggatcacctgactgacatcaccttaaaggtggcaggtaggatccatgccaaaagagcttctgggggaaagctcatcttctatgatcttcgaggagagggggtgaagttgcaagtcatggccaattccagaaattataaatcagaagaagaatttattcatattaataacaaactgcgtcggggagacataattggagttcaggggaatcctggtaaaaccaagaagggtgagctgagcatcattccgtatgagatcacactgctgtctccctgtttgcatatgttacctcatcttcactttggcctcaaagacaaggaaacaaggtatcgccagagatacttggacttgatcctgaatgactttgtgaggcagaaatttatcatccgctctaagatcatcacatatataagaagtttcttagatgagctgggattcctagagattgaaactcccatgatgaacatcatcccagggggagccgtggccaagcctttcatcacttatcacaacgagctggacatgaacttatatatgagaattgctccagaactctatcataagatgcttgtggttggtggcatcgaccgggtttatgaaattggacgccagttccggaatgaggggattgatttgacgcacaatcctgagttcaccacctgtgagttctacatggcctatgcagactatcacgatctcatggaaatcacggagaagatggtttcagggatggtgaagcatattacaggcagttacaaggtcacctaccacccagatggcccagagggccaagcctacgatgttgacttcaccccacccttccggcgaatcaacatggtagaagagcttgagaaagccctggggatgaagctgccagaaacgaacctctttgaaactgaagaaactcgcaaaattcttgatgatatctgtgtggcaaaagctgttgaatgccctccacctcggaccacagccaggctccttgacaagcttgttggggagttcctggaagtgacttgcatcaatcctacattcatctgtgatcacccacagataatgagccctttggctaaatggcaccgctctaaagagggtctgactgagcgctttgagctgtttgtcatgaagaaagagatatgcaatgcgtatactgagctgaatgatcccatgcggcagcggcagctttttgaagaacaggccaaggccaaggctgcaggtgatgatgaggccatgttcatagatgaaaacttctgtactgccctggaatatgggctgccccccacagctggctggggcatgggcattgatcgagtcgccatgtttctcacggactccaacaacatcaaggaagtacttctgtttcctgccatgaaacccgaagacaagaaggagaatgtagcaaccactgatacactggaaagcacaacagttggcacttctgtctagaaaataataattgcaagttgtataactcaggcgtctttgcatttctgcgaaagatcaaggtctgcaagggaattcttgtgtgctgctttccatttgacaccgcagttctgttcagccatcagaagagagacaaggaattaaaaatttctttttaatcctgttaccaaataa

SEQ ID NO: 47611 - DNA, 1878 bp, Artificial Sequence
  derived and/or modified sequence
atgctgacccaggccgccgtgcggctggtgcggggcagcctgcggaagaccagctgggcggagtgggggcaccgggagttgcgcctgggacagttagcccccttcactgctccccataaggacaagagctttagcgatcagcggtcagaactaaaacgccggttgaaggcagaaaagaaggtggcagaaaaggaagctaagcagaaggaacttagcgaaaaacagctgtcccaggcaactgccgctgcgaccaaccacacaaccgacaacggggtggggcccgaagaagagtcggtggatcccaaccaatactataaaattcgttcacaggcgattcaccaactcaaggttaacggagaagatccatatccacataaatttcatgtggacatttctctgacggactttattcagaaatactcacacctgcaacctggggatcatttgaccgacattactctcaaagtagccgggcggatccacgccaagcgggcttctggaggaaaactcatcttttacgacttaaggggcgagggcgtgaagctacaagtcatggcgaattcaagaaactacaaatccgaagaagaatttatccacattaacaataaactgagacgaggggacattatcggtgttcagggtaaccctggcaagactaaaaagggagagctgtccattatcccatatgaaatcaccttactgtccccatgtttacatatgctgccgcatttgcactttgggctgaaagataaggaaacccggtaccggcagagatatctggaccttatcttgaacgatttcgttagacagaaattcattatccgctccaagatcatcacctacattcgttcatttcttgacgaactgggctttttggagatcgagacgccgatgatgaacatcatccctggtggagcggtcgccaagcccttcataacttaccataatgaactcgatatgaacttgtatatgcgtatcgccccagaactgtatcacaaaatgcttgtcgtcggtggtattgaccgggtttatgaaattgggaggcaatttcggaatgagggaatagacttgacccataacccggaattcacaacctgcgaattttacatggcttatgctgactaccatgacttgatggaaatcaccgaaaagatggtgtctggaatggtcaagcacatcactgggtcctacaaggtgacctaccacccagacggcccagagggccaggcttatgatgttgacttcactcctcctttccgacggatcaacatggttgaggaactggagaaggcgttaggcatgaaactcccggagaccaacttattcgagaccgaggagacccggaagattctggacgatatctgcgtggcgaaggctgtggagtgtcctccaccacggaccacagcccgtctgctcgataaattagtgggggagtttctggaagtgacctgtatcaacccaacgttcatctgcgatcaccctcagattatgagcccacttgccaagtggcatcgcagtaaagaggggttgaccgagagattcgaacttttcgtgatgaagaaggagatctgcaatgcttacacagagctgaacgacccaatgagacagcgccaacttttcgaggagcaggctaaagccaaagcagcaggggacgacgaagccatgtttatagatgaaaatttctgcactgccctggagtatggattgccacctaccgctggctgggggatgggcatcgatcgcgtggccatgtttcttaccgactccaacaatatcaaggaggttttactgtttcctgcaatgaagcccgaagataagaaggagaatgttgcgactaccgacactcttgaatccactacagtaggtacttctgtttag

SEQ ID NO: 47612 - DNA, 1878 bp, Artificial Sequence
  derived and/or modified sequence
atgttgacgcaggctgctgtgcgccttgtgagaggttctctccgtaagacctcctgggcggaatggggccatagagaactcagactaggtcaactggcccctttcactgcaccgcacaaggacaagtccttttccgaccaaaggtcagagctaaaacgtcgtctaaaggcggaaaagaaagtggcggagaaggaggccaagcaaaaagagctcagtgagaagcagttgagccaggccaccgccgctgcaacgaaccataccaccgataatggagtaggaccggaagaggaatctgtagaccctaaccagtactacaagatcaggagtcaggccatccatcagctcaaggtgaatggcgaagacccatatccacacaagttccacgttgatatttccctgactgactttattcaaaaatactctcacctacagcccggtgatcatctgactgatattaccctgaaggtggcgggacggatacatgctaaaagggctagtggcggaaaactgattttctacgacctccggggagagggtgtcaaactccaggtaatggcgaactctaggaattacaagtcagaggaagaatttattcatattaacaataagctgcgaaggggggatattattggagtgcaggggaatcccggtaaaactaaaaaaggggaattgagcattatcccctacgaaattactctcctctctccatgtctgcacatgctccctcacctgcacttcggcctgaaggacaaggaaacaaggtaccggcagcgttatctcgacttaatccttaatgacttcgtgaggcagaaattcattatacggtcaaagattatcacatatattcgcagcttcttggacgagctcggattcctggagatcgagacacctatgatgaatatcatccccggaggcgcagtggctaagccattcattacatatcacaacgagcttgatatgaatttatatatgaggattgcccctgaactctatcataaaatgctggttgtgggtggcatagaccgcgtttacgaaatcggcagacagtttcgaaatgagggtattgacctaacacataaccccgaattcactacatgtgagttctacatggcatatgctgattaccatgacctcatggagattacggagaagatggtgtctggtatggttaagcatataacagggagctacaaggtaacttaccatcccgacgggccagaaggacaggcatacgatgtggattttaccccaccattcagaagaattaacatggtagaggagctcgaaaaagccctggggatgaagttgccagaaaccaatctgtttgagacagaagaaactcgtaagatcctggacgatatttgtgtggcaaaggctgtggagtgtccaccaccccgaactactgcccgactccttgataagctcgtgggggaattcttagaagtcacctgcatcaacccaacattcatctgtgatcacccccaaatcatgtcccccttggccaaatggcatcgaagcaaggaaggcctgacggaacgttttgagttgttcgtgatgaaaaaagagatttgtaacgcatacactgagctaaatgatcctatgcggcaacggcagctcttcgaggagcaagccaaagccaaagccgcaggcgatgatgaggccatgtttattgatgaaaatttttgtacagcattagagtacggcttaccgcctacagccggatggggcatgggaattgatagagtggcgatgtttctcactgatagcaacaacatcaaggaagtgctgcttttcccagccatgaagccggaggacaagaaggaaaacgtggccactaccgacacattagagtctaccactgttggtacaagtgtttag

SEQ ID NO: 47613 - DNA, 1878 bp, Artificial Sequence
  derived and/or modified sequence
atgctgacccaggccgccgtgagactggtgagaggcagcctgagaaagaccagctgggccgagtggggccacagagagctgagactgggccagctggcccccttcaccgccccccacaaggacaagagcttcagcgaccagagaagcgagctgaagagaagactgaaggccgagaagaaggtggccgagaaggaggccaagcagaaggagctgagcgagaagcagctgagccaggccaccgccgccgccaccaaccacaccaccgacaacggcgtgggccccgaggaggagagcgtggaccccaaccagtactacaagatcagaagccaggccatccaccagctgaaggtgaacggcgaggacccctacccccacaagttccacgtggacatcagcctgaccgacttcatccagaagtacagccacctgcagcccggcgaccacctgaccgacatcaccctgaaggtggccggcagaatccacgccaagagagccagcggcggcaagctgatcttctacgacctgagaggcgagggcgtgaagctgcaggtgatggccaacagcagaaactacaagagcgaggaggagttcatccacatcaacaacaagctgagaagaggcgacatcatcggcgtgcagggcaaccccggcaagaccaagaagggcgagctgagcatcatcccctacgagatcaccctgctgagcccctgcctgcacatgctgccccacctgcacttcggcctgaaggacaaggagaccagatacagacagagatacctggacctgatcctgaacgacttcgtgagacagaagttcatcatcagaagcaagatcatcacctacatcagaagcttcctggacgagctgggcttcctggagatcgagacccccatgatgaacatcatccccggcggcgccgtggccaagcccttcatcacctaccacaacgagctggacatgaacctgtacatgagaatcgcccccgagctgtaccacaagatgctggtggtgggcggcatcgacagagtgtacgagatcggcagacagttcagaaacgagggcatcgacctgacccacaaccccgagttcaccacctgcgagttctacatggcctacgccgactaccacgacctgatggagatcaccgagaagatggtgagcggcatggtgaagcacatcaccggcagctacaaggtgacctaccaccccgacggccccgagggccaggcctacgacgtggacttcaccccccccttcagaagaatcaacatggtggaggagctggagaaggccctgggcatgaagctgcccgagaccaacctgttcgagaccgaggagaccagaaagatcctggacgacatctgcgtggccaaggccgtggagtgccccccccccagaaccaccgccagactgctggacaagctggtgggcgagttcctggaggtgacctgcatcaaccccaccttcatctgcgaccacccccagatcatgagccccctggccaagtggcacagaagcaaggagggcctgaccgagagattcgagctgttcgtgatgaagaaggagatctgcaacgcctacaccgagctgaacgaccccatgagacagagacagctgttcgaggagcaggccaaggccaaggccgccggcgacgacgaggccatgttcatcgacgagaacttctgcaccgccctggagtacggcctgccccccaccgccggctggggcatgggcatcgacagagtggccatgttcctgaccgacagcaacaacatcaaggaggtgctgctgttccccgccatgaagcccgaggacaagaaggagaacgtggccaccaccgacaccctggagagcaccaccgtgggcaccagcgtgtag

SEQ ID NO: 47614 - DNA, 2064 bp, Artificial Sequence
  derived and/or modified sequence
atggtggagaacgagagactgagacaggagatgagaagatgcgaggccgagctgcaggagctgagaaccaagcccgccggcccctgccccggctgcgagcacagccaggagagcgcccagctgagagacaagctgagccagctgcagctggagatggccgagagcaagggcatgctgagcgagctgaacctggaggtgcagcagaagaccgacagactggccgaggtggagctgagactgaaggactgcctggccgagaaggcccaggaggaggagagactgagcagaagactgagagacagccacgagaccatcgccagcctgagagcccagagcccccccgtgaagtacgtgatcaagaccgtggaggtggagagcagcaagaccaagcaggccctgagcgagagccaggccagaaaccagcacctgcaggagcaggtggccatgcagagacaggtgctgaaggagatggagcagcagctgcagagcagccaccagctgaccgccagactgagagcccagatcgccatgtacgagagcgagctggagagagcccacggccagatgctggaggagatgcagagcctggaggaggacaagaacagagccatcgaggaggccttcgccagagcccaggtggagatgaaggccgtgcacgagaacctggccggcgtgagaaccaacctgctgaccctgcagcccgccctgagaaccctgaccaacgactacaacggcctgaagagacaggtgagaggcttccccctgctgctgcaggaggccctgagaagcgtgaaggccgagatcggccaggccatcgaggaggtgaacagcaacaaccaggagctgctgagaaagtacagaagagagctgcagctgagaaagaagtgccacaacgagctggtgagactgaagggcaacatcagagtgatcgccagagtgagacccgtgaccaaggaggacggcgagggccccgaggccaccaacgccgtgaccttcgacgccgacgacgacagcatcatccacctgctgcacaagggcaagcccgtgagcttcgagctggacaaggtgttcagcccccaggccagccagcaggacgtgttccaggaggtgcaggccctggtgaccagctgcatcgacggcttcaacgtgtgcatcttcgcctacggccagaccggcgccggcaagacctacaccatggagggcaccgccgagaaccccggcatcaaccagagagccctgcagctgctgttcagcgaggtgcaggagaaggccagcgactgggagtacaccatcaccgtgagcgccgccgagatctacaacgaggtgctgagagacctgctgggcaaggagccccaggagaagctggagatcagactgtgccccgacggcagcggccagctgtacgtgcccggcctgaccgagttccaggtgcagagcgtggacgacatcaacaaggtgttcgagttcggccacaccaacagaaccaccgagttcaccaacctgaacgagcacagcagcagaagccacgccctgctgatcgtgaccgtgagaggcgtggactgcagcaccggcctgagaaccaccggcaagctgaacctggtggacctggccggcagcgagagagtgggcaagagcggcgccgagggcagcagactgagagaggcccagcacatcaacaagagcctgagcgccctgggcgacgtgatcgccgccctgagaagcagacagggccacgtgcccttcagaaacagcaagctgacctacctgctgcaggacagcctgagcggcgacagcaagaccctgatggtggtgcaggtgagccccgtggagaagaacaccagcgagaccctgtacagcctgaagttcgccgagagagtgagaagcgtggagctgggccccggcctgagaagagccgagctgggcagctggagcagccaggagcacctggagtgggagcccgcctgccagaccccccagcccagcgccagagcccacagcgcccccagcagcggcaccagcagcagacccggcagcatcagaagaaagctgcagcccagcgcctag

SEQ ID NO: 47615 - DNA, 2064 bp, Artificial Sequence
  derived and/or modified sequence
atggtggagaacgaacgtctcaggcaagaaatgcgcaggtgtgaagcggaactgcaggagctcagaactaagcccgccggtccttgtcctggatgtgagcactcccaagagtccgctcagctgcgcgacaaactatcacagctgcagctggagatggctgagtccaaaggaatgctgagtgagctgaacctggaggtccaacagaagactgatcggctcgcggaagtggaactgcggctcaaggactgtctggctgagaaagctcaggaggaagagagactatcaagaagactaagggattcccacgaaaccatagcaagcctgcgggcccagtctcctccagtaaagtacgtgatcaaaacagtggaggtcgagtcttcgaaaacaaagcaggccctgtctgagagccaggcacggaatcagcacttacaggagcaggtggcaatgcaaaggcaggtgctgaaagagatggaacagcagctccaaagctctcaccaactgactgcccgtctgcgggcccagattgcaatgtacgaaagtgagctcgagcgagctcacgggcagatgttggaggagatgcagtcgctcgaagaagataagaatcgtgccattgaagaggcattcgcaagggctcaggtggagatgaaggcggttcatgaaaatctagccggcgtgcggactaaccttctgactctccagccagcccttcgcacactgaccaacgattataatggactaaagaggcaggttcggggattccctctattgttgcaggaggcactgcgctctgtgaaggcggagataggccaggctatcgaggaagtcaattccaataaccaagaactgctccgcaaataccggcgggaacttcagctgcgaaaaaagtgtcacaatgagttagtcagactgaaaggcaatattcgagtaatcgctcgggtgcgacctgtcactaaggaggacggggagggccctgaggcaacaaacgcagtgactttcgacgccgatgatgatagcatcattcacctgttacacaaagggaaacccgtgtcctttgaactagataaagtgtttagtccgcaggcctcacagcaagacgtattccaggaggtgcaggctctggtcacgagctgtattgatgggttcaatgtgtgcattttcgcttatggtcagaccggtgctggcaaaacatataccatggaagggacagcagaaaatccggggattaaccagcgcgccttgcagctgttattctctgaagttcaagaaaaagcatccgactgggaatacacgattactgtgtcagctgccgagatctacaatgaagtcctcagggatctcctgggtaaggagcctcaagagaaacttgagatcagactttgtccagacggatccggccagttatacgtccctggccttaccgaatttcaggtgcagagtgtggacgatatcaacaaggtcttcgaatttgggcataccaatcggacaacagagttcacaaatctgaacgagcattctagcaggagccatgccttactaattgtgacagtgcgcggggtagactgcagtaccggcctacgaaccactggaaagctcaatttggtggatctagcgggtagcgagcgcgtcggcaagtcgggagccgaagggtcccgcttgcgggaagctcagcacattaataagagtttgtcagctctgggtgatgtgattgcagctctgcgctccaggcaaggccatgtcccttttcgaaactcgaagcttacgtatttattgcaggacagcctaagtggcgattctaaaaccctgatggtagttcaggtgtcaccagtggaaaagaacacatccgaaaccctatattccttgaaatttgcagaacgcgtccggtctgtggagctgggcccaggcctcagaagagctgagctgggaagctggtcttcacaggagcatttagagtgggagccagcttgccagactccgcagccaagcgctagagcccactctgctccctctagcggaaccagttctcggcctggatctattagacggaagctgcagccctctgcttag

SEQ ID NO: 47616 - DNA, 2064 bp, Artificial Sequence
  derived and/or modified sequence
atggtggagaatgaaaggctgcggcaggagatgaggcgctgtgaggccgagctgcaggagctgcggaccaagccagctggcccctgccccggctgtgagcacagccaggagagcgcccagctgcgggacaagctgagccagctgcagctggagatggccgagagcaagggcatgctgtctgagctgaacctggaggtgcagcagaagacagaccggctggccgaggtggagctgcggctgaaggactgcctggccgagaaggcccaggaggaggagcggctgagccggcggctgcgggacagccatgagaccatcgccagcctgcgggcccagagcccccctgtgaagtatgtgatcaagacagtggaggtggagagcagcaagaccaagcaggccctgtctgagagccaggccaggaaccagcacctgcaggagcaggtggccatgcagaggcaggtgctgaaggagatggagcagcagctgcagagcagccaccagctgacagcccggctgcgggcccagatcgccatgtatgagagcgagctggagcgggcccacggccagatgctggaggagatgcagagcctggaggaggacaagaacagagccatcgaggaggcctttgcccgggcccaggtggagatgaaggctgtgcatgagaacctggccggcgtgaggaccaacctgctgaccctgcagcctgccctgcggaccctgaccaatgactacaacggcctgaagaggcaggtgcggggcttccccctgctgctgcaggaggccctgcggtctgtgaaggccgagatcggccaggccatcgaggaggtgaacagcaacaaccaggagctgctgaggaagtacagaagagagctgcagctgaggaagaagtgccacaatgagctggtgcggctgaagggcaacatccgggtcatcgcccgggtgcggcctgtgaccaaggaggatggagagggccctgaggccaccaatgctgtgacctttgatgctgatgatgacagcatcatccacctgctgcacaagggcaagcctgtgtcctttgagctggacaaggtgttcagcccccaggccagccagcaggatgtgttccaggaggtgcaggccctggtgaccagctgcattgatggcttcaacgtgtgcatctttgcctacggccagacaggagctgggaagacctacaccatggagggcacagctgagaaccctggcatcaaccagagggccctgcagctgctcttcagcgaggtgcaggagaaggccagtgactgggagtacaccatcaccgtgtctgctgctgagatctacaatgaggtgctgcgggacctgctgggcaaggagccccaggagaagctggagatccggctgtgcccagatggcagcggccagctgtatgtgcccggcctgacagagttccaggtgcagagcgtggatgacatcaacaaggtgtttgaatttggccacaccaacagaaccacagagttcaccaacctgaatgagcacagcagccgcagccacgccctgctgattgtgacagtgcggggcgtggactgcagcacaggcctgcggaccaccgggaagctgaacctggtggacctggccggcagcgagcgggtgggcaagtctggagctgagggcagccggctgcgggaggcccagcacatcaacaagagcctgagcgccctgggagatgtgattgctgccctgcggagccggcagggccacgtgcccttcaggaacagcaagctgacctacctgctgcaggacagcctgagcggggacagcaagaccctgatggtggtgcaggtgtcccctgtggagaagaacaccagcgagaccctgtacagcctgaagtttgctgagcgggtgcgctctgtggagctgggccctggcctgcggcgggcagagctgggctcctggagcagccaggagcacctggagtgggagcccgcctgccagaccccccagcccagcgcccgggcccacagcgcccccagcagcggcaccagcagccggcccggcagcatccggaggaagctgcagcccagcgcctag

SEQ ID NO: 47617 - DNA, 2064 bp, Artificial Sequence
  derived and/or modified sequence
atggtggagaacgagcggctgcggcaggagatgcggcggtgcgaggcagagctgcaggaactcaggacaaagccagctggcccatgccccgggtgcgagcatagtcaggagtctgcccagcttagggataaactgagccagctccagcttgaaatggctgagtctaaagggatgctgtctgagctgaacctggaagtccagcagaaaaccgacagactggcagaagttgagctgcggctgaaggattgcttggccgaaaaagctcaggaagaggagaggctttctcggagactcagagactcacacgagacaattgcatcccttagagcccagtcgccccctgtgaagtacgttatcaagaccgtcgaggtcgaatcaagtaagactaagcaggctttgtctgagagtcaggctcgaaaccagcacctccaagagcaggtggcaatgcagaggcaggttctgaaggaaatggagcagcagttgcagagttcacatcaattgacagcccggctgcgagcccagatcgctatgtacgagtccgagcttgagagggctcacggccagatgcttgaagaaatgcagagtctggaagaagacaagaatagggcaatcgaagaggcgtttgcaagggcacaggtggaaatgaaggcagtccatgagaacttagccggggtaagaaccaacctgcttaccctgcagcccgccctgagaactctcacaaacgactataacggactaaagcgccaagtgcgggggttcccattgttgctacaggaggccctgagatcagttaaagccgagattgggcaagcgatcgaggaggtcaacagtaataatcaggagctgctcagaaaatataggcgcgaactccaactgaggaagaagtgccataatgaattagtgaggttgaaagggaacatccgtgttattgctcgagtccgaccagtgacaaaggaggacggcgagggacccgaggcaacgaacgccgttacatttgatgccgatgatgactctataatacacctgctgcacaagggtaagcccgtgtcattcgaactggacaaggtcttttctccccaggctagtcagcaggacgtattccaggaggttcaagccctggttacctcctgcatcgatggattcaatgtctgcattttcgcctatgggcaaaccggcgccggcaagacctataccatggaggggacggccgaaaacccaggtattaaccagcgggctctccagctcctgtttagcgaggtgcaggagaaggcgtcagattgggaatacaccatcacggtaagcgccgctgagatatataatgaagtgctgagagatttgctcggaaaggagccacaagaaaagcttgagattcgcctgtgtccggatggatcggggcagctctacgtccctggactgaccgagttccaagtgcagtcagtggatgacataaacaaggtgtttgaatttggccacaccaatcggactacagaattcactaatctcaatgagcacagctcgcgaagccacgcactgttgatcgtaaccgttaggggggtggactgttctaccggtctgaggactacaggaaagctcaatctggtggatttggctgggtcagagcgagttggcaaatccggcgctgaggggtctaggttgagggaggcccaacatatcaataagagtctgtccgcgctgggtgacgtgattgcagcccttcggagccggcagggccatgtgccattcagaaattccaaactaacttatctgcttcaagatagcctgagtggagacagcaagactttgatggtggtccaggtgtcacctgtagaaaaaaataccagcgagactctctattctcttaaattcgcagagcgggtgaggagtgttgagctgggcccaggactccgtcgtgccgagttgggaagctggtcgtcgcaagagcacctcgagtgggagccagcatgtcagaccccgcagccctctgcaagggcccactccgccccgagctcagggactagttcgagacctggatctatcagacggaagcttcagccctctgcatag

SEQ ID NO: 47618 - DNA, 2064 bp, Artificial Sequence
  derived and/or modified sequence
atggtggagaatgagaggctgcgacaggagatgcgaagatgcgaggctgaattgcaggaactgagaacaaagccagcaggcccatgccctggatgcgagcattcacaagaatcagcccaattgcgcgataagctatcccagctccagttggaaatggcagaaagtaaggggatgttaagcgaactaaatctcgaagtacagcagaagacagatcgtctagccgaggtcgagctgcgactgaaggattgtttggccgagaaggcccaggaggaggagcgcctgtcccgccgtctcagagactcacatgaaacaatcgccagtctgagagcccagtctccccctgtgaagtacgttatcaaaaccgtggaggtcgaatcttctaagacaaagcaggccctttcagaaagccaggcaaggaaccaacatttgcaggaacaggtggcaatgcagcgtcaggtactcaaagagatggagcagcagctccagagttcccatcagctaacagctaggctgagagcgcagatcgccatgtatgagagcgagctcgagcgggctcacggtcagatgttagaagaaatgcagtcactggaagaagataagaaccgcgcaatcgaggaagcatttgccagagcgcaggtggagatgaaggcagtccacgagaaccttgccggagtacggaccaatctgctgacacttcaaccagcattgcgaacgctgacgaacgactataatggattgaagaggcaggttagggggttccctctgttactgcaggaagccctgcgaagcgtgaaggccgagatcggccaggcgatcgaggaagtgaacagcaacaaccaggaactgctccggaaatacaggcgggaactgcagctgaggaagaagtgtcataacgagctggtgcggttaaagggcaacatacgcgtgattgcacgggtaaggccagtgacgaaggaggacggggaagggccagaggcaacaaacgccgtgaccttcgatgctgacgacgacagtattattcatctgctgcataaaggaaagccggtgagctttgaactggacaaagtgttttcaccgcaggccagccagcaagacgttttccaggaagtgcaggctttggtcacttcatgtatagacgggtttaacgtgtgtatttttgcctatggacagaccggggctggcaaaacatatactatggaaggcacagccgagaatccagggattaatcaacgcgcacttcagctactgttttcagaggtgcaggagaaagccagcgactgggagtacaccatcacagtgagtgccgctgagatttacaatgaggtgctccgggacctactggggaaggaaccacaagagaaacttgaaattagactatgtcccgatggatccggccaactctatgtcccaggcttgacagagtttcaggtccagtcagttgatgacatcaacaaagttttcgagttcggtcatacaaacaggaccactgaatttacaaatctgaatgaacacagttcacggtcccacgctctgctgattgtcaccgtgcggggagtggactgctcaactgggctgcggacaacagggaagttgaatctggtcgaccttgccggttctgagcgtgttgggaagtcaggggctgaggggtctcggctcagggaggcacagcacattaataagtcactgtccgcccttggcgacgtcattgcagctctgcggtccagacaaggccatgtcccatttcgcaacagtaaactgacatatctgctgcaggatagtctgagcggagactccaaaaccctgatggtcgtgcaggtgtctcccgtagagaaaaacacctctgaaaccctgtacagcctcaaattcgccgaaagagtccgcagcgtggaactgggcccaggactccggagagcagagttaggcagctggagctctcaggaacaccttgagtgggaacctgcctgtcagaccccccaaccaagcgcacgggcacatagcgctccttctagtggcactagcagtaggccaggctccattagacggaaattacaaccttctgcctag

SEQ ID NO: 47619 - DNA, 2064 bp, Artificial Sequence
  derived and/or modified sequence
atggtggagaatgagcgactccgtcaggaaatgagacgatgcgaggctgaactccaggaactcaggactaagcctgctggaccatgtccgggttgtgaacactctcaggaaagcgcccagctgcgcgataaactctcccagctccagttggagatggccgaaagtaaaggcatgctcagcgagctgaatttagaggttcagcagaaaactgaccggctggccgaagtggagctgcggctgaaagactgtctggccgagaaggcccaagaggaagagcgactaagccggaggctccgggactcacatgaaaccattgcatccttgagagctcagagtcctcccgtgaagtacgtcatcaagactgttgaggtggagtcctctaagaccaagcaggccttgagtgaaagccaggccagaaaccaacatctgcaagagcaggtggctatgcagcgacaagtactgaaggagatggagcaacagttacagagctcccatcagctcaccgctcggcttcgtgcgcagatagctatgtatgagtctgagctggaacgggcacatgggcagatgctggaagagatgcagtcactggaggaagataaaaatagggctatcgaggaggcgttcgcacgtgctcaggtagaaatgaaggctgttcatgagaacctggcaggtgtgcgcacaaacctgctgacccttcagccagccctgcggactctgaccaatgactacaatggtttgaaaagacaggtgaggggcttccccctgcttctgcaggaggcactgagaagcgtcaaagccgagatcggccaagccattgaagaggtcaattccaacaaccaggaacttctccgcaaatatagaagagaactgcagctcagaaaaaagtgtcacaacgagctggtcagattaaaaggcaacatacgagtcattgctcgggtccggcccgtcaccaaggaggacggcgagggcccagaagcaacgaatgctgtcacgttcgacgcggacgacgacagcatcatccatctgctgcataagggtaaacccgtgagctttgaactggacaaagtgttttctcctcaggccagtcagcaggacgtgttccaggaggttcaagcccttgtgacctcttgtattgatggtttcaatgtttgtatttttgcctacggtcagacaggggcgggtaagacctataccatggagggcacagccgagaatccagggattaatcagagggctctacagctcttgttctcagaggtccaggagaaggcatccgactgggaatacactatcactgtttccgcagcagagatttacaatgaggtcctcagagacttactggggaaggagccccaggaaaagttagaaatccggctatgtccggatggaagtggccagttgtacgtgcccggcttgaccgagttccaggtgcaatcagtggatgacattaacaaggtgttcgagtttggacacacaaaccggacaaccgagttcacgaacctaaatgaacacagctctagatctcacgcactgctgatagttaccgtgaggggcgtagactgctcgactggactgcgtacgacaggtaagctgaatcttgtcgacttagcagggtctgaaagagtgggaaagtcaggggctgaagggtcccggcttagagaagctcagcacatcaataagagcctgagtgctctgggagatgtcatcgctgcactgaggtcgagacaaggccacgtgccttttcggaattcaaagctcacatacctgctgcaggactctctttctggcgattcgaagactttgatggtcgttcaggtgtcaccagtcgagaaaaatactagcgagacactctacagccttaagttcgccgaacgcgtgcgatcagtggaactcggtcccggcctgcggcgcgccgagttgggctcatggtcgtcacaggagcatctcgagtgggagcccgcttgccagactccacagcccagtgcgagagcacactctgccccaagttccgggaccagcagtcgcccgggctccattcggcgcaaacttcaaccaagtgcctag

SEQ ID NO: 47620 - DNA, 2481 bp, Artificial Sequence
  derived and/or modified sequence
atggttcctagtcgcagaacctggaacctgggggctactccttcgctccgcggcttatggcgggtgggccgggcgccagagcccgaacccggaatggccaggccggcaccagccccagcgagccccgctgctcgccctttcccccacacaggccccggccgactgagaaccggtcggggcaaagatacacccgtgtgcggagatgaggattcaagtgctaggtctgcagcccgaccggctctggcacagtgccgcgccctttctgtagactgggcaggccccggttccccacacggattgtatctcacgctgcaggtcgagcatctgaaggagaaactgatctcgcaagcccaagaagtcagtagattaaggagcgagctcgggggaacggatctcgagaaacaccgggacttactcatggtagagaatgagcgcctgcgtcaagagatgagacggtgtgaggccgagcttcaggagctgcggacaaagccagcagggccttgcccgggttgtgaacattcgcaggagagcgcacaacttagggataaactgtctcaactgcagctcgagatggctgaaagcaagggcatgttgagtgagctgaacctcgaagttcaacagaaaaccgaccgcctggccgaggtagaactgcgactgaaagattgtttggctgaaaaggctcaggaagaagaaagactcagtcgccgcctgcgagactcgcacgaaaccatagcctccctgcgggcgcagagcccaccagtgaaatatgtgattaagaccgtcgaggtggagtcaagcaaaaccaaacaggccctgtctgagtcccaggcacggaatcagcacctccaggaacaggtcgcgatgcagagacaggtgctgaaagagatggagcagcagctgcagtcctctcatcagctgaccgcaaggctccgcgcccagatcgccatgtacgaatcagaactcgaacgagcccacggacagatgcttgaggagatgcagtccctggaagaagacaagaacagggcaatcgaggaagcattcgctagggcccaggtcgaaatgaaagctgtgcacgagaatctcgccggagtgcgaaccaatcttcttacacttcagccggccctgcgcaccctcacgaacgattacaatggcttaaagcgacaggtgagaggtttccccctgctgctgcaggaagctctcagaagcgttaaagccgaaatcggtcaagccatcgaggaagtgaatagcaacaatcaggagttactaaggaaataccgacgggaactccagctccgcaaaaagtgccacaatgaactagttagacttaaaggtaatatacgagtaatagccagggttaggccagtgaccaaggaggacggggagggtccagaagctacaaacgcagtaacattcgatgccgatgatgactcgatcatccacctgctgcataaaggcaagcccgtgtccttcgaactggacaaggtgttttctcctcaagcctctcagcaagatgtcttccaagaagtccaggcgctcgttacgagctgtattgatgggtttaacgtctgcatatttgcctacggtcagaccggcgctgggaagacatataccatggaaggcacagccgagaatccaggtatcaatcagcgggccctccagctgttattctcagaagtacaggagaaggcaagcgactgggaatacacaattactgtgtctgccgccgaaatttataatgaagtcctgcgcgacctcctgggaaaggagccacaggagaaactggaaatacggctctgtccagatgggtctgggcagctgtacgtgcctggattaactgaatttcaggtgcagagtgtagacgatattaacaaggtatttgagttcgggcataccaacagaactacagagtttacaaatctcaacgagcactcatccaggtcccacgccctgctcattgttaccgtcaggggcgtggattgtagtacaggcctccgaacaaccggcaaactcaacctggtggaccttgccggctccgagagagtgggaaaatcaggagctgagggatctcggctgcgagaggcgcagcacataaacaagtctctctctgcacttggtgatgtgatagcggctttgcggtccaggcagggccatgttccattccgtaattccaagctcacctatctgctacaggactctttgagcggggattccaagactctgatggtggtccaggtctctcccgtggagaaaaatacctcagagacactctactcactcaagttcgccgagcgtgtgaggtctgtggagcttgggccaggtctgaggcgagcagagcttggctcctggtcctctcaggagcacttggaatgggagcccgcgtgtcagactccgcagccctccgcccgtgcccattcggcaccttcaagtggtacaagcagcaggccagggagtatccgacgtaagctgcaaccctcagcctag

SEQ ID NO: 47621 - DNA, 3391 bp, Artificial Sequence
  derived and/or modified sequence
gcccgagttaatcatttcctgtggaaagtgtgcgggaggggcgcgagcgggctggccgaggaggaggcggcggcgtggagctgcctcctgccggcgggccgggccgggccgagccccgggcgctgcggcgacgcctggatcctgcctccgccaggccggctgcctggtgccccgaggaggctgctgagccccaggccatggtcccctctcgcaggacgtggaacctgggagccacgccctcgctgcggggcctgtggagagtgggccgggccccggagcccgagccggggatggctcgccccgccccagccccagccagcccggccgcccgccctttcccacacaccggcccggggaggttgagaactgggcgtggaaaagataccccagtctgcggtgacgaggactccagtgcccgaagtgcagctcgcccagccctagctcagtgccgagcccttagcgtggactgggctggccccggaagcccccacgggctctacctgaccctgcaggtagaacacctgaaggagaagctcattagccaggcccaggaagtgagccgactgcgatctgagctggggggcaccgacttggagaagcaccgggacctgctgatggtggagaatgagcgactgaggcaggagatgcggcgctgtgaggccgagctgcaagagctgcgcacaaagccagcaggtccctgcccaggttgtgagcacagccaggagagcgcccagctccgtgacaagctgtcccagctgcagctggagatggcggaaagcaaaggcatgctgtcagagctgaacctagaggtgcagcagaagaccgaccggctggctgaggtggagctgcgactcaaggactgcctggctgagaaggcacaggaggaggagcggcttagtcggcgcctgcgtgacagccacgagaccattgccagcctgcgggcccagtccccacctgtcaagtatgtcatcaagacagtggaggtggagtcgtccaagaccaagcaggccctcagcgagtcccaggcccggaaccagcacctgcaggagcaggtggctatgcagaggcaggtgctgaaggagatggaacagcagctgcagagctcacaccagctgaccgcgcggctccgggcgcagattgccatgtacgagtcagagctggagcgggcccatgggcagatgctggaggagatgcagtccctggaagaggacaagaaccgggccattgaggaggcctttgccagagcccaggtggagatgaaggctgtgcacgagaatctagcaggcgtccggaccaacttgctgaccttgcagccggcactgcggaccctcaccaacgactacaatgggctcaagcggcaggtgcgcggcttcccactgctgctgcaggaggccctcaggagtgtcaaggccgagataggccaggccatcgaggaggtcaacagcaacaaccaggagctgctgcgcaagtaccgccgcgagctgcagctgcgtaagaagtgccacaatgagctcgtgcggctgaaagggaacatccgagtgattgctcgtgtccggccagtcaccaaagaggatggggaaggacctgaggccaccaatgctgtgactttcgatgccgacgacgactccatcatccacctgctgcacaagggcaagcctgtgtccttcgagctggacaaggtcttctccccacaggcctcgcagcaggacgtgttccaggaggtgcaggccctggtcacctcttgcattgatggcttcaatgtctgcatctttgcgtacggccagacgggcgccggcaagacgtacacgatggaggggaccgctgagaacccaggtatcaaccagcgggccctgcagctgctcttctccgaggtgcaggagaaggcgtctgactgggagtacaccatcaccgtcagcgctgcggagatctacaatgaggtcctcagggacctgctagggaaagagcctcaggaaaaactggagatccggctgtgcccagacggcagtgggcagctgtatgtaccagggctgactgagttccaagtgcagagcgtggacgacatcaacaaggtgtttgagtttggccacactaatcgcacgaccgagttcaccaacctgaacgagcacagctcccgctcgcacgcgctgctcatcgtgacggtgcgaggcgtggactgcagcacaggcctccgcaccacggggaagctgaacctggtggacttggctggctcggagcgcgtgggcaagtcgggggccgagggcagccgcctgcgggaggcgcagcacatcaacaagtcgctgtcggctctgggggacgtcattgctgccctgcgctcccgccagggccacgtgcccttccgcaactccaagctcacctacctgctgcaggattcgcttagtggtgacagcaagaccctcatggtggtacaggtgtcccccgtggagaagaacactagcgagacgctctattccctcaagtttgctgagagggtgcgctctgtggagctggggcctgggctacgcagggcagagcttgggtcctggtcaagccaggagcatctagagtgggagccggcttgtcagacgccacagccctcggcacgggcccactcagcccccagctctgggaccagtagccgccctggatccatccggaggaagctgcagccctcggcctgacggctggggctgcagagtctctagggaagtcgcggccactgcctgtgtgacggatgtgaccccgctgggcctgaagctgggccctcactggcctgtccctgctgcagcgccaggacccccggaggtagaggcgagagtggaggctcttcttctgccccgtctcccctcaaagatgagaaacatgttcagaaggaaacggtgtctctcggctgtggctctgagtgcaaattgcatgggcggaaaggcgggggtggctgctcttcctggcaggcctgggccatcagcgaactgggccccgtgaggagggcgggagtgtggaggagggtgggcctctcacccaggctttctcggcccctctcctcagcttgcagagctggccagccccctccttagggggtgggcgaggagcctctgggcagacccaagaaccatggggactggggtgggttggtggcaccaatggcagccctccccgcccctctccttcaaggagggttcccgcagctggggggtgtgcggaggcgcatggcctcccgccacggggccgtgctgtgtttatggctggcagaggcagccagcgggtgggggattctgctgctcgctcacctgcctggctcgctggtctctcgaattttcttccctctgaaatcctatttaagaacttttggaagcttagccatttttacttattaaaataaaagaagcctttttac

SEQ ID NO: 47622 - DNA, 3018 bp, Artificial Sequence
  derived and/or modified sequence
agctgggcagctgtaggaagtcacttcctctctgagccttcacttcccagtctctaaactggggctcacaaatgtcgcattgcagtttgggggtggatctgttgtaagaatggacagaaaaaagatggtcaactgtaatgtgtggtgcatcgtgagctgtcactcccgtgtgccctggtctcctgctggcctcactgtggtttgactcagacttggactttcctggaattctgaactttgcctctctaagcaaagcccgccagggggtacactctgccttgttttccatggtgccgtgtttccagccctatccaccactggcttctgatcggctgctttctcacactgctgttcctgcaaggctgtgtggccccatggttaagggtgagggttctgcaagggtcagccagatgcgagttccggtcctaggtccaccacttactggtcaggtgacctcaagtagaacacctgaaggagaagctcattagccaggcccaggaagtgagccgactgcgatctgagctggggggcaccgacttggagaagcaccgggacctgctgatggtggagaatgagcgactgaggcaggagatgcggcgctgtgaggccgagctgcaagagctgcgcacaaagccagcaggtccctgcccaggttgtgagcacagccaggagagcgcccagctccgtgacaagctgtcccagctgcagctggagatggcggaaagcaaaggcatgctgtcagagctgaacctagaggtgcagcagaagaccgaccggctggctgaggtggagctgcgactcaaggactgcctggctgagaaggcacaggaggaggagcggcttagtcggcgcctgcgtgacagccacgagaccattgccagcctgcgggcccagtccccacctgtcaagtatgtcatcaagacagtggaggtggagtcgtccaagaccaagcaggccctcagcgagtcccaggcccggaaccagcacctgcaggagcaggtggctatgcagaggcaggtgctgaaggagatggaacagcagctgcagagctcacaccagctgaccgcgcggctccgggcgcagattgccatgtacgagtcagagctggagcgggcccatgggcagatgctggaggagatgcagtccctggaagaggacaagaaccgggccattgaggaggcctttgccagagcccaggtggagatgaaggctgtgcacgagaatctagcaggcgtccggaccaacttgctgaccttgcagccggcactgcggaccctcaccaacgactacaatgggctcaagcggcaggtgcgcggcttcccactgctgctgcaggaggccctcaggagtgtcaaggccgagataggccaggccatcgaggaggtcaacagcaacaaccaggagctgctgcgcaagtaccgccgcgagctgcagctgcgtaagaagtgccacaatgagctcgtgcggctgaaagggaacatccgagtgattgctcgtgtccggccagtcaccaaagaggatggggaaggacctgaggccaccaatgctgtgactttcgatgccgacgacgactccatcatccacctgctgcacaagggcaagcctgtgtccttcgagctggacaaggtcttctccccacaggcctcgcagcaggacgaggtgcaggccctggtcacctcttgcattgatggcttcaatgtctgcatctttgcgtacggccagacgggcgccggcaagacgtacacgatggaggggaccgctgagaacccaggtatcaaccagcgggccctgcagctgctcttctccgaggtgcaggagaaggcgtctgactgggagtacaccatcaccgtcagcgctgcggagatctacaatgaggtcctcagggacctgctagggaaagagcctcaggaaaaactggagatccggctgtgcccagacggcagtgggcagctgtatgtaccagggctgactgagttccaagtgcagagcgtggacgacatcaacaaggtgtttgagtttggccacactaatcgcacgaccgagttcaccaacctgaacgagcacagctcccgctcgcacgcgctgctcatcgtgacggtgcgaggcgtggactgcagcacaggcctccgcaccacggggaagctgaacctggtggacttggctggctcggagcgcgtgggcaagtcgggggccgagggcagccgcctgcgggaggcgcagcacatcaacaagtcgctgtcggctctgggggacgtcattgctgccctgcgctcccgccagggccacgtgcccttccgcaactccaagctcacctacctgctgcaggattcgcttagtggtgacagcaagaccctcatggtggtacaggtgtcccccgtggagaagaacactagcgagacgctctattccctcaagtttgctgagagggtgcgctctgtggagctggggcctgggctacgcagggcagagcttgggtcctggtcaagccaggagcatctagagtgggagccggcttgtcagacgccacagccctcggcacgggcccactcagcccccagctctgggaccagtagccgccctggatccatccggaggaagctgcagccctcggcctgacggctggggctgcagagtctctagggaagtcgcggccactgcctgtgtgacggatgtgaccccgctgggcctgaagctgggccctcactggcctgtccctgctgcagcgccaggacccccggaggtagaggcgagagtggaggctcttcttctgccccgtctcccctcaaagatgagaaacatgttcagaaggaaacggtgtctctcggctgtggctctgagtgcaaattgcatgggcggaaaggcgggggtggctgctcttcctggcaggcctgggccatcagcgaactgggccccgtgaggagggcgggagtgtggaggagggtgggcctctcacccaggctttctcggcccctctcctcagcttgcagagctggccagccccctccttagggggtgggc

SEQ ID NO: 47623 - DNA, 2481 bp, Artificial Sequence
  derived and/or modified sequence
atggtgcccagcaggaggacctggaacctgggcgccacccccagcctgcggggcctgtggagggtgggccgggcccctgagcctgagcccggcatggcccggcctgccccagccccagccagccctgctgcccggcccttcccccacacaggccctggccgcctgaggacaggccggggcaaggacacccctgtgtgtggagatgaggacagcagcgcccggtctgctgcccggcctgccctggcccagtgccgggccctgtctgtggactgggccggccctggcagcccccacggcctgtacctgaccctgcaggtggagcacctgaaggagaagctgatcagccaggcccaggaggtgtcccggctgcggtctgagctgggcggcacagacctggagaagcaccgggacctgctgatggtggagaatgaaaggctgcggcaggagatgagaagatgtgaggccgagctgcaggagctgcggaccaagccagctggcccctgccccggctgtgagcacagccaggagagcgcccagctgcgggacaagctgagccagctgcagctggagatggccgagagcaagggcatgctgtctgagctgaacctggaggtgcagcagaagacagaccggctggccgaggtggagctgcggctgaaggactgcctggccgagaaggcccaggaggaggagcggctgagccggcggctgcgggacagccatgagaccatcgccagcctgcgggcccagagcccccctgtgaagtatgtgatcaagacagtggaggtggagagcagcaagaccaagcaggccctgtctgagagccaggccaggaaccagcacctgcaggagcaggtggccatgcagaggcaggtgctgaaggagatggagcagcagctgcagagcagccaccagctgacagcccggctgcgggcccagatcgccatgtatgaaagtgagctggagcgggcccacggccagatgctggaggagatgcagagcctggaggaggacaagaacagagccatcgaggaggcctttgcccgggcccaggtggagatgaaggctgtgcatgagaacctggccggcgtgaggaccaacctgctgaccctgcagcctgccctgcggaccctgaccaatgactacaacggcctgaagaggcaggtgcggggcttccccctgctgctgcaggaggccctgcggtctgtgaaggccgagatcggccaggccatcgaggaggtgaacagcaacaaccaggagctgctgaggaagtaccgccgggagctgcagctgaggaagaagtgccacaatgagctggtgcggctgaagggcaacatccgggtgattgcccgggtgcggcctgtgaccaaggaggatggagagggccctgaggccaccaatgctgtgacctttgatgctgatgatgacagcatcatccacctgctgcacaagggcaagcctgtgtcctttgagctggacaaggtgttcagcccccaggccagccagcaggatgtgttccaggaggtgcaggccctggtgaccagctgcattgatggcttcaacgtgtgcatctttgcctacggccagacaggagctgggaagacctacaccatggagggcacagcagaaaatcctggcatcaaccagagggccctgcagctgctcttcagcgaggtgcaggagaaggccagtgactgggagtacaccatcaccgtgtctgctgctgagatctacaatgaggtgctgcgggacctgctgggcaaggagccccaggagaagctggagatccggctgtgcccagatggcagcggccagctgtatgtgcccggcctgacagagttccaggtgcagagcgtggatgacatcaacaaggtgtttgaatttggccacaccaacagaaccacagagttcaccaacctgaatgagcacagcagccgcagccacgccctgctgattgtgacagtgcggggcgtggactgcagcacaggcctgcggaccaccgggaagctgaacctggtggacctggccggcagcgagcgggtgggcaagagcggggctgagggcagccggctgcgggaggcccagcacatcaacaagagcctgagcgccctgggagatgtgattgctgccctgcggagccggcagggccacgtgcccttcaggaacagcaagctgacctacctgctgcaggacagcctgagcggggacagcaagaccctgatggtggtgcaggtgtcccctgtggagaagaacaccagcgagaccctgtacagcctgaagtttgctgagcgggtgcgctctgtggagctgggccctggcctgcggcgggcagagctgggctcctggagcagccaggagcacctggagtgggagcccgcctgccagaccccccagcccagcgcccgggcccacagcgcccccagcagcggcaccagcagcaggcctggcagcatccggaggaagctgcagcccagcgcctag

SEQ ID NO: 47624 - DNA, 2064 bp, Artificial Sequence
  derived and/or modified sequence
atggtggagaacgagcggctgcggcaggagatgcggcggtgcgaggcggagctgcaggagttaaggacaaaacccgccggcccatgtcctggttgcgagcatagccaggaatcagctcagctccgtgataagttaagtcaattacaattggagatggcggagtctaaagggatgttgtcagagcttaacttggaggtgcagcagaagaccgatcgcttggcagaagtcgagctgaggctgaaagactgccttgctgaaaaggcccaggaggaggaacgcctgtctaggcggttacgggacagtcacgagacaatagcttccttgagggctcagagtccacctgtgaaatacgtgattaaaactgttgaggtagagtcaagtaagactaaacaagccctgtctgaatctcaggcgagaaaccagcacctccaggagcaagtggcgatgcaaagacaggtcctcaaagagatggaacaacagttacagagctcgcaccagctgacagcccgactgagggcacaaatcgcgatgtacgagagtgaattagagagggcccacggccagatgctagaggaaatgcaaagtctagaggaggataagaaccgagctatcgaggaggccttcgcaagggcccaagttgagatgaaagccgtccatgagaaccttgcgggcgtgaggaccaaccttcttactcttcagcctgcacttagaacactgactaacgactacaatggactgaagaggcaggttaggggcttccctctacttcttcaagaggctctgcgtagtgtgaaggccgagatcggtcaggccatagaggaagtgaattccaataatcaggagctcctaaggaaatatcgcagagagttacaactgcgaaagaagtgccacaacgagctggtgcgacttaaaggtaatatccgggtaatagctagggtgcgaccagtcaccaaagaggacggcgaaggtcccgaggccactaatgcagtcacctttgacgcagacgacgattctataatacacctgttgcataaggggaagcctgtgtctttcgaactagacaaagtgttctccccccaggcaagtcagcaggatgtgtttcaggaagtgcaggccctcgtcacatcctgtatagacgggttcaacgtatgtatcttcgcatatgggcagacaggcgctggcaagacctacaccatggaggggacagcagagaatccagggattaaccagcgtgcccttcaactactgtttagtgaggtccaagagaaggcctcggactgggaatatacaatcacagtgtcagcagcagaaatatacaatgaagttctgcgcgatttactgggaaaagagccacaggagaagctcgagattagactctgcccagatgggtctgggcagttgtacgtaccaggactcacagagtttcaggtgcagtccgtggacgatataaacaaggttttcgaattcggccatacgaaccgcaccaccgagttcaccaatctcaacgaacattcctcaaggagccacgcactgctgattgtaacggtacgaggtgttgactgttcaactgggctgcgaaccaccgggaagctgaacttagttgacctggctgggagtgagcgagtgggcaaatccggtgccgagggttcgcggctccgggaagcacagcatatcaacaagtcactgagtgccctgggtgatgtgatcgctgccctgcgctccaggcagggacacgtcccgttccggaactccaagctgacgtatctgctgcaggactctctcagtggtgattctaagactctcatggtcgtacaggtctccccagtggagaagaatacgagcgaaacactttattccctgaaatttgccgaaagagtgcggtccgtagaactggggcccggccttcgccgcgcagagctcgggtcttggtcgtcccaagagcatctggagtgggagcccgcctgccaaacaccccagccttcagctcgtgcccattccgcaccatcgagcggcacatcttctcggcctggcagtatccgacgcaagcttcagccctccgcatag

SEQ ID NO: 47625 - DNA, 2481 bp, Artificial Sequence
  derived and/or modified sequence
atggtgcccagccggcggacctggaacctgggcgccacccccagcctcagaggtttatggcgagttggcagagccccagaaccagaacctggtatggctagacccgcccccgccccggcctcacccgcggccaggcccttcccacataccggccctggtaggctccgtacaggccgcggcaaagacacccctgtgtgtggcgacgaggattccagcgccagatctgctgcccgtcccgctttagcacaatgcagggcactgagtgttgactgggctgggccaggctcacctcacgggctgtaccttactcttcaggtggagcacctgaaagagaaactgatttcgcaagcacaggaagtgtcgaggctgagaagtgagctcggaggtacagacctcgagaaacatagggatctgctcatggttgaaaatgaaaggttgcgtcaggaaatgagacggtgtgaggctgagcttcaggagcttcgcactaaacctgcgggcccctgccctggatgcgaacatagccaagaatctgcacagctgagagacaagcttagtcagctccaactcgaaatggctgaaagcaaaggcatgctatccgagctgaacttagaagtacagcagaaaactgatcgcctcgccgaggtagagctgaggttgaaggactgtctcgctgaaaaggcccaggaggaagaacgcctgagccgccggcttagggattcacacgagaccatcgccagtctgcgcgcccagtcacctcctgtaaaatacgtcatcaagactgtggaggttgagagtagcaagactaagcaggctctcagcgaatctcaagctagaaaccagcacctgcaagagcaggtggccatgcagcgccaggtgctaaaggaaatggagcagcagctgcagagtagccaccaactaaccgcacgcctgagagctcagatagcaatgtacgaatccgagttagagcgtgcccatgggcagatgttagaagagatgcagtcattggaagaagataaaaaccgggcaatcgaggaggcttttgcacgggcccaggtcgagatgaaggccgtccacgagaacctcgctggggtaaggactaacttgctgaccttacagccagcccttagaacactcaccaatgactacaacggcctcaaaagacaggtgaggggcttcccattgctgcttcaggaagcactccgatcggtaaaagctgaaatagggcaagctattgaagaagtaaactctaataaccaggaactgctccggaaatacaggagggagttacaactccggaagaagtgccataatgagcttgtgcgtctgaaaggaaatatccgcgttatcgccagagtccgcccagttacgaaagaagatggggaaggtccagaggccactaatgcggtgacattcgatgcagatgatgactcaattatccacctactgcataaaggtaaacctgtatcatttgaattggacaaagtgttttcacctcaggcgagtcagcaggatgtctttcaagaggtccaggctctggtcacctcctgtatcgatggcttcaacgtgtgcatcttcgcctatggacaaaccggcgccgggaaaacatacaccatggaaggaacagccgaaaatccaggcattaaccagagagctctgcagctgctcttctccgaagtgcaggagaaagcctccgattgggaatatacaattacggtctccgccgcggagatttataacgaggtgctccgagatctgctggggaaagaaccccaggagaagctggagatacgtctctgccctgatgggagtggccagctgtatgtcccggggttaacagaattccaggtgcaatcagtggacgatatcaataaagtgttcgagtttgggcacaccaaccgcaccaccgaatttaccaacctcaacgagcactcctccaggagccacgcactgctcatagtaaccgttcgcggagtggactgttcaacaggcctccgaactactggaaagctcaacttggtggacctggcaggaagtgagagggtcggtaaaagcggcgccgaaggtagcagactgagggaggctcagcatataaataagagcctgtctgccttaggagacgtaatcgcagcactgagaagccgccagggtcacgtgcctttccggaattctaaattgacgtatctgctgcaagacagcctctctggagattctaagaccctcatggtggttcaagtatctcccgtggagaagaatacctcagagaccctatattcactgaaatttgccgaaagagttaggtccgtggaactcgggcctggtttaagacgcgcagaactgggctcatggtcctctcaggagcaccttgagtgggagcctgcctgtcagactccccaaccctccgcacgtgcacacagcgcgccttctagtggcacaagcagccgacccggctccatcagacggaagctgcagcctagtgcatag

SEQ ID NO: 47626 - DNA, 2064 bp, Artificial Sequence
  derived and/or modified sequence
atggtggagaatgaacgcctgcgccaagagatgcgtagatgtgaggctgaactgcaggaactgcgtacaaagccagccggaccatgcccaggctgtgagcattctcaggaatccgcccaactgagggacaagttatcccagctgcagttagaaatggccgagagcaagggaatgctgagcgaactgaacctcgaagtccaacagaaaaccgaccgactagccgaggtggagcttaggcttaaggactgcctggctgagaaagcccaagaggaggaaagattgtcccggagattacgggatagtcatgagacaatcgcctccctacgcgcacagagtccacccgttaagtatgttattaagaccgttgaagtcgagtcatccaagaccaagcaagccctgtcggagagtcaagcacgaaaccagcaccttcaagagcaggtggccatgcaacggcaagtcctgaaggaaatggagcagcagttgcaaagttcccatcagctgacggcaagactccgagcccagattgccatgtacgagtcggagttagagcgcgcacacggacagatgctggaggaaatgcagtctctggaggaggacaagaacagagcaatcgaagaggctttcgctagggctcaggtagagatgaaagccgtgcacgagaacttagcgggagttcggactaatcttttgacactgcaacccgctttgagaacactcaccaatgattataatggcctgaagcggcaggtacgaggcttcccactactcctgcaggaagccttaaggagcgttaaggctgaaatcgggcaggctattgaggaagtgaatagcaataatcaggaattacttagaaagtacagacgcgagctgcaactcagaaaaaagtgccataatgagctggtgaggttaaaaggcaacatcagggttatcgcccgtgttaggccagttacaaaagaagatggcgaaggacctgaggcaacgaacgctgtcacatttgacgccgatgatgatagcatcatacatctgctgcacaaaggaaagccagtgtcttttgaactggataaggtgttttcacctcaggcgtctcagcaggatgtgttccaggaggtgcaggcactggtgacaagctgtatcgacggctttaacgtttgcatattcgcatatggacaaacgggagccggaaagacttataccatggaaggcacggcggagaatcccggtatcaatcagagagctctgcaacttcttttctccgaggtgcaggaaaaggctagcgactgggaatacacaatcacggtttcagctgcagaaatctacaatgaagtactgagggatctgctggggaaggaaccacaggaaaaattggagatcagattgtgtcccgacggctccggacagttatacgtccctggtctgacagagtttcaagtgcagtccgtggacgacattaataaggtctttgagtttggacacacaaaccgaactacagaatttaccaacctcaacgagcattcaagtagatcacacgcgctattgatcgttaccgtcaggggcgtagactgcagcaccggcctgagaaccacaggcaaactcaatctcgtcgacctggcgggttctgaaagggtaggaaaaagcggggctgagggttcgagactccgcgaggcccagcatatcaacaaaagcctctcagcactcggggatgtcattgccgcacttagatcacgacagggccacgtgccattccgcaactccaagttaacatatttactgcaggacagcctgagtggcgacagcaaaactctgatggtcgtacaggtgagtcccgtggagaaaaatacaagtgagacactatatagcctgaagttcgcagagcgggttcgcagcgtggagctcggtcctggcctgagaagggccgaactgggctcttggtcctcgcaggaacacctggaatgggaaccggcatgccaaaccccccaaccctcagccagggcccattctgcacctagttctggcacctctagtcgaccgggaagcattcgcagaaagctccagccctcggcctag

SEQ ID NO: 47627 - DNA, 2481 bp, Artificial Sequence
  derived and/or modified sequence
atggtaccttcccggagaacctggaatctgggggctaccccaagcctgaggggattgtggcgggttggacgtgcccctgaacccgagcccggaatggcccgtccagctcctgctccagccagccctgcagctagacctttccctcacaccggccctggaaggctccgcaccggccgaggtaaagatactcctgtgtgcggcgatgaggattcaagcgcacgttccgctgccagaccagccctggctcagtgtcgggcactcagcgtcgactgggctggtcccggttctcctcacggcttgtatctaacactccaagtcgagcaccttaaggaaaagctgatcagccaagcacaggaagtctctaggctccggtccgaactaggagggactgatttagaaaaacaccgcgatctgttgatggttgagaatgaaagactgagacaggagatgagaagatgtgaggcagaactgcaggagctgcggaccaaacccgctggtccttgccccggatgtgaacactcacaagagtctgcccaactgcgggacaagctctcacagttgcaactggagatggccgagagcaaagggatgttgtccgagctgaacctggaggtgcaacaaaagacagatcgcctggctgaagtggagttgcggctaaaggattgtctcgccgaaaaggcccaggaggaagaacgattgtctaggcgcctgcgtgactcacatgaaacaatcgcatccctcagggctcagtcacctccagtgaaatacgtcatcaaaaccgtggaggtggaatccagcaaaaccaagcaggctctgagcgaaagccaggcgagaaatcaacatctgcaagagcaggtggcaatgcaaaggcaggtattaaaggaaatggagcagcaacttcaaagttcccaccagctgacggccaggctgagagcgcagatcgcaatgtacgaaagtgaattggagcgagctcatggccagatgctggaagagatgcagagcctggaggaggacaagaatagagccattgaagaagcgttcgctagggcccaggtagagatgaaagcagtccatgagaacctcgccggagtccgaactaacctcctcacacttcaacctgctttgcgaaccctgaccaatgactataatggcctgaagcgccaggtgcgcggtttccctctgcttctgcaggaagccttgcgcagtgttaaagctgaaatcggccaggccatcgaggaggtgaactccaacaaccaggagctgctcagaaagtaccgcagggaattacagttacgcaagaagtgccacaatgaactggtgagactgaagggtaatatcagggtgatcgctagagtgcgccctgtaacgaaggaagatggggagggaccagaggcaactaatgctgtcacattcgatgccgatgacgactccatcatccatctgttgcacaaggggaagcctgtgtccttcgagctggacaaggttttcagcccccaggcaagccagcaggatgtattccaggaggtgcaggccctggtcacaagctgcatcgacgggtttaacgtgtgtatattcgcctacgggcaaactggcgctggaaaaacatatactatggaaggtactgccgaaaaccctggaataaaccaaagagcgctgcagctactgttttccgaggtgcaggaaaaggcaagtgattgggaatacaccattacggtgtcagcagcagagatatataatgaggtgctgcgggatctgcttggaaaggaaccgcaggaaaaactcgaaattcggttgtgtcccgacggcagcggtcaattatatgtgccgggactgacagaattccaggtccagagcgtggatgacataaacaaagtatttgagtttggtcataccaaccgtacaacagaatttactaaccttaatgagcactcatcccggtcacacgccttgcttatcgtgacagttagaggtgtggactgcagtaccgggctacggactacgggaaaattaaacctggtggatctcgccggatcagagcgcgtgggaaagtctggtgccgagggatcccggctcagagaggctcagcacataaataaatccctttcagccctgggagacgtgattgccgcactccgatctcggcaagggcacgtgccctttagaaacagtaaactcacgtacctcctccaggacagcctctctggagatagtaagaccctcatggtggtccaagtgagtcctgtggagaagaatacctccgagacgctctacagtttgaagtttgccgagcgggtgagatccgtcgaactggggcctggcctgaggcgagctgagctgggaagctggtcatctcaggaacacctggagtgggaacccgcttgccagaccccacagccctctgcaagagctcactctgccccatccagcgggacatccagccggccagggtcaattcgcagaaaactgcaaccatctgcctag

SEQ ID NO: 47628 - DNA, 2481 bp, Artificial Sequence
  derived and/or modified sequence
atggtgcccagcagaagaacctggaacctgggcgccacccccagcctgagaggcctgtggagagtgggcagagcccccgagcccgagcccggcatggccagacccgcccccgcccccgccagccccgccgccagacccttcccccacaccggccccggcagactgagaaccggcagaggcaaggacacccccgtgtgcggcgacgaggacagcagcgccagaagcgccgccagacccgccctggcccagtgcagagccctgagcgtggactgggccggccccggcagcccccacggcctgtacctgaccctgcaggtggagcacctgaaggagaagctgatcagccaggcccaggaggtgagcagactgagaagcgagctgggcggcaccgacctggagaagcacagagacctgctgatggtggagaacgagagactgagacaggagatgagaagatgcgaggccgagctgcaggagctgagaaccaagcccgccggcccctgccccggctgcgagcacagccaggagagcgcccagctgagagacaagctgagccagctgcagctggagatggccgagagcaagggcatgctgagcgagctgaacctggaggtgcagcagaagaccgacagactggccgaggtggagctgagactgaaggactgcctggccgagaaggcccaggaggaggagagactgagcagaagactgagagacagccacgagaccatcgccagcctgagagcccagagcccccccgtgaagtacgtgatcaagaccgtggaggtggagagcagcaagaccaagcaggccctgagcgagagccaggccagaaaccagcacctgcaggagcaggtggccatgcagagacaggtgctgaaggagatggagcagcagctgcagagcagccaccagctgaccgccagactgagagcccagatcgccatgtacgagagcgagctggagagagcccacggccagatgctggaggagatgcagagcctggaggaggacaagaacagagccatcgaggaggccttcgccagagcccaggtggagatgaaggccgtgcacgagaacctggccggcgtgagaaccaacctgctgaccctgcagcccgccctgagaaccctgaccaacgactacaacggcctgaagagacaggtgagaggcttccccctgctgctgcaggaggccctgagaagcgtgaaggccgagatcggccaggccatcgaggaggtgaacagcaacaaccaggagctgctgagaaagtacagaagagagctgcagctgagaaagaagtgccacaacgagctggtgagactgaagggcaacatcagagtgatcgccagagtgagacccgtgaccaaggaggacggcgagggccccgaggccaccaacgccgtgaccttcgacgccgacgacgacagcatcatccacctgctgcacaagggcaagcccgtgagcttcgagctggacaaggtgttcagcccccaggccagccagcaggacgtgttccaggaggtgcaggccctggtgaccagctgcatcgacggcttcaacgtgtgcatcttcgcctacggccagaccggcgccggcaagacctacaccatggagggcaccgccgagaaccccggcatcaaccagagagccctgcagctgctgttcagcgaggtgcaggagaaggccagcgactgggagtacaccatcaccgtgagcgccgccgagatctacaacgaggtgctgagagacctgctgggcaaggagccccaggagaagctggagatcagactgtgccccgacggcagcggccagctgtacgtgcccggcctgaccgagttccaggtgcagagcgtggacgacatcaacaaggtgttcgagttcggccacaccaacagaaccaccgagttcaccaacctgaacgagcacagcagcagaagccacgccctgctgatcgtgaccgtgagaggcgtggactgcagcaccggcctgagaaccaccggcaagctgaacctggtggacctggccggcagcgagagagtgggcaagagcggcgccgagggcagcagactgagagaggcccagcacatcaacaagagcctgagcgccctgggcgacgtgatcgccgccctgagaagcagacagggccacgtgcccttcagaaacagcaagctgacctacctgctgcaggacagcctgagcggcgacagcaagaccctgatggtggtgcaggtgagccccgtggagaagaacaccagcgagaccctgtacagcctgaagttcgccgagagagtgagaagcgtggagctgggccccggcctgagaagagccgagctgggcagctggagcagccaggagcacctggagtgggagcccgcctgccagaccccccagcccagcgccagagcccacagcgcccccagcagcggcaccagcagcagacccggcagcatcagaagaaagctgcagcccagcgcctag

SEQ ID NO: 47629 - protein, 387 aa, Artificial Sequence
  derived and/or modified sequence
MSLWLGAPVPDIPPDSAVELWKPGAQDASSQAQGGSSCILREEARMPHSAGGTAGVGLEAAEPTALLTRAEPPSEPTEIRPQKRKKGPAPKMLGNELCSVCGDKASGFHYNVLSCEGCKGFFRRSVIKGAHYICHSGGHCPMDTYMRRKCQECRLRKCRQAGMREECVLSEEQIRLKKLKRQEEEQAHATSLPPRASSPPQILPQLSPEQLGMIEKLVAAQQQCNRRSFSDRLRVTVMLLETSRRYNPGSESITFLKDFSYNREDFAKAGLQVEFINPIFEFSRAMNELQLNDAEFALLIAISIFSADRPNVQDQLQVERLQHTYVEALHAYVSIHHPHDRLMFPRMLMKLVSLRTLSSVHSEQVFALRLQDKKLPPLLSEIWDVHE

SEQ ID NO: 47630 - DNA, 1164 bp, Artificial Sequence
  derived and/or modified sequence
atgagcctgtggctgggcgcccccgtgcccgacatcccccccgacagcgccgtggagctgtggaagcccggcgcccaggacgccagcagccaggcccagggcggcagcagctgcatcctgagagaggaggccagaatgccccacagcgccggcggcaccgccggcgtgggcctggaggccgccgagcccaccgccctgctgaccagagccgagccccccagcgagcccaccgagatcagaccccagaagagaaagaagggccccgcccccaagatgctgggcaacgagctgtgcagcgtgtgcggcgacaaggccagcggcttccactacaacgtgctgagctgcgagggctgcaagggcttcttcagaagaagcgtgatcaagggcgcccactacatctgccacagcggcggccactgccccatggacacctacatgagaagaaagtgccaggagtgcagactgagaaagtgcagacaggccggcatgagagaggagtgcgtgctgagcgaggagcagatcagactgaagaagctgaagagacaggaggaggagcaggcccacgccaccagcctgccccccagagccagcagccccccccagatcctgccccagctgagccccgagcagctgggcatgatcgagaagctggtggccgcccagcagcagtgcaacagaagaagcttcagcgacagactgagagtgaccgtgatgctgctggagaccagcagaagatacaaccccggcagcgagagcatcaccttcctgaaggacttcagctacaacagagaggacttcgccaaggccggcctgcaggtggagttcatcaaccccatcttcgagttcagcagagccatgaacgagctgcagctgaacgacgccgagttcgccctgctgatcgccatcagcatcttcagcgccgacagacccaacgtgcaggaccagctgcaggtggagagactgcagcacacctacgtggaggccctgcacgcctacgtgagcatccaccacccccacgacagactgatgttccccagaatgctgatgaagctggtgagcctgagaaccctgagcagcgtgcacagcgagcaggtgttcgccctgagactgcaggacaagaagctgccccccctgctgagcgagatctgggacgtgcacgagtag

SEQ ID NO: 47631 - DNA, 609 bp, Artificial Sequence
  derived and/or modified sequence
atgagcctgtggctgggcgcccccgtgcccgacatcccccccgacagcgccgtggagctgtggaagcccggcgcccaggacgccagcagccaggcccagggcggcagcagctgcatcctgagagaggaggccagaatgccccacagcgccggcggcaccgccggcgtgggcctggaggccgccgagcccaccgccctgctgaccagagccgagccccccagcgagcccaccgagatcagaccccagaagagaaagaagggccccgcccccaagatgctgggcaacgagctgtgcagcgtgtgcggcgacaaggccagcggcttccactacaacgtgctgagctgcgagggctgcaagggcttcttcagaagaagcgtgatcaagggcgcccactacatctgccacagcggcggccactgccccatggacacctacatgagaagaaagtgccaggagtgcagactgagaaagtgcagacaggccggcatgagagaggagtgcgtgctgagcgaggagcagatcagactgaagaagctgaagagacaggaggaggagcaggcccacgccaccagcctgccccccagagccagcagccccccccagatctag

SEQ ID NO: 47632 - DNA, 585 bp, Artificial Sequence
  derived and/or modified sequence
atgagcctgtggctgggcgcccccgtgcccgacatcccccccgacagcgccgtggagctgtggaagcccggcgcccaggacgccagcagccaggcccagggcggcagcagctgcatcctgagagaggaggccagaatgccccacagcgccggcggcaccgccggcgtgggcctggaggccgccgagcccaccgccctgctgaccagagccgagccccccagcgagcccaccgagatcagaccccagaagagaaagaagggccccgcccccaagatgctgggcaacgagctgtgcagcgtgtgcggcgacaaggccagcggcttccactacaacgtgctgagctgcgagggctgcaagggcttcttcagaagaagcgtgatcaagggcgcccactacatctgccacagcggcggccactgccccatggacacctacatgagaagaaagtgccaggagtgcagactgagaaagtgcagacaggccggcatgagagaggagtgcgtgctgagcgaggagcagatcagactgaagaagctgaagagacaggaggaggagcaggcccacgccaccagcctgcccccctag

SEQ ID NO: 47633 - DNA, 618 bp, Artificial Sequence
  derived and/or modified sequence
atgagcctgtggctgggcgcccccgtgcccgacatcccccccgacagcgccgtggagctgtggaagcccggcgcccaggacgccagcagccaggcccagggcggcagcagctgcatcctgagagaggaggccagaatgccccacagcgccggcggcaccgccggcgtgggcctggaggccgccgagcccaccgccctgctgaccagagccgagccccccagcgagcccaccgagatcagaccccagaagagaaagaagggccccgcccccaagatgctgggcaacgagctgtgcagcgtgtgcggcgacaaggccagcggcttccactacaacgtgctgagctgcgagggctgcaagggcttcttcagaagaagcgtgatcaagggcgcccactacatctgccacagcggcggccactgccccatggacacctacatgagaagaaagtgccaggagtgcagactgagaaagtgcagacaggccggcatgagagaggagtgcgtgctgagcgaggagcagatcagactgaagaagctgaagagacaggaggaggagcaggcccacgccaccagcctgccccccagagccagcagccccccccagatcctgccccagtag

SEQ ID NO: 47634 - DNA, 1164 bp, Artificial Sequence
  derived and/or modified sequence
atgtcgctgtggctcggggcaccagttccagacataccacccgactcggctgtcgagctatggaagcccggggcccaggacgcttccagccaagcccaaggaggaagctcgtgtatccttcgcgaagaggcacgtatgccacacagcgccggggggaccgccggcgtcgggctggaggccgctgagcccacagcacttctgacccgagccgagccccctagtgagcctacagagattaggccccagaagcgtaagaaggggcctgccccaaaaatgctcggtaacgagctctgcagcgtctgcggggataaggcaagtggcttccactacaacgtcctgtcttgtgagggctgcaaaggctttttccgccgatcggtcatcaaaggcgcgcactacatctgccactctgggggccattgtccaatggacacttatatgaggcggaagtgccaggagtgcagactgaggaagtgcagacaagccgggatgcgggaagagtgtgttctatctgaggaacagataagattgaagaagctgaagcgccaggaagaagaacaggcacacgccacctcattgccaccgcgcgcctccagccctcctcagattctaccccagttgagtcctgagcagctcggcatgatagagaaacttgtcgccgcccagcagcagtgtaaccgacgcagtttttccgaccgcttgagagtgaccgtcatgcttctcgagactagtagaagatataatcctggcagcgaatccatcacattcctgaaggacttctcatacaatagagaggattttgcaaaggcaggcctccaggtagaatttattaatccgatcttcgagttctcaagagctatgaacgagctgcagctgaatgatgccgaatttgcactgttaatcgctatttctattttctctgccgacaggccaaacgtgcaagatcagctgcaagtagagcggctccagcacacctacgtcgaagctctccatgcatatgtgagcatccaccacccacatgatcgcctcatgtttcccagaatgctcatgaagctagtgtcactcagaactctgtcctccgtgcattctgaacaggtgtttgccttacggttgcaagacaagaagctgccccccctactgtcggaaatctgggatgttcacgaatag

SEQ ID NO: 47635 - DNA, 1164 bp, Artificial Sequence
  derived and/or modified sequence
atgtccctatggcttggtgcccccgttccagacattcctcccgactctgcagtggagttgtggaagccaggcgcacaagatgccagttcccaagctcagggcggctcaagctgtatcctcagggaggaggcccgaatgcctcacagcgctggcggcactgcaggcgttgggctggaggccgctgaacccaccgcactgctcactagagcagaacctccctcagaaccaaccgagataagacctcaaaagagaaagaaagggccggcacctaaaatgctcggcaacgagctgtgcagcgtgtgtggggacaaagcctcggggttccattacaacgtgttaagttgtgaaggatgcaaaggattctttcgcaggagcgttataaagggcgcccactatatttgtcattctggcggccattgccccatggatacatacatgagaagaaagtgtcaggagtgtagattgcgcaaatgccgccaggccggcatgagagaagaatgcgtcctatcagaggaacagatccgtctgaagaagcttaaacggcaggaggaagaacaagcccacgccaccagcttgccgcccagagcctcaagtccccctcagattctgccacagcttagcccagagcagttgggtatgattgagaaactcgtcgcagctcaacagcagtgtaacagacgcagtttctccgatcgtttgcgggtgaccgtcatgttactggagaccagtagaagatataatcctggcagcgagtcaataacgtttcttaaggacttttcatataaccgtgaggacttcgccaaggcaggcctgcaggttgagttcatcaatcctatattcgagtttagtcgggctatgaacgaactccagctaaacgacgccgagttcgctcttcttatcgcgatttcaattttttccgctgacagaccaaatgtgcaggaccaactgcaggttgagaggcttcaacacacctacgtggaggcgctgcacgcctatgtttccatccatcatcctcacgaccgcctgatgtttcctaggatgttaatgaagctggtgagtctaaggactctgagttctgtgcattctgagcaagtctttgcccttcggctccaagacaaaaagctgcctcctctgctatcagagatctgggacgtacatgaatag

SEQ ID NO: 47636 - DNA, 609 bp, Artificial Sequence
  derived and/or modified sequence
atgtccctctggctgggtgcccccgttccggatatcccccctgactcagctgtagaattgtggaagcctggggcccaagacgccagcagtcaggcacaaggtggttcttcctgcatcttacgtgaggaggctagaatgccccacagcgccggggggactgccggcgttggcctggaagccgcagaacctacagctcttctaacccgggcagagccccccagtgaacctacagaaatcagaccccagaagcgcaagaaggggccggctcccaaaatgcttgggaatgaactgtgcagcgtgtgtggtgataaggcgagcgggtttcactacaatgtgctcagctgtgaggggtgtaagggcttcttcaggaggtcagtgattaagggcgcacactacatctgccacagcggcggccactgtccgatggatacatatatgagaagaaaatgccaggaatgcagacttcgaaagtgtcggcaggcaggcatgagggaagagtgcgtactcagcgaggagcagatccgcctcaagaaactgaaaagacaggaagaagagcaggcccacgcaacctccctgcctccaagggctagttcccccccccagatttag

SEQ ID NO: 47637 - DNA, 585 bp, Artificial Sequence
  derived and/or modified sequence
atgagcctctggctgggtgcgcctgtgcccgacatcccacccgactcagctgtcgagctgtggaaaccaggggcacaggacgcgtccagccaggcccagggaggcagctcatgtatactgagggaggaagcacgcatgccgcacagcgccggagggactgctggagtaggccttgaagctgcggaacccaccgctcttctcaccagagccgagcctccatccgaaccgaccgagataaggccccagaagagaaagaagggaccagctccaaaaatgttgggcaatgaactgtgctccgtgtgcggggacaaggcgtccgggttccattataatgtgctgagctgcgagggctgcaaaggtttttttcgccggtctgtgattaagggggcgcactatatatgccactctgggggtcactgccccatggatacttatatgcggagaaaatgtcaggagtgccgccttagaaagtgccggcaggcgggaatgagggaagagtgcgtcctctccgaagagcagatcagactgaaaaagctcaagcgccaggaagaagagcaggcacacgcaaccagtctccctccctag

SEQ ID NO: 47638 - DNA, 618 bp, Artificial Sequence
  derived and/or modified sequence
atgagtctgtggctcggtgctccagtgccggatatcccccccgatagcgctgtagagttgtggaagcccggcgcacaagacgcttcatcccaagcccagggtgggtcctcgtgtattctgcgggaggaggcccgaatgcctcatagcgccggcggcaccgcaggcgtggggctcgaggctgccgagccgacagctctacttacgcgcgcagagcccccgtccgaacccacagaaattcgcccacagaaacgtaaaaagggccccgcgcccaaaatgctcggtaatgaactctgctcagtttgcggggacaaggcctccgggttccactacaatgtcttgtcctgtgaggggtgcaaaggtttttttcggcgctccgtcatcaaaggcgcccactatatctgccactctggcggtcactgtccgatggacacctacatgaggcgcaagtgtcaggaatgcagacttcgaaagtgccggcaggctggcatgcgggaagaatgcgtcttgagcgaggagcagattcgcctgaaaaagctgaaacggcaggaagaggaacaggcccacgcaacatcactgcccccaagggcatcaagccctccccagatcctcccgcaatag

SEQ ID NO: 47639 - DNA, 1164 bp, Artificial Sequence
  derived and/or modified sequence
atgagcctgtggctgggcgcccctgtgcctgacatccccccagacagcgctgtggagctgtggaagccaggggcccaggatgccagcagccaggcccagggcggcagcagctgcatcctgcgggaggaggccaggatgccccacagcgctgggggcacagctggggtgggcctggaggccgctgagcccacagccctgctgaccagggctgagccccccagcgagcccacagagatccggccccagaagaggaagaagggccctgcccccaagatgctgggcaatgagctgtgcagcgtgtgtggggacaaggccagcggcttccactacaacgtgctgagctgtgagggctgcaagggcttcttcagaagaagtgtcatcaagggggcccactacatctgccacagcggcggccactgccccatggacacctacatgaggaggaagtgccaggagtgccgcctgaggaaatgtcggcaggccggcatgagggaggagtgtgtgctgtctgaggagcagatccggctgaagaagctgaagaggcaggaggaggagcaggcccacgccaccagcctgcccccccgggccagcagccccccccagatcctgccccagctgagccctgagcagctgggcatgattgagaagctggtggccgcccagcagcagtgcaacagaagaagcttcagtgaccggctgcgggtgacagtgatgctgctggagaccagccgccgctacaaccctggcagcgagagcatcaccttcctgaaggacttctcctacaaccgggaggactttgccaaggccggcctgcaggtggagttcatcaaccccatctttgagttcagccgggccatgaatgagctgcagctgaatgatgctgagtttgccctgctgattgccatcagcatcttctctgctgaccggcccaacgtgcaggaccagctgcaggtggagcggctgcagcacacctacgtggaggccctgcacgcctacgtgtccatccaccacccccatgaccggctgatgttccccaggatgctgatgaagctggtgtccctgcggaccctgagctctgtgcacagcgagcaggtgtttgccctgcggctgcaggacaagaagctgccccccctgctgtctgagatctgggatgtgcatgaatag

SEQ ID NO: 47640 - DNA, 609 bp, Artificial Sequence
  derived and/or modified sequence
atgagcctgtggctgggcgcccctgtgcctgacatccccccagacagcgctgtggagctgtggaagccaggggcccaggatgccagcagccaggcccagggcggcagcagctgcatcctgcgggaggaggccaggatgccccacagcgctgggggcacagctggggtgggcctggaggccgctgagcccacagccctgctgaccagggctgagccccccagcgagcccacagagatccggccccagaagaggaagaagggccctgcccccaagatgctgggcaatgagctgtgcagcgtgtgtggggacaaggccagcggcttccactacaacgtgctgagctgtgagggctgcaagggcttcttcagaagaagtgtcatcaagggggcccactacatctgccacagcggcggccactgccccatggacacctacatgaggaggaagtgccaggagtgccgcctgaggaaatgtcggcaggccggcatgagggaggagtgtgtgctgtctgaggagcagatccggctgaagaagctgaagaggcaggaggaggagcaggcccacgccaccagcctgcccccccgggccagcagccccccccagatctag

SEQ ID NO: 47641 - DNA, 585 bp, Artificial Sequence
  derived and/or modified sequence
atgagcctgtggctgggcgcccctgtgcctgacatccccccagacagcgctgtggagctgtggaagccaggggcccaggatgccagcagccaggcccagggcggcagcagctgcatcctgcgggaggaggccaggatgccccacagcgctgggggcacagctggggtgggcctggaggccgctgagcccacagccctgctgaccagggctgagccccccagcgagcccacagagatccggccccagaagaggaagaagggccctgcccccaagatgctgggcaatgagctgtgcagcgtgtgtggggacaaggccagcggcttccactacaacgtgctgagctgtgagggctgcaagggcttcttcagaagaagtgtcatcaagggggcccactacatctgccacagcggcggccactgccccatggacacctacatgaggaggaagtgccaggagtgccgcctgaggaaatgtcggcaggccggcatgagggaggagtgtgtgctgtctgaggagcagatccggctgaagaagctgaagaggcaggaggaggagcaggcccacgccaccagcctgcccccatag

SEQ ID NO: 47642 - DNA, 618 bp, Artificial Sequence
  derived and/or modified sequence
atgagcctgtggctgggcgcccctgtgcctgacatccccccagacagcgctgtggagctgtggaagccaggggcccaggatgccagcagccaggcccagggcggcagcagctgcatcctgcgggaggaggccaggatgccccacagcgctgggggcacagctggggtgggcctggaggccgctgagcccacagccctgctgaccagggctgagccccccagcgagcccacagagatccggccccagaagaggaagaagggccctgcccccaagatgctgggcaatgagctgtgcagcgtgtgtggggacaaggccagcggcttccactacaacgtgctgagctgtgagggctgcaagggcttcttcagaagaagtgtcatcaagggggcccactacatctgccacagcggcggccactgccccatggacacctacatgaggaggaagtgccaggagtgccgcctgaggaaatgtcggcaggccggcatgagggaggagtgtgtgctgtctgaggagcagatccggctgaagaagctgaagaggcaggaggaggagcaggcccacgccaccagcctgcccccccgggccagcagccccccccagatcctgccccagtag

SEQ ID NO: 47643 - DNA, 1164 bp, Artificial Sequence
  derived and/or modified sequence
atgagcctgtggctgggcgcccccgtgcccgacatcccccccgactccgcggtggaactttggaaaccgggggcccaggatgccagctcgcaagcacagggtgggtcttcatgcattctgcgtgaggaagcgagaatgcctcactcagccggaggaaccgctggagtcggcctggaggccgctgaaccaacagcccttctaacacgggctgaaccaccctctgagcccaccgagattcggccacaaaaaaggaaaaagggacccgcacccaaaatgctgggaaacgaattgtgctccgtgtgcggcgacaaggcctcagggtttcattacaacgtgctatcttgcgagggttgtaagggattcttccgccggagcgtcatcaagggagcccactacatctgtcatagcgggggccattgccctatggatacctacatgcggcggaagtgtcaggagtgccgcctgaggaagtgtaggcaggccgggatgagagaagagtgcgttctttctgaggaacagatccgactcaaaaagctgaagaggcaggaagaggagcaggctcatgcaacgagtctgccccctcgggccagttcacccccacagatcctgccacagctctcccctgagcagctcggcatgattgagaagctggtggctgctcaacagcagtgtaatcgaaggagctttagcgacagattgcgcgtcactgtcatgctactggaaacatctagacggtacaaccctgggtccgagagcattacttttctgaaagatttctcatacaaccgcgaggactttgcaaaagctggactccaagttgagttcatcaatcccatttttgagttctctcgtgcaatgaacgagttacagctgaatgacgcagaattcgccttactgatcgccatcagcatcttctccgccgacagacccaacgtccaggatcagctccaagtagagcgcctccaacatacgtatgtggaagcccttcatgcatatgtgtccatccatcatccacatgaccgcctcatgttcccacgtatgcttatgaagctggtctctcttagaacgctctccagtgtccattccgaacaggtgttcgcccttcgccttcaggataaaaaactgcccccactgctgagtgagatctgggacgtgcacgagtag

SEQ ID NO: 47644 - DNA, 1164 bp, Artificial Sequence
  derived and/or modified sequence
atgagcctgtggctgggcgcccccgtgcccgacatcccccccgactccgcggttgaattatggaagcctggtgcacaagatgcgtccagccaagcacagggcggctctagctgcattctgagagaagaagcgagaatgccccatagcgccggcggaactgctggtgtgggtttagaggccgctgagcccacagccctgttaacccgagctgagcccccttccgaaccaactgagattcggccacagaagaggaaaaagggacctgccccaaagatgctcggaaatgagctgtgctctgtctgtggcgataaagcttctggattccactacaacgttttgtcctgcgaggggtgcaagggctttttccggcgcagcgttatcaaaggtgcccactatatatgtcattccggcggccactgtccaatggacacctacatgcgccgtaagtgtcaggaatgtcgtttacggaagtgccgacaagccggtatgagggaagagtgtgtgctgagcgaggagcagattagactgaaaaagctaaagcgtcaggaggaggagcaggcacacgcaacatctctgcctccaagggcgagttcacctcctcagattctgccccagctatcaccggagcagcttggcatgatcgaaaagctggtcgctgcccagcaacagtgcaaccgacggagcttttcagatcggctgcgagttacagtgatgctgctggagacctcccgacgatacaatcctggctcagaaagtattacgttccttaaggatttttcctacaaccgcgaggattttgctaaagctggactgcaggtggagtttatcaatcctatattcgagttctctcgtgcaatgaatgagctgcagttaaatgacgccgagtttgccctcttaatagcaatctccatattttccgccgaccgacccaacgtgcaagaccagttacaagtggaaagactgcagcatacatacgtcgaagccctgcacgcttatgttagcatccaccatccccacgatcggttaatgttccctaggatgctgatgaagctggtaagccttcggaccctgtcatctgtccattctgaacaggtgtttgcacttagactgcaggacaagaagctccctcctctcctcagcgagatttgggatgtgcatgagtag

SEQ ID NO: 47645 - DNA, 609 bp, Artificial Sequence
  derived and/or modified sequence
atgagcctgtggctgggcgcccccgtgcccgacatcccccccgactccgcagtcgagctgtggaagccaggagcacaagatgcttctagccaagcgcaaggcgggtccagttgtatccttagggaagaggcgcggatgcctcacagcgcgggcggcacagcaggtgtgggtctggaggccgctgagcccacagctttgctgacaagggccgaaccaccatccgagcctaccgagattcgcccacagaaacggaagaagggccctgcacccaagatgctgggaaatgaactgtgctcagtatgcggcgataaggcttcaggctttcattacaacgtcctatcctgtgaaggatgcaaaggcttctttcggcgctccgtcatcaagggagcccactacatctgccactcagggggccattgccctatggacacatatatgagaaggaagtgccaggaatgtagactcaggaaatgcaggcaagctggcatgcgcgaggagtgtgtcctctccgaggagcagatacgactgaagaaactgaaacgacaggaggaggaacaggcgcatgcaacctcactgcctccaagagcgtcctcccctccacaaatttag

SEQ ID NO: 47646 - DNA, 585 bp, Artificial Sequence
  derived and/or modified sequence
atgagcctgtggctgggcgcccccgtgcccgacatcccccccgactccgccgtggagttgtggaaacctggcgctcaggatgcaagttctcaggcccaaggtggcagtagttgtatcctgcgcgaggaagctaggatgccgcattcagcaggaggcactgccggcgtgggcctggaagcagctgaacccacagcccttttgacacgggcggaaccaccttcggaacccaccgagatcaggccccagaaaaggaagaagggcccagcacctaaaatgctcggcaatgaactctgtagtgtctgtggagacaaggcgagcggcttccattataatgtcttatcttgtgaaggatgcaaggggtttttccggagatcggtgatcaagggggcacattatatctgccactctggcggccattgcccaatggacacttacatgcgccgtaaatgtcaggagtgccgcctgcgtaaatgcaggcaggctggcatgcgcgaggagtgtgtcctgtctgaggagcagattagactgaagaaactgaagcggcaagaagaagagcaggctcatgctacatctctgcctccctag

SEQ ID NO: 47647 - DNA, 618 bp, Artificial Sequence
  derived and/or modified sequence
atgagcctgtggctgggcgcccccgtgcccgacatcccccccgactccgctgtggaactctggaagccaggtgcacaagatgcatcatcccaagctcagggaggatcctcttgtatcctcagagaagaggctaggatgccgcattccgcaggaggaaccgccggggttgggctagaagcggctgaacccactgcactactgactagggctgagcccccatctgaaccaaccgagattaggccacagaaacggaagaagggtccagctcccaaaatgctcgggaacgagctgtgctccgtttgcggtgacaaggcctcaggcttccattacaacgtcttgagttgcgaaggctgcaaggggttcttccgacggagcgtcatcaaaggggcacactacatttgccatagtggaggtcactgcccaatggatacctacatgagaaggaaatgtcaggagtgcaggctacgtaagtgtaggcaggcaggcatgcgagaagagtgcgtgttgtctgaagagcagatccgcctgaagaagctgaaacggcaagaagaggaacaggcccatgcaacatcgctccccccccgagcttcaagtccaccccagatcctacctcaatag

SEQ ID NO: 47648 - DNA, 1480 bp, Artificial Sequence
  derived and/or modified sequence
cctgcttgtgctcagctccagctcactggctggccaccgagacttctggacaggaaactgcaccatcctcttctcccagcaagggggctccagagactgcccacccaggaagtctggtggcctggggatttggacagtgccttggtaatgaccagggctccaggaagagatgtccttgtggctgggggcccctgtgcctgacattcctcctgactctgcggtggagctgtggaagccaggcgcacaggatgcaagcagccaggcccagggaggcagcagctgcatcctcagagaggaagccaggatgccccactctgctgggggtactgcaggggtggggctggaggctgcagagcccacagccctgctcaccagggcagagcccccttcagaacccacagagatccgtccacaaaagcggaaaaaggggccagcccccaaaatgctggggaacgagctatgcagcgtgtgtggggacaaggcctcgggcttccactacaatgttctgagctgcgagggctgcaagggattcttccgccgcagcgtcatcaagggagcgcactacatctgccacagtggcggccactgccccatggacacctacatgcgtcgcaagtgccaggagtgtcggcttcgcaaatgccgtcaggctggcatgcgggaggagtgtgtcctgtcagaagaacagatccgcctgaagaaactgaagcggcaagaggaggaacaggctcatgccacatccttgccccccagggcttcctcacccccccaaatcctgccccagctcagcccggaacaactgggcatgatcgagaagctcgtcgctgcccagcaacagtgtaaccggcgctccttttctgaccggcttcgagtcacggtgatgcttctggagacatctcggaggtacaaccctgggagtgagagtatcaccttcctcaaggatttcagttataaccgggaagactttgccaaagcagggctgcaagtggaattcatcaaccccatcttcgagttctccagggccatgaatgagctgcaactcaatgatgccgagtttgccttgctcattgctatcagcatcttctctgcagaccggcccaacgtgcaggaccagctccaggtagagaggctgcagcacacatatgtggaagccctgcatgcctacgtctccatccaccatccccatgaccgactgatgttcccacggatgctaatgaaactggtgagcctccggaccctgagcagcgtccactcagagcaagtgtttgcactgcgtctgcaggacaaaaagctcccaccgctgctctctgagatctgggatgtgcacgaatgactgttctgtccccatattttctgttttcttggccggatggctgaggcctggtggctgcctcctagaagtggaacagactgagaagggcaaacattcctgggagctgggcaaggagatcctcccgtggcattaaaagagagtcaaagg

SEQ ID NO: 47649 - DNA, 1330 bp, Artificial Sequence
  derived and/or modified sequence
tgcaggagggtcgtggtctggctgtggcggaggagcataagaaggacagtgccttggtaatgaccagggctccaggaagagatgtccttgtggctgggggcccctgtgcctgacattcctcctgactctgcggtggagctgtggaagccaggcgcacaggatgcaagcagccaggcccagggaggcagcagctgcatcctcagagaggaagccaggatgccccactctgctgggggtactgcaggggtggggctggaggctgcagagcccacagccctgctcaccagggcagagcccccttcagaacccacagagatccgtccacaaaagcggaaaaaggggccagcccccaaaatgctggggaacgagctatgcagcgtgtgtggggacaaggcctcgggcttccactacaatgttctgagctgcgagggctgcaagggattcttccgccgcagcgtcatcaagggagcgcactacatctgccacagtggcggccactgccccatggacacctacatgcgtcgcaagtgccaggagtgtcggcttcgcaaatgccgtcaggctggcatgcgggaggagtgtgtcctgtcagaagaacagatccgcctgaagaaactgaagcggcaagaggaggaacaggctcatgccacatccttgccccccagggcttcctcacccccccaaatcctgccccagctcagcccggaacaactgggcatgatcgagaagctcgtcgctgcccagcaacagtgtaaccggcgctccttttctgaccggcttcgagtcacggtgatgcttctggagacatctcggaggtacaaccctgggagtgagagtatcaccttcctcaaggatttcagttataaccgggaagactttgccaaagcagggctgcaagtggaattcatcaaccccatcttcgagttctccagggccatgaatgagctgcaactcaatgatgccgagtttgccttgctcattgctatcagcatcttctctgcagaccggcccaacgtgcaggaccagctccaggtagagaggctgcagcacacatatgtggaagccctgcatgcctacgtctccatccaccatccccatgaccgactgatgttcccacggatgctaatgaaactggtgagcctccggaccctgagcagcgtccactcagagcaagtgtttgcactgcgtctgcaggacaaaaagctcccaccgctgctctctgagatctgggatgtgcacgaatgactgttctgtccccatattttctgttttcttggccggatggctgaggcctggtggctgcctcctagaagtggaacagactgagaag

SEQ ID NO: 47650 - DNA, 802 bp, Artificial Sequence
  derived and/or modified sequence
ggaaaaggcgcagtctcggtgggattgcgtgcaggagggtcgtggtctggctgtggcggaggagcataagaaggactccagattcaattatttatatatacttcaggatttaaactttgcttccagagttgtcatggaggaggccaagaagcaaatagagacagtgccttggtaatgaccagggctccaggaagagatgtccttgtggctgggggcccctgtgcctgacattcctcctgactctgcggtggagctgtggaagccaggcgcacaggatgcaagcagccaggcccagggaggcagcagctgcatcctcagagaggaagccaggatgccccactctgctgggggtactgcaggggtggggctggaggctgcagagcccacagccctgctcaccagggcagagcccccttcagaacccacagagatccgtccacaaaagcggaaaaaggggccagcccccaaaatgctggggaacgagctatgcagcgtgtgtggggacaaggcctcgggcttccactacaatgttctgagctgcgagggctgcaagggattcttccgccgcagcgtcatcaagggagcgcactacatctgccacagtggcggccactgccccatggacacctacatgcgtcgcaagtgccaggagtgtcggcttcgcaaatgccgtcaggctggcatgcgggaggagtgtgtcctgtcagaagaacagatccgcctgaagaaactgaagcggcaagaggaggaacaggctcatgccacatccttgccccccagggcttcctcacccccccaaatc

SEQ ID NO: 47651 - DNA, 784 bp, Artificial Sequence
  derived and/or modified sequence
tccgggccgtgctgggacctttgctccacgaggtcctgcttgtgctcagctccagctcactggctggccaccgagacttctggacaggaaactgcaccatcctcttctcccagcaagggggctccagagactgcccacccaggaagtctggtggcctggggatttggacagtgccttggtaatgaccagggctccaggaagagatgtccttgtggctgggggcccctgtgcctgacattcctcctgactctgcggtggagctgtggaagccaggcgcacaggatgcaagcagccaggcccagggaggcagcagctgcatcctcagagaggaagccaggatgccccactctgctgggggtactgcaggggtggggctggaggctgcagagcccacagccctgctcaccagggcagagcccccttcagaacccacagagatccgtccacaaaagcggaaaaaggggccagcccccaaaatgctggggaacgagctatgcagcgtgtgtggggacaaggcctcgggcttccactacaatgttctgagctgcgagggctgcaagggattcttccgccgcagcgtcatcaagggagcgcactacatctgccacagtggcggccactgccccatggacacctacatgcgtcgcaagtgccaggagtgtcggcttcgcaaatgccgtcaggctggcatgcgggaggagtgtgtcctgtcagaagaacagatccgcctgaagaaactgaagcggcaagaggaggaacaggctcatgccacatccttgccccc

SEQ ID NO: 47652 - DNA, 825 bp, Artificial Sequence
  derived and/or modified sequence
gggaggcagtccttttgcaagagctgctaagagcgctgggtcctgcttgtgctcagctccagctcactggctggccaccgagacttctggacaggaaactgcaccatcctcttctcccagcaagggggctccagagactgcccacccaggaagtctggtggcctggggatttggacagtgccttggtaatgaccagggctccaggaagagatgtccttgtggctgggggcccctgtgcctgacattcctcctgactctgcggtggagctgtggaagccaggcgcacaggatgcaagcagccaggcccagggaggcagcagctgcatcctcagagaggaagccaggatgccccactctgctgggggtactgcaggggtggggctggaggctgcagagcccacagccctgctcaccagggcagagcccccttcagaacccacagagatccgtccacaaaagcggaaaaaggggccagcccccaaaatgctggggaacgagctatgcagcgtgtgtggggacaaggcctcgggcttccactacaatgttctgagctgcgagggctgcaagggattcttccgccgcagcgtcatcaagggagcgcactacatctgccacagtggcggccactgccccatggacacctacatgcgtcgcaagtgccaggagtgtcggcttcgcaaatgccgtcaggctggcatgcgggaggagtgtgtcctgtcagaagaacagatccgcctgaagaaactgaagcggcaagaggaggaacaggctcatgccacatccttgccccccagggcttcctcacccccccaaatcctgccccag

SEQ ID NO: 47653 - DNA, 1164 bp, Artificial Sequence
  derived and/or modified sequence
atgtcactgtggctgggtgcccctgtgcctgacatccctcccgatagtgccgtggagttgtggaaaccaggggctcaagacgcctcttcacaggctcagggcggatcctcttgcatcctccgggaagaagcaaggatgccccatagtgcaggaggtaccgcaggcgtggggctggaagccgcagaacccaccgctctgctgacccgagcagagccaccctccgaacctactgagatccgccctcagaaaagaaaaaaggggcctgctcccaaaatgctgggaaatgagctgtgttccgtttgcggggacaaggcctctgggttccactataacgtgttaagttgtgagggctgcaagggtttctttcgcagatctgttattaagggggctcactatatatgtcactcgggcggtcactgcccaatggacacatatatgcgaagaaaatgccaggagtgccgacttcggaaatgtaggcaggccggtatgagagaggaatgcgttctgtccgaagaacagatcagacttaagaagcttaaaagacaggaggaggagcaagcccatgctacgtccctgcctcccagggcgagttccccccctcagattttgccccagttgagtccagaacaactaggcatgatcgagaagctcgtagctgcccagcagcagtgcaataggaggtcgttttcagataggttacgagtgaccgtcatgctgttagaaacaagtcggaggtacaatcctggtagcgaatctatcaccttcctgaaggacttttcgtataatcgggaggactttgcaaaagcaggtctgcaggtggagtttattaatcccatattcgagttctctagggccatgaatgagctccaacttaacgacgcggagtttgctctgttgatcgccatctctattttttctgccgatcgaccgaatgtgcaggatcagctgcaggtggaacgcctgcagcatacttatgttgaagctctccatgcttacgtcagcatccatcacccacatgatcgcctcatgttccccaggatgctgatgaagctggtctcccttaggaccttgtccagtgtgcacagcgagcaggtgtttgccctgaggctccaggacaaaaaactgcccccactgctgagtgagatttgggacgtccatgaatag

SEQ ID NO: 47654 - DNA, 1164 bp, Artificial Sequence
  derived and/or modified sequence
atgagcctatggctgggggctccagtacccgatattccacccgatagcgccgtggagttgtggaagcccggtgcccaggacgcttcttctcaggcccagggcggatcctcttgcatcttgagggaggaggccaggatgcctcacagcgctgggggaacagcgggtgtgggattagaggccgcagaacccacagcactcttaacgcgggctgagccacctagcgaaccgacggagattaggccgcagaaacggaaaaaaggccctgctccaaagatgctcggcaatgaactctgttccgtatgcggcgataaagcatccggtttccactataatgtgttaagctgcgaggggtgcaaagggttcttccggagaagtgtgataaagggggctcactatatctgccactctggtgggcattgtcccatggatacatatatgcgaaggaagtgccaggagtgtaggcttcgcaaatgccggcaggccggaatgcgtgaggagtgcgtcctctctgaagagcaaattcgactgaaaaagctgaagagacaggaggaggaacaagctcatgctacctccctaccccctagagcctcctccccaccgcaaatcctgccgcagctgagtcctgaacagctgggcatgatcgagaaacttgttgccgctcaacaacagtgcaaccgcagatccttcagtgatcgtctccgggtcactgtgatgctcctcgagaccagtcgtagatacaacccgggtagcgagtcaataaccttcctgaaagacttctcctacaaccgggaagatttcgcgaaagcaggtctgcaagtcgagttcataaaccccatattcgagttttccagagccatgaatgaactgcagctgaacgatgctgaattcgcccttcttatagcaatctctattttctcagccgaccggccaaatgtccaagaccagctccaggtggagaggctgcagcatacatatgtggaggctcttcacgcttacgtaagtatacaccaccctcacgacaggctgatgttccctcgcatgcttatgaagctggttagtctacgtactttatccagcgttcattccgaacaagtatttgccctccgactacaggacaaaaagctgccacctttgctctcagaaatctgggatgtgcatgaatag

SEQ ID NO: 47655 - DNA, 609 bp, Artificial Sequence
  derived and/or modified sequence
atgtctctgtggctcggcgcaccagtgcctgacattccacccgactctgctgtagaattatggaagcctggcgctcaggatgcaagtagtcaagctcaggggggatcaagttgtattctgagggaagaagccaggatgcctcactctgccggtggaactgctggagttggcctggaagcggcagagccaactgccctgctgactagagccgaaccgccatccgaacccacagagataaggccacagaagaggaagaagggcccagcccctaagatgttagggaacgaactatgctctgtgtgcggtgataaggcctctggcttccactacaacgtgctgtcatgcgaaggctgtaaaggcttttttcgcaggtcggtgatcaagggagctcattatatatgtcatagcggtggtcattgtcccatggacacttatatgcgcagaaaatgccaggagtgcagattgagaaagtgtcggcaggctggtatgagagaagaatgtgttctgagcgaggagcagattcggcttaaaaagcttaaacgccaagaggaggaacaggcccacgccacatctctgcccccaagagcaagctccccccctcagatctag

SEQ ID NO: 47656 - DNA, 585 bp, Artificial Sequence
  derived and/or modified sequence
atgtccctgtggttgggagctccagtccccgacattcctccagattccgctgttgagctgtggaagcccggtgcgcaggatgcaagctctcaggcacagggagggtcctcctgtattctccgggaagaagcacgaatgccccatagcgccggaggaactgcaggcgttgggctggaagccgcagagcctacagccctgttaactcgcgctgagccacctagtgagccaactgaaattcgcccacagaagcggaaaaagggacccgctcctaagatgctgggcaacgagctgtgctccgtctgtggagataaagcatcagggttccactacaacgttttgagctgcgagggttgtaaggggttttttcggcgttctgtgatcaaaggcgctcactatatatgccatagcggcggtcattgtcctatggacacctacatgagaaggaagtgtcaagaatgtcgtctcaggaagtgccgccaagccggaatgagggaagagtgcgtattgtcagaagagcaaatacggctcaagaagctcaaaaggcaagaggaggaacaggcacatgcaacctctctgccgccttag

SEQ ID NO: 47657 - DNA, 618 bp, Artificial Sequence
  derived and/or modified sequence
atgagtctgtggttgggggctcccgtcccggacatccccccagactccgccgtggaactttggaaaccaggtgctcaggatgcctccagtcaggctcagggaggcagtagttgcattttgagagaggaggcacgcatgcctcactctgccggagggaccgccggagtcgggctggaagcggctgagccgaccgcactgctgacaagagcagagccaccctcagagcccactgagataagaccccagaaaaggaagaaaggtcccgcacccaaaatgcttggaaacgaactgtgtagcgtctgcggtgacaaggcctccgggtttcactacaacgttctgtcgtgtgaaggatgcaaaggcttctttcggcgtagtgttatcaagggcgctcactatatctgccactccggagggcattgtcccatggacacatatatgaggcgcaagtgccaggaatgccgcctccgaaaatgtcgccaagccggtatgagagaggaatgtgttctttccgaagagcagataagactcaaaaagctgaagcggcaggaggaagaacaggcccacgctacatcactgcctcccagagcctcctcacctccacagatccttccacagtag

SEQ ID NO: 47658 - protein, 402 aa, Artificial Sequence
  derived and/or modified sequence
MPHSAGGTAGVGLEAAEPTALLTRAEPPSEPTEIRPQKRKKGPAPKMLGNELCSVCGDKASGFHYNVLSCEGCKGFFRRSVIKGAHYICHSGGHCPMDTYMRRKCQECRLRKCRQAGMREECVLSEEQIRLKKLKRQEEEQAHATSLPPRASSPPQILPQLSPEQLGMIEKLVAAQQQCNRRSFSDRLRVTPWPMAPDPHSREARQQRFAHFTELAIVSVQEIVDFAKQLPGFLQLSREDQIALLKTSAIEVMLLETSRRYNPGSESITFLKDFSYNREDFAKAGLQVEFINPIFEFSRAMNELQLNDAEFALLIAISIFSADRPNVQDQLQVERLQHTYVEALHAYVSIHHPHDRLMFPRMLMKLVSLRTLSSVHSEQVFALRLQDKKLPPLLSEIWDVHE

SEQ ID NO: 47659 - DNA, 1209 bp, Artificial Sequence
  derived and/or modified sequence
atgccccacagcgccggcggcaccgccggcgtgggcctggaggccgccgagcccaccgccctgctgaccagagccgagccccccagcgagcccaccgagatcagaccccagaagagaaagaagggccccgcccccaagatgctgggcaacgagctgtgcagcgtgtgcggcgacaaggccagcggcttccactacaacgtgctgagctgcgagggctgcaagggcttcttcagaagaagcgtgatcaagggcgcccactacatctgccacagcggcggccactgccccatggacacctacatgagaagaaagtgccaggagtgcagactgagaaagtgcagacaggccggcatgagagaggagtgcgtgctgagcgaggagcagatcagactgaagaagctgaagagacaggaggaggagcaggcccacgccaccagcctgccccccagagccagcagccccccccagatcctgccccagctgagccccgagcagctgggcatgatcgagaagctggtggccgcccagcagcagtgcaacagaagaagcttcagcgacagactgagagtgaccccctggcccatggcccccgacccccacagcagagaggccagacagcagagattcgcccacttcaccgagctggccatcgtgagcgtgcaggagatcgtggacttcgccaagcagctgcccggcttcctgcagctgagcagagaggaccagatcgccctgctgaagaccagcgccatcgaggtgatgctgctggagaccagcagaagatacaaccccggcagcgagagcatcaccttcctgaaggacttcagctacaacagagaggacttcgccaaggccggcctgcaggtggagttcatcaaccccatcttcgagttcagcagagccatgaacgagctgcagctgaacgacgccgagttcgccctgctgatcgccatcagcatcttcagcgccgacagacccaacgtgcaggaccagctgcaggtggagagactgcagcacacctacgtggaggccctgcacgcctacgtgagcatccaccacccccacgacagactgatgttccccagaatgctgatgaagctggtgagcctgagaaccctgagcagcgtgcacagcgagcaggtgttcgccctgagactgcaggacaagaagctgccccccctgctgagcgagatctgggacgtgcacgagtag

SEQ ID NO: 47660 - DNA, 1209 bp, Artificial Sequence
  derived and/or modified sequence
atgcctcattcagcaggagggaccgccggcgtcggcctggaggcagccgaaccaactgctctactgacacgggcagagcctccgtcggagccaactgagatccgacctcaaaagagaaagaagggtcccgcaccgaagatgctcggaaacgaattatgttccgtatgcggcgataaagcctccggattccactacaatgtcctgtcctgcgaaggctgtaagggcttctttagacgatcagttatcaaaggcgcgcactatatttgtcacagcggagggcactgtcccatggatacatacatgaggcgcaaatgccaggagtgcaggctgcggaagtgccgccaggctggcatgcgggaggagtgtgtgctgtcagaggaacaaattaggctaaagaagctgaaaagacaagaggaggaacaagcacatgccacatcgctgccgccccgtgcctctagcccacctcagatactgcctcagctcagtccagagcaactgggtatgatagaaaaattggtcgctgcccagcagcaatgcaatagaaggtcattttccgataggctgagggtcacgccctggcccatggctcctgaccctcactccagagaagcgcggcagcagagattcgcacatttcacagagctggccatcgtttcagtgcaggagatagtggatttcgctaagcagctgcccggttttctgcagctgagccgggaggaccagatcgcccttctaaaaaccagtgccattgaggtgatgctgctcgaaacttctcggcgctacaatcctggctcggagtccatcaccttcctgaaggatttttcttacaatcgggaagattttgctaaagccggcttacaggtggaatttataaaccccatcttcgagttttccagagctatgaacgagcttcagctgaatgatgcagaatttgcactattgatcgcgatctccattttttccgcagaccggcccaatgtccaggaccagttacaggtggaaaggctgcagcacacttatgtagaggcactgcatgcatatgtgagtatccaccatcctcatgatagactcatgttcccacgtatgctaatgaagttagtgagtttaaggaccctgtctagtgtgcattccgagcaggtgttcgccctgcgactccaggataagaaactgccaccactactgagtgaaatttgggacgtccacgaatag

SEQ ID NO: 47661 - DNA, 1209 bp, Artificial Sequence
  derived and/or modified sequence
atgccccacagcgctgggggcacagctggggtgggcctggaggccgctgagcccacagccctgctgaccagggctgagcccccatctgagcccacagagatccggccccagaagaggaagaagggccctgcccccaagatgctgggcaatgagctgtgcagcgtgtgtggggacaaggccagcggcttccactacaacgtgctgagctgtgagggctgcaagggcttcttccgccgcagcgtcatcaagggggcccactacatctgccacagcggcggccactgccccatggacacctacatgaggaggaagtgccaggagtgccgcctgaggaagtgccggcaggccggcatgagagaagaatgtgtgctgtctgaggagcagatccggctgaagaagctgaagaggcaggaggaggagcaggcccacgccaccagcctgcccccccgggccagcagccccccccagatcctgccccagctgagccctgagcagctgggcatgattgagaagctggtggccgcccagcagcagtgcaacagaagaagcttcagtgaccggctgcgggtgaccccctggcccatggccccagacccccacagccgggaggcccggcagcagagatttgcccacttcacagagctggccatcgtgtctgtgcaggagatcgtggactttgccaagcagctgcccggcttcctgcagctgagccgggaggaccagatcgccctgctgaagaccagcgccatcgaggtgatgctgctggagaccagccgccgctacaaccctggcagcgagagcatcaccttcctgaaggacttctcctacaacagagaagattttgccaaggccggcctgcaggtggagttcatcaaccccatctttgagttcagccgggccatgaatgagctgcagctgaatgatgctgagtttgccctgctgattgccatcagcatcttctctgctgaccggcccaacgtgcaggaccagctgcaggtggagcggctgcagcacacctacgtggaggccctgcacgcctacgtgtccatccaccacccccatgaccggctgatgttccccaggatgctgatgaagctggtgtccctgcggaccctgagctctgtgcacagcgagcaggtgtttgccctgcggctgcaggacaagaagctgccccccctgctgtctgagatctgggatgtgcatgaatag

SEQ ID NO: 47662 - DNA, 1209 bp, Artificial Sequence
  derived and/or modified sequence
atgccccacagcgccggcggcaccgccggcgtgggcctggaggccgcggaaccaacagctctgttaacgcgagcagagccaccatctgagccaactgagatcagaccccagaagagaaagaaggggccagcccccaagatgctcggaaacgaattgtgttcagtttgcggggataaagcttccggatttcactataatgtattatcctgtgaaggatgtaaagggttttttaggcgctctgtgatcaaaggcgcacactacatctgccactcagggggacactgccccatggatacatacatgcgcagaaagtgccaggagtgccgtttgcgcaaatgcaggcaggcaggcatgcgtgaagagtgtgtgctgtccgaggagcagatccgcttaaaaaaacttaaacgccaggaggaggagcaggcgcatgctacatcccttcccccaagggcctccagccccccgcagattttacctcaactttcccccgagcagctcgggatgatcgaaaagctggtcgcagcccagcaacaatgtaacaggaggtcattctcagatcgcttgcgagtcacgccttggcctatggccccagatcctcactctagagaagcgcgccagcagcgctttgcacattttacggagttagcaatcgtatcagtgcaggaaatcgtcgactttgcgaaacagctacccggctttcttcaactgtcgagagaagaccagattgccttgttgaagaccagcgcaatcgaagtgatgctgctggaaacgagccgcaggtacaacccaggcagcgaatcaatcacttttctgaaggatttctcatataacagagaggacttcgcaaaagctgggcttcaggtggaatttatcaatccgattttcgagttcagtagggctatgaatgagctgcaacttaacgacgcagagtttgcactcttgatcgcgatctccatcttctctgcagacagacctaacgtgcaagaccaactgcaggtcgagcgcctgcagcacacctacgtcgaagccctgcatgcatatgtgtccatccatcacccacatgatcgcttaatgtttccccggatgctgatgaaactggtttccctgagaaccttgagttcggttcacagcgaacaagtgttcgcccttcggctgcaggacaaaaagcttccccccctgctcagcgaaatctgggatgtgcatgagtag

SEQ ID NO: 47663 - DNA, 1209 bp, Artificial Sequence
  derived and/or modified sequence
atgcctcacagtgccggtggcacggccggagtgggcctagaggccgctgagcccaccgccttgctgacccgtgccgagcctcctagtgagccgaccgaaattagacctcaaaaacgtaagaaagggcctgcccctaaaatgctgggaaatgagctgtgctccgtctgtggagacaaggctagcgggttccattataatgtgctgtcatgcgagggatgtaaaggtttcttcagacgatcagtgataaagggcgcacactatatatgccattcaggaggacactgtcccatggatacttacatgaggcgaaagtgtcaggaatgtagattaagaaagtgccggcaagccggtatgcgggaagagtgtgtgcttagcgaggagcagattaggctgaaaaagttgaaacgacaagaggaggagcaagcccacgccaccagcctccctcctagggcctccagcccccctcagatcttgccacaactctcccccgagcagctgggaatgattgaaaaactggtagcagcccagcagcagtgcaatcgtcggtctttctctgacagactgagagttacaccttggcccatggcacccgacccgcactcgagggaggctagacagcagcgattcgcacattttaccgagctggccatcgtgagcgtccaagagatcgttgactttgccaaacaactgcctggattcctccagctgtctcgcgaagatcagatcgccctattgaagacatcagccatagaggtgatgcttctcgaaacatcacgacggtataaccctggctccgagtcgatcaccttcctgaaagactttagctacaatcgcgaggacttcgccaaggccggactgcaggtagagtttattaatcctatctttgaattttcacgcgcaatgaatgagcttcagctaaacgacgccgagtttgccctgttgattgcaattagtatcttttctgcggacagaccaaacgttcaggaccagctgcaggtggagagactgcagcacacctacgtggaggctctgcatgcttacgtttccatccaccatccgcatgatcgtttgatgtttccccgaatgctgatgaaactggtgtcgctccggaccctctcaagcgtgcattcagaacaggtgttcgctctgcggctccaagataagaagctgccccctctgctctctgaaatctgggatgtgcacgaatag

SEQ ID NO: 47664 - protein, 717 aa, Artificial Sequence
  derived and/or modified sequence
MVAERTHKAAATGARGPGELGAPGTVALVAARAERGARLPSPGSCGLLTLALCSLALSLLAHFRTAELQARVLRLEAERGEQQMETAILGRVNQLLDEKWKLHSRRRREAPKTSPGCNCPPAFQGPTGRPGLPGDKGAIGMPGRVGSPGDAGLSIIGPRGPPGQPGTRGFPGFPGPIGLDGKPGHPGPKGDMGLTGPPGQPGPQGQKGEKGQCGEYPHRECLSSMPAALRSSQIIALKLLPLLNSVRLAPPPVIKRRTFQGEQSQASIQGPPGPPGPPGPSGPLGHPGLPGPMGPPGLPGPPGPKGDPGIQGYHGRKGERGMPGMPGKHGAKGAPGIAVAGMKGEPGIPGTKGEKGAEGSPGLPGLLGQKGEKGDAGNSIGGGRGEPGPPGLPGPPGPKGEAGVDGQVGPPGQPGDKGERGAAGEQGPDGPKGSKGEPGKGEMVDYNGNINEALQEIRTLALMGPPGLPGQIGPPGAPGIPGQKGEIGLPGPPGHDGEKGPRGKPGDMGPPGPQGPPGKDGPPGVKGENGHPGSPGEKGEKGETGQAGSPGEKGEAGEKGNPGAEVPGLPGPEGPPGPPGLQGVPGPKGEAGLDGAKGEKGFQGEKGDRGPLGLPGASGLDGRPGPPGTPGPIGVPGPAGPKGERGSKGDPGMTGPTGAAGLPGLHGPPGDKGNRGERGKKGSRGPKGDKGDQGAPGLDAPCPLGEDGLPVQGCWNK

SEQ ID NO: 47665 - protein, 688 aa, Artificial Sequence
  derived and/or modified sequence
MVAERTHKAAATGARGPGELGAPGTVALVAARAERGARLPSPGSCGLLTLALCSLALSLLAHFRTAELQARVLRLEAERGEQQMETAILGRVNQLLDEKWKLHSRRRREAPKTSPGCNCPPAFQGPTGRPGLPGQPGTRGFPGFPGPIGLDGKPGHPGPKGDMGLTGPPGQPGPQGQKGEKGQCGEYPHRECLSSMPAALRSSQIIALKLLPLLNSVRLAPPPVIKRRTFQGEQSQASIQGPPGPPGPPGPSGPLGHPGLPGPMGPPGLPGPPGPKGDPGIQGYHGRKGERGMPGMPGKHGAKGAPGIAVAGMKGEPGIPGTKGEKGAEGSPGLPGLLGQKGEKGDAGNSIGGGRGEPGPPGLPGPPGPKGEAGVDGQVGPPGQPGDKGERGAAGEQGPDGPKGSKGEPGKGEMVDYNGNINEALQEIRTLALMGPPGLPGQIGPPGAPGIPGQKGEIGLPGPPGHDGEKGPRGKPGDMGPPGPQGPPGKDGPPGVKGENGHPGSPGEKGEKGETGQAGSPGEKGEAGEKGNPGAEVPGLPGPEGPPGPPGLQGVPGPKGEAGLDGAKGEKGFQGEKGDRGPLGLPGASGLDGRPGPPGTPGPIGVPGPAGPKGERGSKGDPGMTGPTGAAGLPGLHGPPGDKGNRGERGKKGSRGPKGDKGDQGAPGLDAPCPLGEDGLPVQGCWNK

SEQ ID NO: 47666 - protein, 702 aa, Artificial Sequence
  derived and/or modified sequence
MVAERTHKAAATGARGPGELGAPGTVALVAARAERGARLPSPGSCGLLTLALCSLALSLLAHFRTAELQARVLRLEAERGEQQMETAILGRVNQLLDEKWKLHSRRRREAPKTSPGCNCPPAFQGPTGRPGLPGDKGAIGMPGRVGSPGDAGLSIIGPRGPPGQPGTRGFPGFPGPIGLDGKPGHPGPKGDMGLTGPPGQPGPQGQKGEKGQCGEYPHRECLSSMPAALRSSQIIALKLLPLLNSVRLAPPPVIKRRTFQGEQSQASIQGPPGPPGPPGPSGPLGHPGLPGPMGPPGLPGPPGPKGDPGIQGYHGRKGERGMPGMPGKHGAKGAPGIAVAGMKGEPGIPGTKGEKGAEGSPGLPGLLGQKGEKGDAGNSIGGGRGEPGPPGLPGPPGPKGEAGVDGQVGPPGQPGDKGERGAAGEQGPDGPKGSKGEPGKGEMVDYNGNINEALQEIRTLALMGPPGLPGQIGPPGAPGIPGQKGEIGLPGPPGHDGEKGPRGKPGDMGPPGPQGPPGKDGPPGVKGENGHPGSPGEKGEKGETGQAGSPVPGLPGPEGPPGPPGLQGVPGPKGEAGLDGAKGEKGFQGEKGDRGPLGLPGASGLDGRPGPPGTPGPIGVPGPAGPKGERGSKGDPGMTGPTGAAGLPGLHGPPGDKGNRGERGKKGSRGPKGDKGDQGAPGLDAPCPLGEDGLPVQGCWNK

SEQ ID NO: 47667 - protein, 703 aa, Artificial Sequence
  derived and/or modified sequence
MVAERTHKAAATGARGPGELGAPGTVALVAARAERGARLPSPGSCGLLTLALCSLALSLLAHFRTAELQARVLRLEAERGEQQMETAILGRVNQLLDEKWKLHSRRRREAPKTSPGCNCPPGPPGPTGRPGLPGDKGAIGMPGRVGSPGDAGLSIIGPRGPPGQPGTRGFPGFPGPIGLDGKPGHPGPKGDMGLTGPPGQPGPQGQKGEKGQCGEYPHRECLSSMPAALRSSQIIALKLLPLLNSVRLAPPPVIKRRTFQGEQSQASIQGPPGPPGPPGPSGPLGHPGLPGPMGPPGLPGPPGPKGDPGIQGYHGRKGERGMPGMPGKHGAKGAPGIAVAGMKGEPGIPGTKGEKGAEGSPGLPGLLGQKGEKGDAGNSIGGGRGEPGPPGLPGPPGPKGEAGVDGQVGPPGQPGDKGERGAAGEQGPDGPKGSKGEPGKGEMVDYNGNINEALQPSRGPALRGPPGLPGQIGPPGAPGIPGQKGEIGLPGPPGHDGEKGPRGKPGDMGPPGPQGPPGKDGPPGVKGENGHPGSPGEKGEKGETGQAGSPGEKGEAGEKGNPGAEGLQGVPGPKGEAGLDGAKGEKGFQGEKGDRGPLGLPGASGLDGRPGPPGTPGPIGVPGPAGPKGERGSKGDPGMTGPTGAAGLPGLHGPPGDKGNRGERGKKGSRGPKGDKGDQGAPGLDAPCPLGEDGLPVQGCWNK

SEQ ID NO: 47668 - protein, 691 aa, Artificial Sequence
  derived and/or modified sequence
MVAERTHKAAATGARGPGELGAPGTVALVAARAERGARLPSPGSCGLLTLALCSLALSLLAHFRTAELQARVLRLEAERGEQQMETAILGRVNQLLDEKWKLHSRRRREAPKTSPGCNCPPGPPGPTGRPGLPGDKGAIGMPGRVGSPGDAGLSIIGPRGPPGQPGTRGFPGFPGPIGLDGKPGHPGPKGDMGLTGPPGQPGPQGQKGEKGQCGEYPHRECLSSMPAALRSSQIIALKLLPLLNSVRLAPPPVIKRRTFQGEQSQASIQGPPGPPGPPGPSGPLGHPGLPGPMGPPGLPGPPGPKGDPGIQGYHGRKGERGMPGMPGKHGAKGAPGIAVAGMKGEPGIPGTKGEKGAEGSPGLPGLLGQKGEKGDAGNSIGGGRGEPGPPGLPGPPGPKGEAGVDGQVGPPGQPGDKGERGAAGEQGPDGPKGSKGEPGKGEMVDYNGNINEALQPSRGPALRGPPGLPGQIGPPGAPGIPGQKGEIGLPGPPGHDGEKGPRGKPGDMGPPGPQGPPGKDGPPGVKGENGHPGSPGEKGEKGETGQAGSPGEKGEAGEKGNPGAEGLQGVPGPKGEAGLDGAKGEKGFQGEKGDRGPLGLPGTPGPIGVPGPAGPKGERGSKGDPGMTGPTGAAGLPGLHGPPGDKGNRGERGKKGSRGPKGDKGDQGAPGLDAPCPLGEDGLPVQGCWNK

SEQ ID NO: 47669 - protein, 705 aa, Artificial Sequence
  derived and/or modified sequence
MVAERTHKAAATGARGPGELGAPGTVALVAARAERGARLPSPGSCGLLTLALCSLALSLLAHFRTAELQARVLRLEAERGEQQMETAILGRVNQLLDEKWKLHSRRRREAPKTSPGCNCPPAFQGPTGRPGLPGSPGDAGLSIIGPRGPPGQPGTRGFPGFPGPIGLDGKPGHPGPKGDMGLTGPPGQPGPQGQKGEKGQCGEYPHRECLSSMPAALRSSQIIALKLLPLLNSVRLAPPPVIKRRTFQGEQSQASIQGPPGPPGPPGPSGPLGHPGLPGPMGPPGLPGPPGPKGDPGIQGYHGRKGERGMPGMPGKHGAKGAPGIAVAGMKGEPGIPGTKGEKGAEGSPGLPGLLGQKGEKGDAGNSIGGGRGEPGPPGLPGPPGPKGEAGVDGQVGPPGQPGDKGERGAAGEQGPDGPKGSKGEPGKGEMVDYNGNINEALQEIRTLALMGPPGLPGQIGPPGAPGIPGQKGEIGLPGPPGHDGEKGPRGKPGDMGPPGPQGPPGKDGPPGVKGENGHPGSPGEKGEKGETGQAGSPGEKGEAGEKGNPGAEVPGLPGPEGPPGPPGLQGVPGPKGEAGLDGAKGEKGFQGEKGDRGPLGLPGASGLDGRPGPPGTPGPIGVPGPAGPKGERGSKGDPGMTGPTGAAGLPGLHGPPGDKGNRGERGKKGSRGPKGDKGDQGAPGLDAPCPLGEDGLPVQGCWNK

SEQ ID NO: 47670 - protein, 717 aa, Artificial Sequence
  derived and/or modified sequence
MVAERTHKAAATGARGPGELGAPGTVALVAARAERGARLPSPGSCGLLTLALCSLALSLLAHFRTAELQARVLRLEAERGEQQMETAILGRVNQLLDEKWKLHSRRRREAPKTSPGCNCPPGPPGPTGRPGLPGDKGAIGMPGRVGSPGDAGLSIIGPRGPPGQPGTRGFPGFPGPIGLDGKPGHPGPKGDMGLTGPPGQPGPQGQKGEKGQCGEYPHRECLSSMPAALRSSQIIALKLLPLLNSVRLAPPPVIKRRTFQGEQSQASIQGPPGPPGPPGPSGPLGHPGLPGPMGPPGLPGPPGPKGDPGIQGYHGRKGERGMPGMPGKHGAKGAPGIAVAGMKGEPGIPGTKGEKGAEGSPGLPGLLGQKGEKGDAGNSIGGGRGEPGPPGLPGPPGPKGEAGVDGQVGPPGQPGDKGERGAAGEQGPDGPKGSKGEPGKGEMVDYNGNINEALQEIRTLALMGPPGLPGQIGPPGAPGIPGQKGEIGLPGPPGHDGEKGPRGKPGDMGPPGPQGPPGKDGPPGVKGENGHPGSPGEKGEKGETGQAGSPGEKGEAGEKGNPGAEVPGLPGPEGPPGPPGLQGVPGPKGEAGLDGAKGEKGFQGEKGDRGPLGLPGASGLDGRPGPPGTPGPIGVPGPAGPKGERGSKGDPGMTGPTGAAGLPGLHGPPGDKGNRGERGKKGSRGPKGDKGDQGAPGLDAPCPLGEDGLPVQGCWNK

SEQ ID NO: 47671 - DNA, 2154 bp, Artificial Sequence
  derived and/or modified sequence
atggtggccgagagaacccacaaggccgccgccaccggcgccagaggccccggcgagctgggcgcccccggcaccgtggccctggtggccgccagagccgagagaggcgccagactgcccagccccggcagctgcggcctgctgaccctggccctgtgcagcctggccctgagcctgctggcccacttcagaaccgccgagctgcaggccagagtgctgagactggaggccgagagaggcgagcagcagatggagaccgccatcctgggcagagtgaaccagctgctggacgagaagtggaagctgcacagcagaagaagaagagaggcccccaagaccagccccggctgcaactgcccccccgccttccagggccccaccggcagacccggcctgcccggcgacaagggcgccatcggcatgcccggcagagtgggcagccccggcgacgccggcctgagcatcatcggccccagaggcccccccggccagcccggcaccagaggcttccccggcttccccggccccatcggcctggacggcaagcccggccaccccggccccaagggcgacatgggcctgaccggcccccccggccagcccggcccccagggccagaagggcgagaagggccagtgcggcgagtacccccacagagagtgcctgagcagcatgcccgccgccctgagaagcagccagatcatcgccctgaagctgctgcccctgctgaacagcgtgagactggcccccccccccgtgatcaagagaagaaccttccagggcgagcagagccaggccagcatccagggcccccccggcccccccggcccccccggccccagcggccccctgggccaccccggcctgcccggccccatgggcccccccggcctgcccggcccccccggccccaagggcgaccccggcatccagggctaccacggcagaaagggcgagagaggcatgcccggcatgcccggcaagcacggcgccaagggcgcccccggcatcgccgtggccggcatgaagggcgagcccggcatccccggcaccaagggcgagaagggcgccgagggcagccccggcctgcccggcctgctgggccagaagggcgagaagggcgacgccggcaacagcatcggcggcggcagaggcgagcccggcccccccggcctgcccggcccccccggccccaagggcgaggccggcgtggacggccaggtgggcccccccggccagcccggcgacaagggcgagagaggcgccgccggcgagcagggccccgacggccccaagggcagcaagggcgagcccggcaagggcgagatggtggactacaacggcaacatcaacgaggccctgcaggagatcagaaccctggccctgatgggcccccccggcctgcccggccagatcggcccccccggcgcccccggcatccccggccagaagggcgagatcggcctgcccggcccccccggccacgacggcgagaagggccccagaggcaagcccggcgacatgggcccccccggcccccagggcccccccggcaaggacggcccccccggcgtgaagggcgagaacggccaccccggcagccccggcgagaagggcgagaagggcgagaccggccaggccggcagccccggcgagaagggcgaggccggcgagaagggcaaccccggcgccgaggtgcccggcctgcccggccccgagggcccccccggcccccccggcctgcagggcgtgcccggccccaagggcgaggccggcctggacggcgccaagggcgagaagggcttccagggcgagaagggcgacagaggccccctgggcctgcccggcgccagcggcctggacggcagacccggcccccccggcacccccggccccatcggcgtgcccggccccgccggccccaagggcgagagaggcagcaagggcgaccccggcatgaccggccccaccggcgccgccggcctgcccggcctgcacggcccccccggcgacaagggcaacagaggcgagagaggcaagaagggcagcagaggccccaagggcgacaagggcgaccagggcgcccccggcctggacgccccctgccccctgggcgaggacggcctgcccgtgcagggctgctggaacaagtag

SEQ ID NO: 47672 - DNA, 2067 bp, Artificial Sequence
  derived and/or modified sequence
atggtggccgagagaacccacaaggccgccgccaccggcgccagaggccccggcgagctgggcgcccccggcaccgtggccctggtggccgccagagccgagagaggcgccagactgcccagccccggcagctgcggcctgctgaccctggccctgtgcagcctggccctgagcctgctggcccacttcagaaccgccgagctgcaggccagagtgctgagactggaggccgagagaggcgagcagcagatggagaccgccatcctgggcagagtgaaccagctgctggacgagaagtggaagctgcacagcagaagaagaagagaggcccccaagaccagccccggctgcaactgcccccccgccttccagggccccaccggcagacccggcctgcccggccagcccggcaccagaggcttccccggcttccccggccccatcggcctggacggcaagcccggccaccccggccccaagggcgacatgggcctgaccggcccccccggccagcccggcccccagggccagaagggcgagaagggccagtgcggcgagtacccccacagagagtgcctgagcagcatgcccgccgccctgagaagcagccagatcatcgccctgaagctgctgcccctgctgaacagcgtgagactggcccccccccccgtgatcaagagaagaaccttccagggcgagcagagccaggccagcatccagggcccccccggcccccccggcccccccggccccagcggccccctgggccaccccggcctgcccggccccatgggcccccccggcctgcccggcccccccggccccaagggcgaccccggcatccagggctaccacggcagaaagggcgagagaggcatgcccggcatgcccggcaagcacggcgccaagggcgcccccggcatcgccgtggccggcatgaagggcgagcccggcatccccggcaccaagggcgagaagggcgccgagggcagccccggcctgcccggcctgctgggccagaagggcgagaagggcgacgccggcaacagcatcggcggcggcagaggcgagcccggcccccccggcctgcccggcccccccggccccaagggcgaggccggcgtggacggccaggtgggcccccccggccagcccggcgacaagggcgagagaggcgccgccggcgagcagggccccgacggccccaagggcagcaagggcgagcccggcaagggcgagatggtggactacaacggcaacatcaacgaggccctgcaggagatcagaaccctggccctgatgggcccccccggcctgcccggccagatcggcccccccggcgcccccggcatccccggccagaagggcgagatcggcctgcccggcccccccggccacgacggcgagaagggccccagaggcaagcccggcgacatgggcccccccggcccccagggcccccccggcaaggacggcccccccggcgtgaagggcgagaacggccaccccggcagccccggcgagaagggcgagaagggcgagaccggccaggccggcagccccggcgagaagggcgaggccggcgagaagggcaaccccggcgccgaggtgcccggcctgcccggccccgagggcccccccggcccccccggcctgcagggcgtgcccggccccaagggcgaggccggcctggacggcgccaagggcgagaagggcttccagggcgagaagggcgacagaggccccctgggcctgcccggcgccagcggcctggacggcagacccggcccccccggcacccccggccccatcggcgtgcccggccccgccggccccaagggcgagagaggcagcaagggcgaccccggcatgaccggccccaccggcgccgccggcctgcccggcctgcacggcccccccggcgacaagggcaacagaggcgagagaggcaagaagggcagcagaggccccaagggcgacaagggcgaccagggcgcccccggcctggacgccccctgccccctgggcgaggacggcctgcccgtgcagggctgctggaacaagtag

SEQ ID NO: 47673 - DNA, 2112 bp, Artificial Sequence
  derived and/or modified sequence
atggtggccgagagaacccacaaggccgccgccaccggcgccagaggccccggcgagctgggcgcccccggcaccgtggccctggtggccgccagagccgagagaggcgccagactgcccagccccggcagctgcggcctgctgaccctggccctgtgcagcctggccctgagcctgctggcccacttcagaaccgccgagctgcaggccagagtgctgagactggaggccgagagaggcgagcagcagatggagaccgccatcctgggcagagtgaaccagctgctggacgagaagtggaagctgcacagcagaagaagaagagaggcccccaagaccagccccggctgcaactgcccccccggcccccccggccccaccggcagacccggcctgcccggcgacaagggcgccatcggcatgcccggcagagtgggcagccccggcgacgccggcctgagcatcatcggccccagaggcccccccggccagcccggcaccagaggcttccccggcttccccggccccatcggcctggacggcaagcccggccaccccggccccaagggcgacatgggcctgaccggcccccccggccagcccggcccccagggccagaagggcgagaagggccagtgcggcgagtacccccacagagagtgcctgagcagcatgcccgccgccctgagaagcagccagatcatcgccctgaagctgctgcccctgctgaacagcgtgagactggcccccccccccgtgatcaagagaagaaccttccagggcgagcagagccaggccagcatccagggcccccccggcccccccggcccccccggccccagcggccccctgggccaccccggcctgcccggccccatgggcccccccggcctgcccggcccccccggccccaagggcgaccccggcatccagggctaccacggcagaaagggcgagagaggcatgcccggcatgcccggcaagcacggcgccaagggcgcccccggcatcgccgtggccggcatgaagggcgagcccggcatccccggcaccaagggcgagaagggcgccgagggcagccccggcctgcccggcctgctgggccagaagggcgagaagggcgacgccggcaacagcatcggcggcggcagaggcgagcccggcccccccggcctgcccggcccccccggccccaagggcgaggccggcgtggacggccaggtgggcccccccggccagcccggcgacaagggcgagagaggcgccgccggcgagcagggccccgacggccccaagggcagcaagggcgagcccggcaagggcgagatggtggactacaacggcaacatcaacgaggccctgcagcccagcagaggccccgccctgagaggcccccccggcctgcccggccagatcggcccccccggcgcccccggcatccccggccagaagggcgagatcggcctgcccggcccccccggccacgacggcgagaagggccccagaggcaagcccggcgacatgggcccccccggcccccagggcccccccggcaaggacggcccccccggcgtgaagggcgagaacggccaccccggcagccccggcgagaagggcgagaagggcgagaccggccaggccggcagccccggcgagaagggcgaggccggcgagaagggcaaccccggcgccgagggcctgcagggcgtgcccggccccaagggcgaggccggcctggacggcgccaagggcgagaagggcttccagggcgagaagggcgacagaggccccctgggcctgcccggcgccagcggcctggacggcagacccggcccccccggcacccccggccccatcggcgtgcccggccccgccggccccaagggcgagagaggcagcaagggcgaccccggcatgaccggccccaccggcgccgccggcctgcccggcctgcacggcccccccggcgacaagggcaacagaggcgagagaggcaagaagggcagcagaggccccaagggcgacaagggcgaccagggcgcccccggcctggacgccccctgccccctgggcgaggacggcctgcccgtgcagggctgctggaacaagtag

SEQ ID NO: 47674 - DNA, 2076 bp, Artificial Sequence
  derived and/or modified sequence
atggtggccgagagaacccacaaggccgccgccaccggcgccagaggccccggcgagctgggcgcccccggcaccgtggccctggtggccgccagagccgagagaggcgccagactgcccagccccggcagctgcggcctgctgaccctggccctgtgcagcctggccctgagcctgctggcccacttcagaaccgccgagctgcaggccagagtgctgagactggaggccgagagaggcgagcagcagatggagaccgccatcctgggcagagtgaaccagctgctggacgagaagtggaagctgcacagcagaagaagaagagaggcccccaagaccagccccggctgcaactgcccccccggcccccccggccccaccggcagacccggcctgcccggcgacaagggcgccatcggcatgcccggcagagtgggcagccccggcgacgccggcctgagcatcatcggccccagaggcccccccggccagcccggcaccagaggcttccccggcttccccggccccatcggcctggacggcaagcccggccaccccggccccaagggcgacatgggcctgaccggcccccccggccagcccggcccccagggccagaagggcgagaagggccagtgcggcgagtacccccacagagagtgcctgagcagcatgcccgccgccctgagaagcagccagatcatcgccctgaagctgctgcccctgctgaacagcgtgagactggcccccccccccgtgatcaagagaagaaccttccagggcgagcagagccaggccagcatccagggcccccccggcccccccggcccccccggccccagcggccccctgggccaccccggcctgcccggccccatgggcccccccggcctgcccggcccccccggccccaagggcgaccccggcatccagggctaccacggcagaaagggcgagagaggcatgcccggcatgcccggcaagcacggcgccaagggcgcccccggcatcgccgtggccggcatgaagggcgagcccggcatccccggcaccaagggcgagaagggcgccgagggcagccccggcctgcccggcctgctgggccagaagggcgagaagggcgacgccggcaacagcatcggcggcggcagaggcgagcccggcccccccggcctgcccggcccccccggccccaagggcgaggccggcgtggacggccaggtgggcccccccggccagcccggcgacaagggcgagagaggcgccgccggcgagcagggccccgacggccccaagggcagcaagggcgagcccggcaagggcgagatggtggactacaacggcaacatcaacgaggccctgcagcccagcagaggccccgccctgagaggcccccccggcctgcccggccagatcggcccccccggcgcccccggcatccccggccagaagggcgagatcggcctgcccggcccccccggccacgacggcgagaagggccccagaggcaagcccggcgacatgggcccccccggcccccagggcccccccggcaaggacggcccccccggcgtgaagggcgagaacggccaccccggcagccccggcgagaagggcgagaagggcgagaccggccaggccggcagccccggcgagaagggcgaggccggcgagaagggcaaccccggcgccgagggcctgcagggcgtgcccggccccaagggcgaggccggcctggacggcgccaagggcgagaagggcttccagggcgagaagggcgacagaggccccctgggcctgcccggcacccccggccccatcggcgtgcccggccccgccggccccaagggcgagagaggcagcaagggcgaccccggcatgaccggccccaccggcgccgccggcctgcccggcctgcacggcccccccggcgacaagggcaacagaggcgagagaggcaagaagggcagcagaggccccaagggcgacaagggcgaccagggcgcccccggcctggacgccccctgccccctgggcgaggacggcctgcccgtgcagggctgctggaacaagtag

SEQ ID NO: 47675 - DNA, 2118 bp, Artificial Sequence
  derived and/or modified sequence
atggtggccgagagaacccacaaggccgccgccaccggcgccagaggccccggcgagctgggcgcccccggcaccgtggccctggtggccgccagagccgagagaggcgccagactgcccagccccggcagctgcggcctgctgaccctggccctgtgcagcctggccctgagcctgctggcccacttcagaaccgccgagctgcaggccagagtgctgagactggaggccgagagaggcgagcagcagatggagaccgccatcctgggcagagtgaaccagctgctggacgagaagtggaagctgcacagcagaagaagaagagaggcccccaagaccagccccggctgcaactgcccccccgccttccagggccccaccggcagacccggcctgcccggcagccccggcgacgccggcctgagcatcatcggccccagaggcccccccggccagcccggcaccagaggcttccccggcttccccggccccatcggcctggacggcaagcccggccaccccggccccaagggcgacatgggcctgaccggcccccccggccagcccggcccccagggccagaagggcgagaagggccagtgcggcgagtacccccacagagagtgcctgagcagcatgcccgccgccctgagaagcagccagatcatcgccctgaagctgctgcccctgctgaacagcgtgagactggcccccccccccgtgatcaagagaagaaccttccagggcgagcagagccaggccagcatccagggcccccccggcccccccggcccccccggccccagcggccccctgggccaccccggcctgcccggccccatgggcccccccggcctgcccggcccccccggccccaagggcgaccccggcatccagggctaccacggcagaaagggcgagagaggcatgcccggcatgcccggcaagcacggcgccaagggcgcccccggcatcgccgtggccggcatgaagggcgagcccggcatccccggcaccaagggcgagaagggcgccgagggcagccccggcctgcccggcctgctgggccagaagggcgagaagggcgacgccggcaacagcatcggcggcggcagaggcgagcccggcccccccggcctgcccggcccccccggccccaagggcgaggccggcgtggacggccaggtgggcccccccggccagcccggcgacaagggcgagagaggcgccgccggcgagcagggccccgacggccccaagggcagcaagggcgagcccggcaagggcgagatggtggactacaacggcaacatcaacgaggccctgcaggagatcagaaccctggccctgatgggcccccccggcctgcccggccagatcggcccccccggcgcccccggcatccccggccagaagggcgagatcggcctgcccggcccccccggccacgacggcgagaagggccccagaggcaagcccggcgacatgggcccccccggcccccagggcccccccggcaaggacggcccccccggcgtgaagggcgagaacggccaccccggcagccccggcgagaagggcgagaagggcgagaccggccaggccggcagccccggcgagaagggcgaggccggcgagaagggcaaccccggcgccgaggtgcccggcctgcccggccccgagggcccccccggcccccccggcctgcagggcgtgcccggccccaagggcgaggccggcctggacggcgccaagggcgagaagggcttccagggcgagaagggcgacagaggccccctgggcctgcccggcgccagcggcctggacggcagacccggcccccccggcacccccggccccatcggcgtgcccggccccgccggccccaagggcgagagaggcagcaagggcgaccccggcatgaccggccccaccggcgccgccggcctgcccggcctgcacggcccccccggcgacaagggcaacagaggcgagagaggcaagaagggcagcagaggccccaagggcgacaagggcgaccagggcgcccccggcctggacgccccctgccccctgggcgaggacggcctgcccgtgcagggctgctggaacaagtag

SEQ ID NO: 47676 - DNA, 2154 bp, Artificial Sequence
  derived and/or modified sequence
atggtggccgagagaacccacaaggccgccgccaccggcgccagaggccccggcgagctgggcgcccccggcaccgtggccctggtggccgccagagccgagagaggcgccagactgcccagccccggcagctgcggcctgctgaccctggccctgtgcagcctggccctgagcctgctggcccacttcagaaccgccgagctgcaggccagagtgctgagactggaggccgagagaggcgagcagcagatggagaccgccatcctgggcagagtgaaccagctgctggacgagaagtggaagctgcacagcagaagaagaagagaggcccccaagaccagccccggctgcaactgcccccccggcccccccggccccaccggcagacccggcctgcccggcgacaagggcgccatcggcatgcccggcagagtgggcagccccggcgacgccggcctgagcatcatcggccccagaggcccccccggccagcccggcaccagaggcttccccggcttccccggccccatcggcctggacggcaagcccggccaccccggccccaagggcgacatgggcctgaccggcccccccggccagcccggcccccagggccagaagggcgagaagggccagtgcggcgagtacccccacagagagtgcctgagcagcatgcccgccgccctgagaagcagccagatcatcgccctgaagctgctgcccctgctgaacagcgtgagactggcccccccccccgtgatcaagagaagaaccttccagggcgagcagagccaggccagcatccagggcccccccggcccccccggcccccccggccccagcggccccctgggccaccccggcctgcccggccccatgggcccccccggcctgcccggcccccccggccccaagggcgaccccggcatccagggctaccacggcagaaagggcgagagaggcatgcccggcatgcccggcaagcacggcgccaagggcgcccccggcatcgccgtggccggcatgaagggcgagcccggcatccccggcaccaagggcgagaagggcgccgagggcagccccggcctgcccggcctgctgggccagaagggcgagaagggcgacgccggcaacagcatcggcggcggcagaggcgagcccggcccccccggcctgcccggcccccccggccccaagggcgaggccggcgtggacggccaggtgggcccccccggccagcccggcgacaagggcgagagaggcgccgccggcgagcagggccccgacggccccaagggcagcaagggcgagcccggcaagggcgagatggtggactacaacggcaacatcaacgaggccctgcaggagatcagaaccctggccctgatgggcccccccggcctgcccggccagatcggcccccccggcgcccccggcatccccggccagaagggcgagatcggcctgcccggcccccccggccacgacggcgagaagggccccagaggcaagcccggcgacatgggcccccccggcccccagggcccccccggcaaggacggcccccccggcgtgaagggcgagaacggccaccccggcagccccggcgagaagggcgagaagggcgagaccggccaggccggcagccccggcgagaagggcgaggccggcgagaagggcaaccccggcgccgaggtgcccggcctgcccggccccgagggcccccccggcccccccggcctgcagggcgtgcccggccccaagggcgaggccggcctggacggcgccaagggcgagaagggcttccagggcgagaagggcgacagaggccccctgggcctgcccggcgccagcggcctggacggcagacccggcccccccggcacccccggccccatcggcgtgcccggccccgccggccccaagggcgagagaggcagcaagggcgaccccggcatgaccggccccaccggcgccgccggcctgcccggcctgcacggcccccccggcgacaagggcaacagaggcgagagaggcaagaagggcagcagaggccccaagggcgacaagggcgaccagggcgcccccggcctggacgccccctgccccctgggcgaggacggcctgcccgtgcagggctgctggaacaagtag

SEQ ID NO: 47677 - DNA, 2154 bp, Artificial Sequence
  derived and/or modified sequence
atggtggccgagagaacccataaagcagcagccacgggcgccaggggccccggagaactgggcgcacctggcacagtggccctagtggccgcccgcgccgagaggggtgctcgcctccctagcccgggttcatgcgggctgctcacattagctctatgctcccttgctctgagcttactcgcacactttcgtactgccgaactgcaggcacgggtactcagactggaagccgaaaggggggagcagcaaatggaaacagccattctggggcgcgtgaatcaattactagacgaaaaatggaagctccacagccggcgtagaagggaagctccaaagacctcgcctggctgtaattgtcccccagcctttcagggacctactggacgcccaggccttcccggagacaagggtgccattggaatgccaggccgcgtcggtagccctggcgatgctggcttgtccatcatcggccccagaggaccgcctggccagcctggaacccgcggcttccctggctttcccgggcctattgggctggatggaaagcccggtcacccaggaccaaagggtgatatgggtctgaccggaccccctggtcaacccgggccacaaggacagaagggagaaaagggtcagtgcggagagtacccccacagggagtgtctcagtagcatgccagcagctttgcggtcaagccaaataatagcacttaaactgctgcctcttctgaattcagtgaggctggcccccccaccagtcattaagagacgcacgtttcaaggtgaacagtcccaggcatccattcagggacctcccggacccccaggcccccccggaccaagcggaccgctcggtcacccagggcttcccgggcccatggggccacctgggttgcccgggccccccgggccaaaaggggatcctggaatccagggctatcacgggcgcaaaggggagcgcggcatgcccggaatgcctggaaagcacggcgcaaagggcgcccctggcatcgccgtggcagggatgaaaggggaacccggtatccccgggaccaagggggagaaaggggccgagggttccccaggcctgcccggcctactgggacagaagggtgagaagggggacgctgggaactctattggtggcgggcgaggggagccaggaccacccggactccccggaccaccaggacccaaaggggaagcaggggtcgacggacaggtggggcccccaggacagccaggcgacaagggtgaaagaggtgcagcaggcgaacaggggcctgacgggccaaaagggagcaaaggtgagccaggcaaaggtgaaatggttgactacaatgggaacattaacgaagctctgcaggagattcgaaccctagcgctgatgggacccccaggcttgcctggacagatcggaccacccggggcacccggcatcccagggcaaaagggagagatcggccttccagggcctccaggtcacgatggagagaaaggaccacggggcaagcctggcgacatgggaccacctgggccccagggaccccctggaaaggacggccccccaggagtgaaaggggagaacggccacccaggatcgcccggagaaaagggagagaagggcgaaacagggcaggctggctcaccgggggaaaaaggcgaggcgggcgaaaaggggaaccccggtgcagaagtgcctggcttaccagggccagaaggccctcccggccctccgggtcttcagggagtccccggccctaagggtgaggctggacttgatggagccaaaggcgaaaagggctttcaaggcgagaaaggggacagaggaccactcgggcttccgggtgcttctggcctggacggtcgaccaggaccaccaggcactcccggccccatcggggtgcctggccctgcgggccccaagggcgagcgagggtccaagggagacccaggtatgaccggaccgactggggctgccggtctgcctggtttgcacggtccgcctggtgacaaagggaatcgaggcgagcgcggtaaaaagggcagccgggggcccaaaggcgataagggtgatcagggagcacccggccttgacgccccctgtcccctcggtgaggacggtctgcccgtgcagggctgttggaacaaatag

SEQ ID NO: 47678 - DNA, 2067 bp, Artificial Sequence
  derived and/or modified sequence
atggttgccgagcgtactcataaagccgccgcgacgggtgctaggggccccggcgagttgggtgcaccaggaactgtcgccctggttgctgcgagggccgaacgtggtgcaaggctaccctcccctgggtcctgcggactgttgactctggcactttgttctttagctttaagcctgctggcccacttccggactgccgagctacaggccagagtgctgcgacttgaagcagaacgcggcgaacagcagatggagaccgcaatactgggtagggttaaccagctgctcgacgaaaagtggaaactgcactcgaggagacggcgggaagcccctaagacctccccaggatgtaattgtccacctgccttccagggtcctactggacgacctggactgcctggccagcctgggacgcgaggatttccagggtttcctgggcctatcggcctcgatggcaagcctggccaccctgggccgaagggcgacatgggcctgactggtcctcctggtcaaccaggtcctcaagggcagaaaggagagaagggacagtgtggtgagtatcctcaccgggagtgcctcagttctatgccagcagctcttcgcagttcccagatcatcgctctgaagctgctcccgcttcttaacagcgtacggttggctccacctcctgtgataaagaggaggacttttcagggagaacaaagtcaggcatcaatccagggaccacccggcccacctggccctcccggcccctctgggcccctcggccacccaggacttccaggccccatgggccctccgggcctgccaggcccgccgggtccaaagggcgacccaggcattcagggataccacggccgtaagggggagaggggtatgcccggcatgccgggcaaacacggtgcaaaaggagcaccgggcatcgctgtggcgggtatgaagggcgagcctggaatcccgggtacgaaaggcgagaaaggggcggagggctctcctggattacccgggcttttgggacagaaaggggaaaagggagacgccgggaattcgatcgggggagggcgcggcgagccaggaccgccagggctccccggaccccctggcccaaagggcgaggcgggtgtggatgggcaggtggggccccccggtcagcccggcgacaaaggcgaaagaggagcagccggagagcaggggcctgacggacccaaaggatcaaagggagaacccggaaagggcgaaatggtagattataatggtaacattaatgaagccctgcaggaaatccggacgttagcgcttatgggccccccgggtctgcccgggcagatcggaccaccaggagctcctgggatccctggacagaagggggagattgggctgcctggacctcctggtcacgacggggaaaaaggcccccgtggtaaacccggggacatgggccccccaggaccgcagggacctcctggaaaggatggccctcctggggtgaagggggaaaatggacatcctggttccccaggggagaaaggtgaaaagggagagaccggccaggctggttcacctggtgaaaagggggaggctggagagaaggggaacccgggcgctgaggttcctggcctccctggaccagagggcccgccgggtccacctggcctccaaggcgtgcccggaccaaaaggagaagctggactcgatggagccaagggggagaaaggatttcagggggaaaaaggcgaccgcggacctctggggcttcctggcgcctcaggcttagatggacggcctggacccccagggactccagggcctattggtgttccgggccccgcgggaccgaagggagaacgcggatccaagggtgaccccggcatgaccggtccaactggggctgctggccttcctggacttcatgggccaccgggcgacaagggcaataggggagaacgaggcaaaaaggggagtagggggcccaagggcgacaagggcgaccaaggagcacctggactggacgccccttgcccactaggggaggacgggctccccgtgcagggctgctggaataaatag

SEQ ID NO: 47679 - DNA, 2112 bp, Artificial Sequence
  derived and/or modified sequence
atggtcgctgaacggactcataaggccgcagctacaggggcgcgcggacccggcgagctgggcgcacccggcacggtggccctggtggctgctagggcagagagaggcgcaaggctccccagcccaggttcttgcggactgttaactctggcactgtgttcccttgctctgagtctactagctcatttccgcaccgcagagctccaagcaagagtgctgcggctggaggctgaaagaggggagcagcaaatggaaacagccattctaggaagagtgaatcagctgttggatgaaaagtggaagctgcattctaggcgccggagagaggcacctaagacaagtccgggctgtaactgcccgccgggacctccaggccctaccggaaggccagggctacccggcgacaaaggtgccataggcatgccgggccgggtcggatcacccggcgacgctggtctctccattattggcccccgcgggccccccgggcaacccggaactaggggcttcccaggatttcccggccccattggcctggatgggaaaccgggccatcctggaccaaagggtgacatggggttgaccggacctccaggccagcccggcccccagggacagaaaggtgagaagggccagtgcggggagtatccacaccgggaatgtctgtcttccatgcctgcggccttgcgctcaagccagatcatcgcactcaaactgcttcccctgcttaactcagtccggctcgcccccccaccagtaatcaagagacggacctttcagggcgagcagtcacaagcttcgatccagggccccccaggaccccccgggccaccaggcccctcgggccctttaggccaccccggtttgcctgggcccatgggcccccccgggctgcctggaccacctggtccaaaaggtgaccccggaatacaagggtaccacggaaggaaaggtgaaaggggaatgccgggtatgcctggcaagcatggtgccaaaggggcccccggtatcgccgtcgctgggatgaagggcgagcccggcattccaggaacaaagggggaaaagggagccgaggggtcccccgggcttcccgggctccttggccagaagggagagaagggagacgctgggaacagtatcgggggagggcgcggcgagccagggccccccgggttgccaggcccacccggacccaagggagaggccggcgtggacggtcaggtcggcccacctggacagcctggcgacaaaggcgagcgcggtgcggcaggagagcagggacccgacgggccgaaaggaagtaagggtgaaccaggcaaaggagagatggtggattacaatggaaacataaatgaggcactccagccctctcgcggccccgctctccgggggccgccaggcctgccaggacagatcgggcctccgggagccccgggtatcccaggacaaaagggagagatcgggctccctggcccacccgggcacgatggcgaaaaaggaccacgcggcaagccaggcgatatgggcccaccaggaccccaaggccctccaggcaaggacgggccaccaggagttaagggcgagaacgggcacccaggatcccccggtgagaaaggggaaaagggcgaaaccggacaagcagggagccccggggaaaaaggggaggccggcgagaaaggcaaccccggagcggagggcttgcaaggcgtccccgggccaaagggagaagcaggcctggacggcgctaaaggcgaaaaaggtttccagggggaaaaaggcgaccggggcccgttgggcctcccaggtgcgagcggcctggatggacggccaggcccaccaggaacccctggccccatcggcgtaccaggtcctgccggacccaaaggcgagagggggtcaaagggcgaccccgggatgacaggcccaaccggggcagccggtctccccggtctccacgggcctcccggcgacaagggaaacagaggagaaaggggaaagaagggcagtcgcggcccgaaaggtgacaaaggagatcagggcgctccagggctggatgcaccctgtccgctaggagaggacgggttgcctgtgcagggatgttggaacaagtag

SEQ ID NO: 47680 - DNA, 2076 bp, Artificial Sequence
  derived and/or modified sequence
atggtggcggagagaacacacaaggctgcggccactggagcgcgaggccccggtgaactgggtgccccagggactgtcgcactggtggctgcgcgggcagagcgtggtgcgagactaccatcaccggggtcatgcggactccttacacttgctctgtgcagtctcgcacttagtctgctcgcccattttcgcacagccgaactgcaggctcgggttcttcggttagaagctgagcgcggtgagcaacagatggaaacggctattcttgggcgagtgaatcagttgttggacgaaaagtggaaacttcacagtaggcgccgaagagaggcacctaaaacatcccccggctgtaattgcccccccgggccccccgggcctaccggacggcctgggctccccggggacaaaggtgccattgggatgccgggacgggtgggaagccccggagatgctggactctctataattggtccccggggacccccaggacagcctggaacgagaggcttcccaggtttccccggccctattgggcttgacggaaaacccggacatccaggccctaaaggagatatgggactcaccggcccaccgggtcagccgggtccgcagggccagaagggagagaaggggcagtgcggagaatacccacaccgcgagtgcctgagctctatgcccgcagcattgaggtctagccagatcatcgctctcaagttacttcctctcctgaacagcgtccgcctggctcccccgccagtaatcaaacgcagaaccttccagggcgagcagtctcaggcgtcaatccaggggccacccggaccgcccggaccgcctggaccatctgggcctctggggcatcccgggcttcctgggcccatgggtcccccaggactgccgggacctcctggcccgaaaggcgaccccgggattcagggataccacggcaggaagggcgagagaggaatgccaggcatgcccggcaaacatggtgccaagggcgccccaggcatcgccgttgcgggcatgaagggcgaacccggaatccccgggactaaaggcgaaaaaggcgcggaaggatcgccgggcttaccagggcttctgggccagaagggagaaaagggtgacgcggggaattcaatcggcggaggtaggggtgagccaggacctcctggactgcccgggcccccaggcccgaaaggagaggcaggggtggacggacaggtggggccccctggtcaaccaggcgacaaaggagaaaggggagccgcaggagagcagggtccagacgggcccaaaggcagtaagggagaacccggtaagggcgaaatggtcgactacaacggcaacattaacgaagcgctgcagccatcaagaggacccgcacttagaggtccccccgggttaccggggcagattgggccaccaggcgcccccgggatacccggacaaaaaggcgaaatcgggctgcccggtcctcctggacacgatggggagaagggaccccgggggaagcctggtgatatgggcccaccggggccccagggccctcccggcaaagacggacccccaggtgtgaagggagaaaatggccatcccggctcgcctggggaaaagggcgagaaaggcgagacaggtcaggccggttctccgggcgagaaaggagaggccggtgaaaaaggtaacccgggagcggagggtctgcaaggtgtccctggtcccaaaggagaggccggtctggatggcgctaaaggtgaaaagggcttccagggtgagaaaggcgacagaggacctctcgggctgcctggaacacctggtccgatcggtgtgccaggccccgccgggcccaagggggagcgggggagtaaaggcgacccaggcatgaccggcccaaccggggccgcaggcctgccagggcttcacggccctcctggcgacaaaggaaaccggggggagcgaggaaaaaaagggtcaagggggcccaaaggcgacaagggggaccaaggcgctcccggactcgacgcgccctgccctttgggggaagacggtctgccggtccaaggctgttggaacaagtag

SEQ ID NO: 47681 - DNA, 2118 bp, Artificial Sequence
  derived and/or modified sequence
atggttgcagagcgcacacacaaggctgctgcaaccggggcccgcggacctggagagctgggggcaccgggcacagttgctctggttgctgctcgcgccgagcgtggagcacgcttgccttcacctgggtcatgcgggttgctaaccctcgcactatgctcattagccctgagcctgctagctcactttcgtaccgctgagttgcaagcacgcgtcctccggctggaggccgagcgaggggaacagcagatggagaccgccatcctgggaagagtcaatcaactcttggacgagaaatggaaattgcacagtcgtcgccgccgcgaggcccctaaaacttcccctggctgcaactgtcctcctgccttccaggggcctacagggcgcccaggtcttccaggcagcccaggcgacgccgggctcagtattatcgggcctagaggccccccagggcagccgggcacccgcggcttcccaggcttccctggacctattggactggatggcaagccagggcaccccggccctaagggcgatatgggattaacaggaccacccgggcagcccgggccccaaggccagaagggggagaaaggacagtgtggcgaatacccacatcgggagtgcctgagctctatgccggccgcgcttcgatctagtcaaataattgcactgaaactgctgcccctactgaatagtgtgaggcttgctcctccgccggtgatcaaacgaaggactttccagggcgagcagtctcaagctagtatccagggccccccaggcccccctggacccccaggccccagcggcccattgggtcatcccggactgccaggacctatgggaccacccggattacccggccctcccgggccaaagggggaccccgggatccagggttatcatggacgcaagggcgagcgggggatgcccgggatgcctggcaagcacggtgcaaagggagctcccggcatagccgttgctggcatgaagggcgagccaggcatccctggaaccaagggcgaaaaaggcgcggagggatcccccggactgccgggtctgcttggccagaaaggggaaaagggtgatgcgggtaactcaatcggcgggggacgcggagaacctggccctcccggactgccgggcccaccaggacctaaaggtgaagccggagtggacgggcaggtgggcccccccgggcagcccggggataaaggcgaaagaggcgcagctggggagcagggcccagacggcccaaagggtagtaagggagagccaggcaaaggcgaaatggttgactataatggcaacatcaacgaggctctgcaagaaattagaactcttgccctgatgggccctcctgggctgccgggacagatcggtccgccaggcgcgcccggaattcctggccaaaagggggaaatcggcctgcccggccctccaggacatgacggagagaagggtcctagaggtaaacccggtgacatgggtccccctggaccccaggggccccccggtaaggatggcccgccaggagtcaaaggagagaacggccaccccgggtctcctggcgagaagggagaaaaaggcgagacagggcaggcaggctctccaggggaaaaaggcgaggcgggtgaaaaagggaatcctggcgctgaggtgcctgggctgccaggcccggaggggcccccaggcccgccagggctgcagggagttcccggccccaagggggaagctggcttggatggcgcaaaaggagagaaggggttccagggagagaagggggatagaggtcctctaggcttgcccggagctagcggcctcgacggtcgcccaggaccccccggcacgccgggtcccatcggagtgcctggccctgcaggcccgaaaggcgaacgaggaagtaagggggatcctggaatgacaggccccacaggggccgccgggctccctggcctgcatggaccccccggagataaagggaaccgaggcgagcgaggtaaaaaaggatctcgcggacccaaaggcgataagggggatcaaggggccccaggcttggacgccccatgccccctgggcgaggatggcctgcccgtacagggttgttggaataaatag

SEQ ID NO: 47682 - DNA, 2154 bp, Artificial Sequence
  derived and/or modified sequence
atggttgccgaaagaacccacaaggccgccgccactggtgctcggggccccggggagctcggcgccccaggcaccgtggcattagtcgcagcacgggcagagcggggggctcgtctcccttccccggggagctgtggcctgctcaccctggcactgtgtagcctagccctgtcgctgttagctcactttcggacagcggaactccaggctcgcgtgctgcggttggaggccgagagaggtgaacagcagatggaaacagccatactcggcagagttaaccagctcctcgatgagaagtggaaactacacagtaggagaaggcgcgaagctccaaagaccagtcctgggtgcaactgtcctccaggccccccaggccccacgggcagaccaggacttcccggtgataaaggtgctatcggaatgcccggtagggttgggagcccaggtgacgcaggtctctctatcataggtcctagaggccctccgggacagccgggaactagaggtttcccaggcttcccggggcccatagggcttgatgggaagccaggacaccccgggccgaagggtgacatgggcctgacaggcccaccaggtcagcctgggcctcagggacagaagggggaaaagggtcagtgcggggagtaccctcatagggaatgtttgagttctatgcccgcagcactgaggtcttcacagattatcgccctgaagctgttgcccctcctgaactctgtgcgtttggcccccccacctgtgatcaagcggcgcactttccaaggcgagcagtcccaggcctccatacagggaccccccggcccaccgggccctcccggtccgtctggccctctggggcatccaggtctccccggacccatgggcccaccgggcctccccggcccaccaggccctaagggggatcctggcatacagggttaccacggtaggaagggagagcgcggcatgccaggcatgcccgggaaacatggggcaaaaggcgcgcctggaattgccgttgctggaatgaaaggcgagcctggtatacccggcacaaagggcgagaaaggggcagagggatcccccggcttgcccggcctgttgggtcagaaaggggaaaaaggggacgctggaaactctatcgggggaggacggggcgagcctggcccacctggccttcctggccctccaggacccaagggcgaagccggagttgatggtcaggtcggccctcccggccagccaggcgacaagggggagcgcggagctgcaggtgagcaaggcccagacggcccaaagggctctaaaggggaacctggtaagggagagatggtcgattacaatggcaatataaacgaggcactgcaggaaatcagaacactggctctgatgggccccccaggtctgcctgggcagattggcccacctggcgctccaggtatccctggtcagaagggcgagatcggtctgcccggcccacccgggcacgacggcgagaagggccctcgcggcaagccaggcgatatggggcctccaggcccccagggcccccccggcaaggacggacctcctggtgtgaaaggggaaaatggacacccagggagtcccggtgagaagggggagaagggggagacgggccaggcagggagccccggagagaaaggtgaagccggtgagaagggcaaccccggggccgaggtccccggtcttccgggacctgagggccctcctgggccgccaggacttcagggcgtgcccgggccaaagggcgaagcaggcctggacggggctaagggggaaaaaggctttcaaggcgaaaagggcgaccgaggtcctctaggcctgcccggggcttccggactcgacgggcgcccaggcccacccggcacccctgggcccattggggtgcccggcccggccggcccaaagggcgaaagaggttccaaaggagatccagggatgaccgggcccaccggtgctgcaggactccctggccttcacgggccacctggcgataagggaaatcggggtgagaggggcaagaaggggtcccggggcccaaaaggcgataagggagaccaaggcgcaccaggcctggatgccccttgccccctgggagaggatggcctacctgtgcaggggtgttggaataagtag

SEQ ID NO: 47683 - DNA, 2154 bp, Artificial Sequence
  derived and/or modified sequence
atggtggccgagaggacccacaaggccgccgccaccggggcccggggccctggagagctgggcgcccctggcaccgtggccctggtggccgcccgggcagagcggggggcccggctgcccagccctggcagctgtggcctgctgaccctggccctgtgcagcctggccctgagcctgctggcccacttcagaacagctgagctgcaggcccgggtgctgcggctggaggccgagcggggggagcagcagatggagacagccatcctgggccgggtgaaccagctgctggatgagaagtggaagctgcacagcagaagaagaagagaggcccccaagaccagccctggctgcaactgccccccagccttccagggccccaccggccggcccggcctgcccggggacaagggggccatcggcatgcctggccgggtgggcagccctggagatgctggcctgagcatcatcggcccccggggccccccaggccagcccggcacccggggcttccctggcttccctggccccatcggcctggatggcaagccaggccaccctggccccaagggggacatgggcctgactggacctcctggccagcccggcccccagggccagaagggggagaagggccagtgtggggagtacccccaccgggagtgcctgagctccatgcctgctgccctgcggagcagccagatcatcgccctgaagctgctgcccctgctgaacagcgtgcggctggcccctcctcctgtgatcaagaggaggaccttccagggcgagcagagccaggccagcatccagggccccccaggccccccaggccccccaggccccagcggccccctgggccaccctggcctgcccggccccatgggccccccaggcctgcccggccccccaggccccaagggggaccccggcatccagggctaccacggcaggaaaggagagcggggcatgcctggcatgcctgggaagcatggagccaagggggcccctggcattgctgtggccggcatgaagggggagcccggcatccctggcaccaagggggagaagggagctgagggcagccctggcctgcccggcctgctgggccagaagggggagaagggagatgctggcaacagcatcggcggcggccgcggggagcccggccccccaggcctgcccggccccccaggccccaagggggaggccggcgtggatggccaggtgggccccccaggccagcccggggacaagggggagagaggagctgctggggagcagggcccagatggccccaagggcagcaaaggagagcccgggaagggggagatggtggactacaatggaaacatcaatgaggccctgcaggagatccgcaccctggccctgatgggccccccaggcctgcccggccagatcggccccccaggggcccctggcatccctggccagaagggggagatcggcctgcccggccccccaggccatgatggagagaagggcccccggggcaagccaggggacatgggccccccaggcccccagggccccccaggcaaggatggccccccaggagtgaagggggagaatggccaccctggcagccctggagagaagggggagaagggggagaccggccaggccggcagccctggagagaagggggaggccggggagaagggcaaccctggagctgaggtgcccggcctgcccggccctgagggccccccaggccccccaggcctgcagggcgtgcccggccccaagggggaggccggcctggatggagccaagggggagaagggcttccagggcgagaagggggaccggggccccctgggcctgcccggggccagcggcctggatggccggcccggccccccaggcaccccaggccccatcggcgtgcccggccctgctggccccaagggggagcggggcagcaagggggaccccggcatgacaggccccactggagctgctggcctgcccggcctgcacggccccccaggggacaagggcaacagaggagagcggggcaagaagggcagccggggccccaagggggacaagggggaccagggcgcccctggcctggatgccccctgccccctgggggaggatggcctgcctgtgcagggctgctggaacaagtag

SEQ ID NO: 47684 - DNA, 2067 bp, Artificial Sequence
  derived and/or modified sequence
atggtggccgagaggacccacaaggccgccgccaccggggcccggggccctggagagctgggcgcccctggcaccgtggccctggtggccgcccgggcagagcggggggcccggctgcccagccctggcagctgtggcctgctgaccctggccctgtgcagcctggccctgagcctgctggcccacttcagaacagctgagctgcaggcccgggtgctgcggctggaggccgagcggggggagcagcagatggagacagccatcctgggccgggtgaaccagctgctggatgagaagtggaagctgcacagcagaagaagaagagaggcccccaagaccagccctggctgcaactgccccccagccttccagggccccaccggccggcccggcctgcccggccagcccggcacccggggcttccctggcttccctggccccatcggcctggatggcaagccaggccaccctggccccaagggggacatgggcctgaccggccccccaggccagcccggcccccagggccagaagggggagaagggccagtgtggggagtacccccacagagaatgtctgagctccatgcctgctgccctgcggagcagccagatcatcgccctgaagctgctgcccctgctgaacagcgtgcggctggcccctcctcctgtgatcaagaggaggaccttccagggcgagcagagccaggccagcatccagggccccccaggccccccaggccccccaggccccagcggccccctgggccaccctggcctgcccggccccatgggccccccaggcctgcccggccccccaggccccaagggggaccccggcatccagggctaccacggcaggaagggggagcggggcatgcctggcatgcctgggaagcacggggccaagggggcccctggcattgctgtggccggcatgaagggggagcccggcatccctggcaccaagggggagaagggagctgagggcagccctggcctgcccggcctgctgggccagaagggggagaagggagatgctggcaacagcattggaggcggccgcggggagcccggccccccaggcctgcccggccccccaggccccaagggggaggccggcgtggatggccaggtgggccccccaggccagcccggggacaagggggagagaggagctgctggggagcagggcccagatggccccaagggcagcaagggggagcctggaaaaggagagatggtggactacaacggcaacatcaatgaggccctgcaggagatccgcaccctggccctgatgggccccccaggcctgcccggccagatcggccccccaggggcccctggcatccctggccagaagggggagatcggcctgcccggccccccaggccatgatggagagaagggcccccggggcaagccaggggacatgggccccccaggcccccagggccccccaggcaaggatggccccccaggagtgaagggagaaaatggccaccctggcagccctggagagaagggggagaagggggagaccggccaggccggcagccctggagagaagggggaggccggggagaagggcaaccctggagctgaggtgcccggcctgcccggccctgagggccccccaggccccccaggcctgcagggcgtgcccggccccaagggggaggccggcctggatggagccaagggggagaagggcttccagggcgagaagggggaccggggccccctgggcctgcccggggccagcggcctggatggccggcccggccccccaggcaccccaggccccatcggcgtgcccggccctgctggccccaagggggagcggggcagcaaaggagaccccggcatgacaggccccaccggggctgctggcctgcccggcctgcacggccccccaggggacaagggcaacagaggagagcggggcaagaagggcagccggggccccaagggggacaagggggaccagggcgcccctggcctggatgccccctgccccctgggagaagatggcctgcctgtgcagggctgctggaacaagtag

SEQ ID NO: 47685 - DNA, 2112 bp, Artificial Sequence
  derived and/or modified sequence
atggtggccgagaggacccacaaggccgccgccaccggggcccggggccctggagagctgggcgcccctggcaccgtggccctggtggccgcccgggcagagcggggggcccggctgcccagccctggcagctgtggcctgctgaccctggccctgtgcagcctggccctgagcctgctggcccacttcagaacagctgagctgcaggcccgggtgctgcggctggaggccgagcggggggagcagcagatggagacagccatcctgggccgggtgaaccagctgctggatgagaagtggaagctgcacagcagaagaagaagagaggcccccaagaccagccctggctgcaactgccccccaggccccccaggccccaccggccggcccggcctgcccggggacaagggggccatcggcatgcctggccgggtgggcagccctggagatgctggcctgagcatcatcggcccccggggccccccaggccagcccggcacccggggcttccctggcttccctggccccatcggcctggatggcaagccaggccaccctggccccaagggggacatgggcctgactggacctcctggccagcccggcccccagggccagaagggggagaagggccagtgtggggagtacccccaccgggagtgcctgagctccatgcctgctgccctgcggagcagccagatcatcgccctgaagctgctgcccctgctgaacagcgtgcggctggcccctcctcctgtgatcaagaggaggaccttccagggcgagcagagccaggccagcatccagggccccccaggccccccaggccccccaggccccagcggccccctgggccaccctggcctgcccggccccatgggccccccaggcctgcccggccccccaggccccaagggggaccccggcatccagggctaccacggcaggaaaggagagcggggcatgcctggcatgcctgggaagcatggagccaagggggcccctggcattgctgtggccggcatgaagggggagcccggcatccctggcaccaagggggagaagggagctgagggcagccctggcctgcccggcctgctgggccagaagggggagaagggagatgctggcaacagcatcggcggcggccgcggggagcccggccccccaggcctgcccggccccccaggccccaagggggaggccggcgtggatggccaggtgggccccccaggccagcccggggacaagggggagagaggagctgctggggagcagggcccagatggccccaagggcagcaaaggagagcccgggaagggggagatggtggactacaatggaaacatcaatgaggccctgcagcccagccggggccctgccctgcggggccccccaggcctgcccggccagatcggccccccaggggcccctggcatccctggccagaagggggagatcggcctgcccggccccccaggccatgatggagagaagggcccccggggcaagccaggggacatgggccccccaggcccccagggccccccaggcaaggatggccccccaggagtgaagggggagaatggccaccctggcagccctggagagaagggggagaagggggagaccggccaggccggcagccctggagagaagggggaggccggggagaagggcaaccctggagctgagggcctgcagggcgtgcccggccccaagggggaggccggcctggatggagccaagggggagaagggcttccagggcgagaagggggaccggggccccctgggcctgcccggggccagcggcctggatggccggcccggccccccaggcaccccaggccccatcggcgtgcccggccctgctggccccaagggggagcggggcagcaagggggaccccggcatgacaggccccactggagctgctggcctgcccggcctgcacggccccccaggggacaagggcaacagaggagagcggggcaagaagggcagccggggccccaagggggacaagggggaccagggcgcccctggcctggatgccccctgccccctgggggaggatggcctgcctgtgcagggctgctggaacaagtag

SEQ ID NO: 47686 - DNA, 2076 bp, Artificial Sequence
  derived and/or modified sequence
atggtggccgagaggacccacaaggccgccgccaccggggcccggggccctggagagctgggcgcccctggcaccgtggccctggtggccgcccgggcagagcggggggcccggctgcccagccctggcagctgtggcctgctgaccctggccctgtgcagcctggccctgagcctgctggcccacttcagaacagctgagctgcaggcccgggtgctgcggctggaggccgagcggggggagcagcagatggagacagccatcctgggccgggtgaaccagctgctggatgagaagtggaagctgcacagcagaagaagaagagaggcccccaagaccagccctggctgcaactgccccccaggccccccaggccccaccggccggcccggcctgcccggggacaagggggccatcggcatgcctggccgggtgggcagccctggagatgctggcctgagcatcatcggcccccggggccccccaggccagcccggcacccggggcttccctggcttccctggccccatcggcctggatggcaagccaggccaccctggccccaagggggacatgggcctgactggacctcctggccagcccggcccccagggccagaagggggagaagggccagtgtggggagtacccccaccgggagtgcctgagctccatgcctgctgccctgcggagcagccagatcatcgccctgaagctgctgcccctgctgaacagcgtgcggctggcccctcctcctgtgatcaagaggaggaccttccagggcgagcagagccaggccagcatccagggccccccaggccccccaggccccccaggccccagcggccccctgggccaccctggcctgcccggccccatgggccccccaggcctgcccggccccccaggccccaagggggaccccggcatccagggctaccacggcaggaaaggagagcggggcatgcctggcatgcctgggaagcatggagccaagggggcccctggcattgctgtggccggcatgaagggggagcccggcatccctggcaccaagggggagaagggagctgagggcagccctggcctgcccggcctgctgggccagaagggggagaagggagatgctggcaacagcatcggcggcggccgcggggagcccggccccccaggcctgcccggccccccaggccccaagggggaggccggcgtggatggccaggtgggccccccaggccagcccggggacaagggggagagaggagctgctggggagcagggcccagatggccccaagggcagcaaaggagagcccgggaagggggagatggtggactacaatggaaacatcaatgaggccctgcagcccagccggggccctgccctgcggggccccccaggcctgcccggccagatcggccccccaggggcccctggcatccctggccagaagggggagatcggcctgcccggccccccaggccatgatggagagaagggcccccggggcaagccaggggacatgggccccccaggcccccagggccccccaggcaaggatggccccccaggagtgaagggggagaatggccaccctggcagccctggagagaagggggagaagggggagaccggccaggccggcagccctggagagaagggggaggccggggagaagggcaaccctggagctgagggcctgcagggcgtgcccggccccaagggggaggccggcctggatggagccaagggggagaagggcttccagggcgagaagggggaccggggccccctgggcctgcccggcaccccaggccccatcggcgtgcccggccctgctggccccaagggggagcggggcagcaagggggaccccggcatgacaggccccactggagctgctggcctgcccggcctgcacggccccccaggggacaagggcaacagaggagagcggggcaagaagggcagccggggccccaagggggacaagggggaccagggcgcccctggcctggatgccccctgccccctgggggaggatggcctgcctgtgcagggctgctggaacaagtag

SEQ ID NO: 47687 - DNA, 2118 bp, Artificial Sequence
  derived and/or modified sequence
atggtggccgagaggacccacaaggccgccgccaccggggcccggggccctggagagctgggcgcccctggcaccgtggccctggtggccgcccgggcagagcggggggcccggctgcccagccctggcagctgtggcctgctgaccctggccctgtgcagcctggccctgagcctgctggcccacttcagaacagctgagctgcaggcccgggtgctgcggctggaggccgagcggggggagcagcagatggagacagccatcctgggccgggtgaaccagctgctggatgagaagtggaagctgcacagcagaagaagaagagaggcccccaagaccagccctggctgcaactgccccccagccttccagggccccaccggccggcccggcctgcccggcagccctggagatgctggcctgagcatcatcggcccccggggccccccaggccagcccggcacccggggcttccctggcttccctggccccatcggcctggatggcaagccaggccaccctggccccaagggggacatgggcctgactggacctcctggccagcccggcccccagggccagaagggggagaagggccagtgtggggagtacccccaccgggagtgcctgagctccatgcctgctgccctgcggagcagccagatcatcgccctgaagctgctgcccctgctgaacagcgtgcggctggcccctcctcctgtgatcaagaggaggaccttccagggcgagcagagccaggccagcatccagggccccccaggccccccaggccccccaggccccagcggccccctgggccaccctggcctgcccggccccatgggccccccaggcctgcccggccccccaggccccaagggggaccccggcatccagggctaccacggcaggaaaggagagcggggcatgcctggcatgcctgggaagcatggagccaagggggcccctggcattgctgtggccggcatgaagggggagcccggcatccctggcaccaagggggagaagggagctgagggcagccctggcctgcccggcctgctgggccagaagggggagaagggagatgctggcaacagcatcggcggcggccgcggggagcccggccccccaggcctgcccggccccccaggccccaagggggaggccggcgtggatggccaggtgggccccccaggccagcccggggacaagggggagagaggagctgctggggagcagggcccagatggccccaagggcagcaaaggagagcccgggaagggggagatggtggactacaatggaaacatcaatgaggccctgcaggagatccgcaccctggccctgatgggccccccaggcctgcccggccagatcggccccccaggggcccctggcatccctggccagaagggggagatcggcctgcccggccccccaggccatgatggagagaagggcccccggggcaagccaggggacatgggccccccaggcccccagggccccccaggcaaggatggccccccaggagtgaagggggagaatggccaccctggcagccctggagagaagggggagaagggggagaccggccaggccggcagccctggagagaagggggaggccggggagaagggcaaccctggagctgaggtgcccggcctgcccggccctgagggccccccaggccccccaggcctgcagggcgtgcccggccccaagggggaggccggcctggatggagccaagggggagaagggcttccagggcgagaagggggaccggggccccctgggcctgcccggggccagcggcctggatggccggcccggccccccaggcaccccaggccccatcggcgtgcccggccctgctggccccaagggggagcggggcagcaagggggaccccggcatgacaggccccactggagctgctggcctgcccggcctgcacggccccccaggggacaagggcaacagaggagagcggggcaagaagggcagccggggccccaagggggacaagggggaccagggcgcccctggcctggatgccccctgccccctgggggaggatggcctgcctgtgcagggctgctggaacaagtag

SEQ ID NO: 47688 - DNA, 2154 bp, Artificial Sequence
  derived and/or modified sequence
atggtggccgagaggacccacaaggccgccgccaccggggcccggggccctggagagctgggcgcccctggcaccgtggccctggtggccgcccgggcagagcggggggcccggctgcccagccctggcagctgtggcctgctgaccctggccctgtgcagcctggccctgagcctgctggcccacttcagaacagctgagctgcaggcccgggtgctgcggctggaggccgagcggggggagcagcagatggagacagccatcctgggccgggtgaaccagctgctggatgagaagtggaagctgcacagcagaagaagaagagaggcccccaagaccagccctggctgcaactgccccccaggccccccaggccccaccggccggcccggcctgcccggggacaagggggccatcggcatgcctggccgggtgggcagccctggagatgctggcctgagcatcatcggcccccggggccccccaggccagcccggcacccggggcttccctggcttccctggccccatcggcctggatggcaagccaggccaccctggccccaagggggacatgggcctgactggacctcctggccagcccggcccccagggccagaagggggagaagggccagtgtggggagtacccccaccgggagtgcctgagctccatgcctgctgccctgcggagcagccagatcatcgccctgaagctgctgcccctgctgaacagcgtgcggctggcccctcctcctgtgatcaagaggaggaccttccagggcgagcagagccaggccagcatccagggccccccaggccccccaggccccccaggccccagcggccccctgggccaccctggcctgcccggccccatgggccccccaggcctgcccggccccccaggccccaagggggaccccggcatccagggctaccacggcaggaaaggagagcggggcatgcctggcatgcctgggaagcatggagccaagggggcccctggcattgctgtggccggcatgaagggggagcccggcatccctggcaccaagggggagaagggagctgagggcagccctggcctgcccggcctgctgggccagaagggggagaagggagatgctggcaacagcatcggcggcggccgcggggagcccggccccccaggcctgcccggccccccaggccccaagggggaggccggcgtggatggccaggtgggccccccaggccagcccggggacaagggggagagaggagctgctggggagcagggcccagatggccccaagggcagcaaaggagagcccgggaagggggagatggtggactacaatggaaacatcaatgaggccctgcaggagatccgcaccctggccctgatgggccccccaggcctgcccggccagatcggccccccaggggcccctggcatccctggccagaagggggagatcggcctgcccggccccccaggccatgatggagagaagggcccccggggcaagccaggggacatgggccccccaggcccccagggccccccaggcaaggatggccccccaggagtgaagggggagaatggccaccctggcagccctggagagaagggggagaagggggagaccggccaggccggcagccctggagagaagggggaggccggggagaagggcaaccctggagctgaggtgcccggcctgcccggccctgagggccccccaggccccccaggcctgcagggcgtgcccggccccaagggggaggccggcctggatggagccaagggggagaagggcttccagggcgagaagggggaccggggccccctgggcctgcccggggccagcggcctggatggccggcccggccccccaggcaccccaggccccatcggcgtgcccggccctgctggccccaagggggagcggggcagcaagggggaccccggcatgacaggccccactggagctgctggcctgcccggcctgcacggccccccaggggacaagggcaacagaggagagcggggcaagaagggcagccggggccccaagggggacaagggggaccagggcgcccctggcctggatgccccctgccccctgggggaggatggcctgcctgtgcagggctgctggaacaagtag

SEQ ID NO: 47689 - DNA, 2154 bp, Artificial Sequence
  derived and/or modified sequence
atggtggccgagcggacccacaaggccgccgccaccggcgcccggggcccaggtgagcttggggccccgggaaccgtggcccttgttgctgcccgggctgagaggggagcaaggctgcccagcccaggctcttgtgggctcttaaccttggcgttgtgctctctcgcactgtcactgcttgcccatttcaggaccgccgaactccaggcccgggttttaaggctggaggccgaaaggggagaacagcagatggaaacagctatactggggcgcgtcaaccagctgcttgacgagaaatggaaactgcattctcgacgccggagggaagccccaaagactagccctggctgcaactgcccacccgcttttcaggggcctaccggtaggccgggactccctggcgacaagggggccataggcatgccagggcgagtcggatctcctggtgatgctggcctgtccattattggcccacgcggaccacccggccagcccggcactcggggatttccaggtttccccggacccattggtctagacggtaaaccggggcatccaggcccaaaaggtgatatgggacttaccgggcctccagggcagccggggccacaaggccaaaaaggagaaaaagggcaatgtggggaatatccacaccgagaatgtttatccagcatgcctgccgcactccggtcaagtcaaattatcgccctgaagttactccccctattaaatagcgtgcgcctcgcaccacccccagtcataaagagacgcactttccaaggtgagcaaagccaggcttctattcagggtccaccaggaccaccaggccctccgggtccttcagggcctctcggtcacccaggcctgccaggaccgatgggcccgcctggtctcccagggccacccggtccaaaaggcgatccaggaattcagggctaccacggccgcaagggcgagcgcggaatgcctggcatgcccgggaaacacggcgccaagggtgcacccggcatcgcggtggcaggcatgaagggcgaaccaggcattcctggtactaaaggggagaagggcgccgaaggaagccctggcctgccaggactgctcggtcagaagggcgagaagggggacgccgggaactccatcggcgggggccggggggagccaggccctcctggcctgccgggaccccccgggcccaaaggggaagccggagtcgatgggcaggtgggccctccaggtcagccaggcgacaaaggggagaggggcgccgccggtgagcagggaccggacggcccaaagggaagcaaaggggagccagggaaaggtgaaatggttgactacaatggaaatattaatgaggccctccaggaaatccgcacgctggctttgatgggaccacctggactcccaggccagattggcccccctggagcccctggtatccctggtcagaagggcgaaattggcctccccgggcctcctggtcacgatggggagaaagggccgcgtgggaagcccggagatatgggaccaccagggcctcaggggcctccgggaaaggacggacccccaggagtcaaaggagagaacggacatcccggaagtccgggcgaaaagggcgagaagggggagaccggccaggctggttcaccaggggagaagggggaggcaggcgagaagggcaatcccggggctgaagtccctggtctgccagggcctgaaggaccccccgggcctcctggacttcagggggtacccggacccaagggcgaggccggtctggacggcgccaaaggtgagaagggattccaaggggaaaagggggatcgcggccctctgggtctgccgggcgcctcgggcctggacggtcgccccggtcctcccggaactccaggccccattggcgtccccggacctgcgggacccaagggtgagcgcggcagcaaaggcgatccggggatgaccgggcccactggggctgctggccttcccggtctgcatggcccgcccggtgataagggcaaccgcggcgagcgtggcaaaaaaggttcccgggggccgaagggcgacaaaggggatcagggcgctccagggcttgatgcgccttgcccacttggcgaagatgggttgccagtgcagggctgctggaataaatag

SEQ ID NO: 47690 - DNA, 2067 bp, Artificial Sequence
  derived and/or modified sequence
atggtggccgagcggacccacaaggccgccgccaccggcgcccggggaccgggagaactcggagctccggggaccgtcgccctggtcgctgcacgggcggaacggggtgcacgactgccctcccccgggagctgcggtcttttgacattggccctgtgcagcctggccctcagccttctggcacactttaggaccgccgagctccaggctcgcgtgttgaggttagaggccgaaaggggagagcagcagatggagactgccatcctgggaagggtcaatcagctgttagatgagaagtggaaattacactccaggaggcggcgagaggccccgaaaacaagccctggctgcaattgcccgccagcattccagggccctacgggccgcccagggctcccaggccaacccggtacaaggggcttcccgggatttcccggccccataggccttgacggaaaacccggtcaccctggtcctaaaggagatatggggttaactggaccacccggccagccaggtcctcagggtcagaaaggcgagaagggacagtgtggggagtaccctcaccgagaatgtttatcatcaatgcccgctgcgctgagaagctcacagatcattgctttgaaactgctgcctctcctcaactcagtgcgattggcaccgcccccggttatcaagcgacgaactttccaaggtgagcagagccaggccagtattcagggaccccccggacctccaggcccacccgggccctcgggccccctcgggcacccaggccttccagggcctatgggacccccagggctccctgggcctcctggtccaaaaggtgacccaggaattcagggttaccacggtagaaagggcgagaggggtatgccaggtatgccgggcaaacatggcgccaagggagctcccggcatcgccgtagcgggtatgaagggtgagcctggtattccaggtactaagggcgagaagggcgccgaaggatctcctgggttgcctggcctcctgggccagaagggagaaaaaggcgatgccggtaactctatcggtggcgggagaggggagcctggacccccaggactgccagggccgccaggcccaaagggggaagctggggtggatggacaggttgggcccccaggccagccaggtgacaaaggggaaaggggtgccgcaggcgagcaaggccctgatgggcccaaaggttcaaaaggagagccaggaaagggagagatggtcgactataatggaaacatcaatgaggccctgcaggagatcagaaccctagcccttatgggtcctcctggacttcccggtcagattggtcctccaggcgcccccggtattccgggacagaaaggcgagattggtctgcctggcccccccggccatgacggtgaaaaagggcctcgaggcaaacctggtgatatgggccctccgggccctcagggcccccccggaaaggacggccccccaggagtaaagggggaaaacggacaccccggctctcccggtgagaaaggcgagaaaggggaaaccggccaggctggcagccccggcgaaaagggcgaggcgggggaaaagggaaatcctggtgccgaagtgcctggcctgccaggcccagagggcccacccggccccccaggccttcagggagtacctggccccaaaggtgaagccggcttggacggcgccaagggagagaaggggttccagggagagaagggcgacaggggaccgctcggcctgcccggtgccagcggtttagatgggagacccggcccccccggaacccccggacccataggagtaccggggccagccggacccaagggcgagaggggttcgaagggggatccaggcatgacaggccccaccggggctgcgggtcttcccggcttacacggccccccgggcgataagggcaataggggcgagagaggaaaaaaagggagcagagggcctaaaggagacaagggggatcagggcgcccctggattggacgccccatgccctttaggcgaagatgggctgcccgtgcaggggtgctggaacaagtag

SEQ ID NO: 47691 - DNA, 2112 bp, Artificial Sequence
  derived and/or modified sequence
atggtggccgagcggacccacaaggccgccgccaccggcgcccggggcccgggcgagctgggagctcccgggaccgtcgccctggtcgccgctcgcgcagaaaggggcgctagactaccatcacccggatcttgcgggctgctgacccttgcgctgtgtagtctggctcttagcttactagcccactttaggacagctgagcttcaggcacgcgttctgcgcttggaagcagagcgcggcgagcagcagatggaaactgccatcctgggccgagtgaaccagctactggacgaaaaatggaagctccattccaggcggcgcagggaagctcccaagacctctccagggtgtaactgcccaccaggcccaccgggtcccacaggaaggcccggtctccccggcgacaaaggagctataggaatgcctgggagggtggggtcacccggggacgccggcctgtccatcatcggaccccgggggcccccagggcagcccggtacccgcggattccctggctttcctgggccaatcggcctggacgggaagcctggccatcctgggccaaaaggcgatatgggattaaccggaccccccggccagcctgggccccaggggcagaagggagaaaaaggacaatgtggggagtatcctcatcgggaatgcctgagctccatgcccgcggcacttcggagctcacagatcatcgcactaaagctgctgccactgttaaactcagtgcggctggcccctcctcctgtgattaagagaagaaccttccagggggagcagagccaggcctctatacaggggcctcccgggcctcccggtccgccaggcccgagtggtcccctggggcaccctggactcccgggtccaatgggacctcctggcctgcctggtccccccggccccaaaggcgatcccggcatccaggggtaccacggacgcaagggggagcgtgggatgccagggatgcccggaaaacacggggccaaaggagcccccgggattgccgtggcaggcatgaagggagaaccagggatacctggcactaaaggcgagaaaggggccgagggcagccctggtctgcccgggttgttaggccagaaaggtgagaagggagacgctggcaactccattggtggtggaagaggggaaccggggcctcctggactgcctggaccgcccggtcccaagggcgaagctggcgttgatggacaggttggacctcccggacaacccggagacaaaggggaaagaggcgctgcaggtgaacagggacccgatggccccaagggatcaaagggtgagcctggtaagggcgaaatggtggactacaacggtaatatcaatgaggctctgcagccttcgagagggcctgcccttagaggtccacctggtttgccagggcaaataggcccacctggtgcccctggcatcccaggccaaaagggtgaaatcgggttaccaggcccaccgggccacgacggagaaaaggggccccgggggaagcccggcgacatgggcccacccgggccccagggacctccaggaaaggatggcccccctggcgtgaagggggagaacggccacccaggaagccccggagagaagggagaaaagggggaaactgggcaggccggatcccccggagagaagggcgaggcaggcgaaaaaggaaatccaggcgcagaagggcttcagggcgtgccagggcctaagggagaggccggacttgacggtgcaaagggtgagaaaggttttcagggcgagaagggtgaccgagggcccttagggttaccaggtgccagcggattagatggtcggccaggcccccctggtacgcccggccctattggagttccaggacctgcaggtcccaagggggagaggggttcaaagggagatccaggcatgacaggacccaccggagccgccggactgcctgggctgcacggaccacccggagacaaaggaaacagaggcgaacggggtaaaaagggcagccgcggccctaaaggtgataaaggggatcagggtgccccaggtctcgatgcaccttgtcccctcggtgaagacggcctacctgtgcagggttgctggaacaaatag

SEQ ID NO: 47692 - DNA, 2076 bp, Artificial Sequence
  derived and/or modified sequence
atggtggccgagcggacccacaaggccgccgccaccggcgcccggggtccaggtgaactgggagccccagggacagtggccctggttgctgctcgggcggagaggggagcaaggctacccagcccaggctcatgcggccttctgacgctggctctctgttccttggcgctgagtctgctggctcatttccgcactgcagagctccaagcacgcgtgctaagactcgaggccgaaaggggcgaacagcagatggagactgccatcctgggtagagtaaatcagctactggacgaaaagtggaaactgcatagtcgccgaagaagggaagcacccaaaacgtccccagggtgtaactgtcccccgggcccgcccggtcccacagggcgacccgggctcccaggcgataagggggcgatcggcatgcccgggcgggtaggtagcccgggtgacgcagggctaagtatcatcggaccacgcggccccccaggccagcctggcacgaggggctttccaggcttccctgggccaatcggattagacggaaagccagggcacccagggcccaagggggacatgggactcacggggccaccaggccaaccagggcctcaggggcaaaaaggggagaaggggcagtgcggcgaatatcctcatcgggagtgcctgtccagtatgcccgcagccctgaggtcctcccaaataatcgcactcaaattattgcctcttttaaattcagtgcggctcgcacctccccctgtgataaagcggaggacgttccagggagagcaatcacaggcctctatccagggcccccccggcccaccaggcccaccgggacctagcggcccgttaggccaccctgggctgccagggcccatgggtcctcccggcctgccgggccctcccggacctaaaggggatcctggaatccagggctatcacggtaggaaaggagaacggggcatgccaggaatgccagggaagcacggggcaaagggggcccccggcattgccgtcgcggggatgaaaggggaacctggtattccggggactaagggcgagaagggcgccgagggcagtcccggcctcccaggactgttaggccaaaagggcgaaaaaggggacgcaggtaactcaattggaggggggcgcggggaacctggaccgcccggactccccggcccccccgggccgaagggcgaggctggagttgatggccaggttgggcccccaggtcaaccaggagataagggtgaacgaggagccgctggtgagcagggtcccgacggcccaaaaggaagcaaaggagagcccggaaagggggagatggtggattataacggtaacatcaatgaggcccttcagccctctcgggggcctgccttacgtgggcccccagggctcccaggacaaatcggaccccccggtgcaccgggaatacccggtcagaaaggtgagatcggccttccggggccgcccggtcatgatggagagaagggtccccgcgggaaacccggtgacatggggccccccgggccacagggccctcctgggaaagacgggcctccaggcgtcaaaggggagaacgggcacccaggcagcccaggcgagaaaggcgaaaagggcgagaccggccaagccggctcacccggggagaaaggggaggcgggcgagaaaggtaatccgggagcagagggactgcagggcgtgcccgggccaaagggagaggctgggctcgatggagccaaaggggagaaggggttccaaggcgagaagggagatcgcgggcccctgggcttgccgggtactcctggtccaatcggggtcccaggccctgccggccctaaaggcgaaaggggatccaagggagatcctgggatgacaggtcctactggtgccgcgggtctccccggtttacatggccccccaggtgataagggcaaccgtggggagcgcggaaagaaggggtctagaggccccaagggcgacaagggcgatcagggcgccccaggcctggatgcaccatgccccctgggtgaggacggcctgcccgtccaggggtgttggaataaatag

SEQ ID NO: 47693 - DNA, 2118 bp, Artificial Sequence
  derived and/or modified sequence
atggtggccgagcggacccacaaggccgccgccaccggcgcccgggggcccggtgagctgggcgcaccagggaccgtggccctcgttgctgccagagctgagaggggtgcacggctgccctcacctggctcttgcggcctcttgacgctggcgttgtgctctctggccctgagcctacttgcgcacttccgcactgccgaactgcaggctcgggtgcttcgactggaggccgagcgcggagaacagcagatggagaccgccattctgggccgggtgaatcagctgcttgatgaaaagtggaagctgcattcacgtcgcagacgtgaggccccaaagacctccccaggttgcaactgtccccccgctttccagggcccaaccgggcgcccagggctgccagggagccccggcgatgccggcctgtctataatagggccacgggggccacctgggcagcccgggaccaggggattcccgggcttccctggaccgatcggactggacggcaagcctggccaccccgggcctaagggcgacatgggcctgaccggacctcctggccagcctggaccacagggccagaagggagagaaagggcagtgtggcgagtacccacatcgggaatgcctttccagtatgccagcagccctgcggtcatcccagataatagcactcaagctgcttccgttgctgaacagcgtgcgcctcgcaccccctcccgtgatcaaaagaagaacatttcaaggagaacaatcccaggccagcatccaagggccacctggccctcctggacctcctggcccctctgggcccctgggacatcctggactgcccggccccatgggccccccaggccttcccggcccccctggaccaaagggggaccccggcattcagggttaccatggcagaaagggcgagcggggaatgccgggcatgccaggtaagcatggagctaagggcgcccctggcatcgcagtggcgggtatgaagggcgaacctgggatccctggtaccaaaggtgagaaaggtgccgagggcagccccggactacccgggctgctggggcagaagggggaaaaaggagacgccggcaacagtattggaggaggacgtggagagcctggccctccgggcctgccaggcccacccggccctaaaggcgaagcgggtgtcgacgggcaggtgggcccccctgggcaacctggtgacaagggggagcgcggagccgccggcgaacagggccccgatggtcccaagggcagcaaaggtgaaccaggaaaaggagaaatggtggattacaacgggaatatcaacgaggccctgcaggagattcggacactggcccttatgggaccacctggactccctggccagatcgggccaccaggagcaccaggcattcccggccagaagggcgaaattggcctgccaggccctccaggccatgacggcgagaaggggcccagggggaaacccggcgacatggggccacccggcccccaaggtccgcccggcaaagatggcccacccggggtaaagggtgaaaacggccacccaggaagccctggagagaaaggggagaagggagagaccggccaggcagggtcccccggagagaaaggggaggcaggcgagaagggcaatcctggtgccgaggtgcctggattgcccgggccagaagggccgccaggaccaccaggcctccagggggtaccaggcccgaaaggagaagccggcctagacggagcaaagggcgaaaagggctttcagggcgagaagggcgatcgagggccactgggccttccaggagcgagtgggcttgacggcagaccaggtcccccgggaaccccgggacccatcggcgtgcccggacccgctggacctaagggtgaaaggggatcaaagggggacccaggcatgaccgggccaacaggagccgcaggccttcctggcctgcatgggccgcctggggataaggggaatcggggggagcggggcaaaaagggctctagaggccctaaaggagacaagggcgatcagggagcccccggcttagacgcaccctgccctctgggagaagacgggttgcccgtgcagggctgctggaacaagtag

SEQ ID NO: 47694 - DNA, 2154 bp, Artificial Sequence
  derived and/or modified sequence
atggtggccgagcggacccacaaggccgccgccaccggcgcccggggaccaggggagttaggggcccctggcactgtggctttagtggctgccagagcagagaggggtgctagattgccctccccaggatcttgtggccttctgactttagccctctgttcactcgcgttaagtctgctggctcactttaggactgcggagctacaggcaagagtgttaaggttagaagcggagcgaggggaacagcagatggaaacagccattctgggtcgggtgaatcagcttttggatgagaaatggaaattacactccagaaggcgtagagaagcaccgaaaacttctccaggatgcaactgccccccagggccacctggcccaacagggcggccaggactgcccggggataagggagcaattggaatgccaggtcgggtgggcagtccaggcgacgccggccttagtattatcgggccgagagggcccccgggacagcctggaaccaggggctttcccggcttccctggacctatcggcctcgacggtaagccaggccatcccggtcccaagggagatatgggactgacaggaccgcccggccaacccggacctcagggacagaagggggagaaaggacagtgtggcgaatatccccacagggagtgcctgtcctccatgcctgccgccctgcgatccagccagattattgcactcaagctactgcctcttctgaattccgtacggttggctccaccccctgtcatcaaacgaaggacctttcagggcgagcaatctcaggcttctatacaaggcccccccggacctccaggtccaccgggcccttctggcccccttggacatccagggttaccaggccccatgggtcccccaggattgccagggcctccagggcccaagggagatccgggaatccagggctatcacggacgcaaaggtgagcggggtatgcctggtatgcctgggaagcatggcgcaaagggtgcccctggcatcgccgtggccggcatgaaaggggaacccggtattcccggaaccaaaggggagaagggggccgaagggagtccaggtttgccaggcctcctcggacagaagggtgagaagggcgatgctggaaactccattgggggaggcagaggcgagcctgggccacctgggctgcctgggccccccggtcccaaaggagaggctggtgtcgatgggcaggttggccccccggggcaaccaggagataagggagaaagaggcgccgcaggggagcaggggcctgacggcccaaagggaagtaaaggcgaacccggcaaaggcgagatggtggattataatggcaatatcaacgaagccctccaggagattagaaccctggcattgatggggccacccggcctgcccggtcagattggaccccccggtgccccgggtatccctggccagaaaggcgagataggtctacccggtcccccaggccacgatggagaaaagggcccccgagggaaacctggcgacatgggcccccccgggcctcaaggacctcccgggaaggacggaccaccaggcgtcaagggggagaatggtcacccaggtagtccaggcgaaaaaggggagaagggagaaaccgggcaggccggaagtcccggcgaaaagggcgaggctggtgagaaaggaaaccccggggctgaggtccccggtctgccaggtcctgaaggcccaccagggccgcctgggctccagggggttcctggcccaaaaggagaggcagggctcgacggggctaaaggcgaaaaaggctttcagggcgaaaagggcgaccggggaccattgggacttccaggcgctagtggtctcgatgggagacccggcccccctggcactccggggccaattggggttcctggcccggccggacccaaaggggaaagaggatctaagggagaccccgggatgacaggaccaaccggagccgcagggctgcccgggctgcacggtcctcccggcgacaagggaaaccgaggggaacgcggaaaaaagggttccagaggccccaagggggacaagggtgaccagggagcccctgggctcgatgccccctgcccactcggggaagacggacttcctgtacagggttgctggaataagtag

SEQ ID NO: 47695 - DNA, 3136 bp, Artificial Sequence
  derived and/or modified sequence
aagtagcacggattgctcatccgatccgtgccgccgcagggagtgtgtcaagttacagaggcgccggaatcggcccctgcgctcctcgccagccgccacgacccacctctgcccatggggccctccgtgtgcgccccttcgcccggggactgaaactgactggcccgggagacacgaggcgcccagaaggactgacagcgcggcaccaactgctctgcagacacttgaagggaaagactgggcggagagaaggagagccggtcagattcccctaactttcctggacttggaacgttcttcgaaataacttttttctcacctaggtgtaccccaattaccgctggttgtgctttttcggcacttcctctcctactgctaatttttccgtcctctttgccgggagcagcggaaagggacgttttccagcgatacaagccctttccccctgccccgcagtttggatagagccttttggcagcggctgtcgcctttatttattctatttatttatttattggttctcaagacgcgagaggatggtagcggagcgcacccacaaagcggcagccaccggtgcccgcggccctggggagttgggcgcgcccgggacggtggctctggtggcggcgcgggcggagcgcggcgcacggctgccgagtccagggtcgtgcgggctgctgacgctggccctctgctcgctggcactcagcctgctcgcccactttcggacggccgagctgcaggcccgggtgctgcgcctggaagcggagcgcggggagcagcaaatggagacggctattttgggacgagtcaatcaactgctggacgagaaatggaagctccactcaaggaggcgccgggaggccccaaagacatctccaggatgtaactgcccaccagcatttcagggtcccactggaagacccggactcccaggggacaaaggtgccattgggatgcctggacgtgtggggtcccccggagacgctgggctgtccatcattggtccccgcggcccccctggtcaaccaggaactagaggtttccctggatttccgggtcccattgggctggacggcaaaccgggccacccaggaccaaagggcgacatgggtctgacgggtcccccaggacagccgggaccccagggacaaaaaggagaaaagggtcagtgtggagagtacccacaccgggagtgcctaagcagcatgccagcagctctgcgctccagccaaataattgccctgaagctgctgcctctcctcaattcagtgcgactggctccacccccggtcataaaaaggcggacgttccagggcgaacagagccaggccagcatccaaggtccaccagggcccccaggcccccctggaccaagtggacctctggggcacccaggactgccagggcctatggggccacctggcttacctgggcctcctggaccaaagggagacccagggatccagggctaccacggccggaagggagaacggggcatgccagggatgccaggcaagcatggagccaagggggcgcccggaattgccgtggctgggatgaagggtgagccagggatcccaggaaccaagggtgagaagggggctgaaggctcccctgggcttcctggcctcctggggcagaagggagagaaaggcgatgctggcaactccattggaggaggcagaggggaacctggccctccagggctccctgggcccccagggccaaagggagaagcaggtgtcgatggccaggttggccccccagggcagccaggagacaagggggagcgtggagcagctggagaacagggaccagatggccccaagggctccaagggagaaccagggaaaggagagatggtggattacaatggaaacatcaatgaggctctccaggagatccggacgctggccttgatggggcctcctggtcttcctgggcaaattggcccacctggagctccagggattccaggccagaagggggagattggactgccaggccctccaggacacgatggggaaaagggacctcgcggtaaaccaggagacatgggccctcctggtccccaaggccccccaggaaaggatggacctccaggagtgaagggagaaaacgggcacccagggagcccaggagagaagggggaaaaaggggagacaggacaagcaggctcaccgggagagaaaggagaagccggggagaagggcaatccaggagcagaggttcctgggctgccagggccagaggggcctcccggacctccggggctccaaggtgttcctggaccaaagggggaagcaggactagatggagcaaaaggagagaaaggcttccagggagaaaaaggagaccgtggtcccctgggactacccggagcttcaggtttggacggcaggcctgggccaccgggtactccaggaccaattggagttccaggcccagcgggaccaaagggcgagaggggcagcaaaggagaccctgggatgacaggaccaacgggagcagctgggcttcctggtttacatggaccacccggggacaagggaaaccggggggagagggggaagaaaggctctagagggcctaaaggggataagggagaccaaggagcgcctggattagatgccccctgcccattgggcgaagatggcttaccagtccaaggctgctggaacaagtgatgcctctaaccttggattggcctgtgtgtgtgtttgtacatagaatatttatttttatacagttttcactttttgaaaatgccagaagtatgatgcatcttacagattattaaaaaagaaagaaaaacctgcatattttgtacagaaaatatcaacctcttcccttttgtttacaagatgttttgtataagcctatgtctctaatacattttttgtttggtcgtaatgtctgcatgatatttgtgcacatttattaagtatcgaagcttaataaattattgtgtcctggtgccaaagggggccagccagaactgaggtgctggctagctcatgtgtgaattcacataaatgtagaggtccatgatatttgctaagctaggtgtgtctaagagtattttaaacccttatggattttcattattaaaggaaatgaaacatggcaattc

SEQ ID NO: 47696 - DNA, 3050 bp, Artificial Sequence
  derived and/or modified sequence
aagtagcacggattgctcatccgatccgtgccgccgcagggagtgtgtcaagttacagaggcgccggaatcggcccctgcgctcctcgccagccgccacgacccacctctgcccatggggccctccgtgtgcgccccttcgcccggggactgaaactgactggcccgggagacacgaggcgcccagaaggactgacagcgcggcaccaactgctctgcagacacttgaagggaaagactgggcggagagaaggagagccggtcagattcccctaactttcctggacttggaacgttcttcgaaataacttttttctcacctaggtgtaccccaattaccgctggttgtgctttttcggcacttcctctcctactgctaatttttccgtcctctttgccgggagcagcggaaagggacgttttccagcgatacaagccctttccccctgccccgcagtttggatagagccttttggcagcggctgtcgcctttatttattctatttatttatttattggttctcaagacgcgagaggatggtagcggagcgcacccacaaagcggcagccaccggtgcccgcggccctggggagttgggcgcgcccgggacggtggctctggtggcggcgcgggcggagcgcggcgcacggctgccgagtccagggtcgtgcgggctgctgacgctggccctctgctcgctggcactcagcctgctcgcccactttcggacggccgagctgcaggcccgggtgctgcgcctggaagcggagcgcggggagcagcaaatggagacggctattttgggacgagtcaatcaactgctggacgagaaatggaagctccactcaaggaggcgccgggaggccccaaagacatctccaggatgtaactgcccaccagcatttcagggtcccactggaagacccggactcccaggtcaaccaggaactagaggtttccctggatttccgggtcccattgggctggacggcaaaccgggccacccaggaccaaagggcgacatgggtctgacgggtcccccaggacagccgggaccccagggacaaaaaggagaaaagggtcagtgtggagagtacccacaccgggagtgcctaagcagcatgccagcagctctgcgctccagccaaataattgccctgaagctgctgcctctcctcaattcagtgcgactggctccacccccggtcataaaaaggcggacgttccagggcgaacagagccaggccagcatccaaggtccaccagggcccccaggcccccctggaccaagtggacctctggggcacccaggactgccagggcctatggggccacctggcttacctgggcctcctggaccaaagggagacccagggatccagggctaccacggccggaagggagaacggggcatgccagggatgccaggcaagcatggagccaagggggcgcccggaattgccgtggctgggatgaagggtgagccagggatcccaggaaccaagggtgagaagggggctgaaggctcccctgggcttcctggcctcctggggcagaagggagagaaaggcgatgctggcaactccattggaggaggcagaggggaacctggccctccagggctccctgggcccccagggccaaagggagaagcaggtgtcgatggccaggttggccccccagggcagccaggagacaagggggagcgtggagcagctggagaacagggaccagatggccccaagggctccaagggagaaccagggaaaggagagatggtggattacaatggaaacatcaatgaggctctccaggagatccggacgctggccttgatggggcctcctggtcttcctgggcaaattggcccacctggagctccagggattccaggccagaagggggagattggactgccaggccctccaggacacgatggggaaaagggacctcgcggtaaaccaggagacatgggccctcctggtccccaaggccccccaggaaaggatggacctccaggagtgaagggagaaaacgggcacccagggagcccaggagagaagggggaaaaaggggagacaggacaagcaggctcaccgggagagaaaggagaagccggggagaagggcaatccaggagcagaggttcctgggctgccagggccagaggggcctcccggacctccggggctccaaggtgttcctggaccaaagggggaagcaggactagatggagcaaaaggagagaaaggcttccagggagaaaaaggagaccgtggtcccctgggactacccggagcttcaggtttggacggcaggcctgggccaccgggtactccaggaccaattggagttccaggcccagcgggaccaaagggcgagaggggcagcaaaggagaccctgggatgacaggaccaacgggagcagctgggcttcctggtttacatggaccacccggggacaagggaaaccggggggagagggggaagaaaggctctagagggcctaaaggggataagggagaccaaggagcgcctggattagatgccccctgcccattgggcgaagatggcttaccagtccaaggctgctggaacaagtgatgcctctaaccttggattggcctgtgtgtgtgtttgtacatagaatatttatttttatacagttttcactttttgaaaatgccagaagtatgatgcatcttacagattattaaaaaagaaagaaaaacctgcatattttgtacagaaaatatcaacctcttcccttttgtttacaagatgttttgtataagcctatgtctctaatacattttttgtttggtcgtaatgtctgcatgatatttgtgcacatttattaagtatcgaagcttaataaattattgtgtcctggtgccaaagggggccagccagaactgaggtgctggctagctcatgtgtgaattcacataaatgtagaggtccatgatatttgctaagctaggtgtgtctaagagtattttaaacccttatggattttcattattaaaggaaatgaaacatggcaattca

SEQ ID NO: 47697 - DNA, 3094 bp, Artificial Sequence
  derived and/or modified sequence
aagtagcacggattgctcatccgatccgtgccgccgcagggagtgtgtcaagttacagaggcgccggaatcggcccctgcgctcctcgccagccgccacgacccacctctgcccatggggccctccgtgtgcgccccttcgcccggggactgaaactgactggcccgggagacacgaggcgcccagaaggactgacagcgcggcaccaactgctctgcagacacttgaagggaaagactgggcggagagaaggagagccggtcagattcccctaactttcctggacttggaacgttcttcgaaataacttttttctcacctaggtgtaccccaattaccgctggttgtgctttttcggcacttcctctcctactgctaatttttccgtcctctttgccgggagcagcggaaagggacgttttccagcgatacaagccctttccccctgccccgcagtttggatagagccttttggcagcggctgtcgcctttatttattctatttatttatttattggttctcaagacgcgagaggatggtagcggagcgcacccacaaagcggcagccaccggtgcccgcggccctggggagttgggcgcgcccgggacggtggctctggtggcggcgcgggcggagcgcggcgcacggctgccgagtccagggtcgtgcgggctgctgacgctggccctctgctcgctggcactcagcctgctcgcccactttcggacggccgagctgcaggcccgggtgctgcgcctggaagcggagcgcggggagcagcaaatggagacggctattttgggacgagtcaatcaactgctggacgagaaatggaagctccactcaaggaggcgccgggaggccccaaagacatctccaggatgtaactgcccaccaggtcccccaggtcccactggaagacccggactcccaggggacaaaggtgccattgggatgcctggacgtgtggggtcccccggagacgctgggctgtccatcattggtccccgcggcccccctggtcaaccaggaactagaggtttccctggatttccgggtcccattgggctggacggcaaaccgggccacccaggaccaaagggcgacatgggtctgacgggtcccccaggacagccgggaccccagggacaaaaaggagaaaagggtcagtgtggagagtacccacaccgggagtgcctaagcagcatgccagcagctctgcgctccagccaaataattgccctgaagctgctgcctctcctcaattcagtgcgactggctccacccccggtcataaaaaggcggacgttccagggcgaacagagccaggccagcatccaaggtccaccagggcccccaggcccccctggaccaagtggacctctggggcacccaggactgccagggcctatggggccacctggcttacctgggcctcctggaccaaagggagacccagggatccagggctaccacggccggaagggagaacggggcatgccagggatgccaggcaagcatggagccaagggggcgcccggaattgccgtggctgggatgaagggtgagccagggatcccaggaaccaagggtgagaagggggctgaaggctcccctgggcttcctggcctcctggggcagaagggagagaaaggcgatgctggcaactccattggaggaggcagaggggaacctggccctccagggctccctgggcccccagggccaaagggagaagcaggtgtcgatggccaggttggccccccagggcagccaggagacaagggggagcgtggagcagctggagaacagggaccagatggccccaagggctccaagggagaaccagggaaaggagagatggtggattacaatggaaacatcaatgaggctctccagccgagtaggggccctgccctcagggggcctcctggtcttcctgggcaaattggcccacctggagctccagggattccaggccagaagggggagattggactgccaggccctccaggacacgatggggaaaagggacctcgcggtaaaccaggagacatgggccctcctggtccccaaggccccccaggaaaggatggacctccaggagtgaagggagaaaacgggcacccagggagcccaggagagaagggggaaaaaggggagacaggacaagcaggctcaccgggagagaaaggagaagccggggagaagggcaatccaggagcagaggggctccaaggtgttcctggaccaaagggggaagcaggactagatggagcaaaaggagagaaaggcttccagggagaaaaaggagaccgtggtcccctgggactacccggagcttcaggtttggacggcaggcctgggccaccgggtactccaggaccaattggagttccaggcccagcgggaccaaagggcgagaggggcagcaaaggagaccctgggatgacaggaccaacgggagcagctgggcttcctggtttacatggaccacccggggacaagggaaaccggggggagagggggaagaaaggctctagagggcctaaaggggataagggagaccaaggagcgcctggattagatgccccctgcccattgggcgaagatggcttaccagtccaaggctgctggaacaagtgatgcctctaaccttggattggcctgtgtgtgtgtttgtacatagaatatttatttttatacagttttcactttttgaaaatgccagaagtatgatgcatcttacagattattaaaaaagaaagaaaaacctgcatattttgtacagaaaatatcaacctcttcccttttgtttacaagatgttttgtataagcctatgtctctaatacattttttgtttggtcgtaatgtctgcatgatatttgtgcacatttattaagtatcgaagcttaataaattattgtgtcctggtgccaaagggggccagccagaactgaggtgctggctagctcatgtgtgaattcacataaatgtagaggtccatgatatttgctaagctaggtgtgtctaagagtattttaaacccttatggattttcattattaaaggaaatgaaacatggcaattc

SEQ ID NO: 47698 - DNA, 3058 bp, Artificial Sequence
  derived and/or modified sequence
aagtagcacggattgctcatccgatccgtgccgccgcagggagtgtgtcaagttacagaggcgccggaatcggcccctgcgctcctcgccagccgccacgacccacctctgcccatggggccctccgtgtgcgccccttcgcccggggactgaaactgactggcccgggagacacgaggcgcccagaaggactgacagcgcggcaccaactgctctgcagacacttgaagggaaagactgggcggagagaaggagagccggtcagattcccctaactttcctggacttggaacgttcttcgaaataacttttttctcacctaggtgtaccccaattaccgctggttgtgctttttcggcacttcctctcctactgctaatttttccgtcctctttgccgggagcagcggaaagggacgttttccagcgatacaagccctttccccctgccccgcagtttggatagagccttttggcagcggctgtcgcctttatttattctatttatttatttattggttctcaagacgcgagaggatggtagcggagcgcacccacaaagcggcagccaccggtgcccgcggccctggggagttgggcgcgcccgggacggtggctctggtggcggcgcgggcggagcgcggcgcacggctgccgagtccagggtcgtgcgggctgctgacgctggccctctgctcgctggcactcagcctgctcgcccactttcggacggccgagctgcaggcccgggtgctgcgcctggaagcggagcgcggggagcagcaaatggagacggctattttgggacgagtcaatcaactgctggacgagaaatggaagctccactcaaggaggcgccgggaggccccaaagacatctccaggatgtaactgcccaccaggtcccccaggtcccactggaagacccggactcccaggggacaaaggtgccattgggatgcctggacgtgtggggtcccccggagacgctgggctgtccatcattggtccccgcggcccccctggtcaaccaggaactagaggtttccctggatttccgggtcccattgggctggacggcaaaccgggccacccaggaccaaagggcgacatgggtctgacgggtcccccaggacagccgggaccccagggacaaaaaggagaaaagggtcagtgtggagagtacccacaccgggagtgcctaagcagcatgccagcagctctgcgctccagccaaataattgccctgaagctgctgcctctcctcaattcagtgcgactggctccacccccggtcataaaaaggcggacgttccagggcgaacagagccaggccagcatccaaggtccaccagggcccccaggcccccctggaccaagtggacctctggggcacccaggactgccagggcctatggggccacctggcttacctgggcctcctggaccaaagggagacccagggatccagggctaccacggccggaagggagaacggggcatgccagggatgccaggcaagcatggagccaagggggcgcccggaattgccgtggctgggatgaagggtgagccagggatcccaggaaccaagggtgagaagggggctgaaggctcccctgggcttcctggcctcctggggcagaagggagagaaaggcgatgctggcaactccattggaggaggcagaggggaacctggccctccagggctccctgggcccccagggccaaagggagaagcaggtgtcgatggccaggttggccccccagggcagccaggagacaagggggagcgtggagcagctggagaacagggaccagatggccccaagggctccaagggagaaccagggaaaggagagatggtggattacaatggaaacatcaatgaggctctccagccgagtaggggccctgccctcagggggcctcctggtcttcctgggcaaattggcccacctggagctccagggattccaggccagaagggggagattggactgccaggccctccaggacacgatggggaaaagggacctcgcggtaaaccaggagacatgggccctcctggtccccaaggccccccaggaaaggatggacctccaggagtgaagggagaaaacgggcacccagggagcccaggagagaagggggaaaaaggggagacaggacaagcaggctcaccgggagagaaaggagaagccggggagaagggcaatccaggagcagaggggctccaaggtgttcctggaccaaagggggaagcaggactagatggagcaaaaggagagaaaggcttccagggagaaaaaggagaccgtggtcccctgggactacccggtactccaggaccaattggagttccaggcccagcgggaccaaagggcgagaggggcagcaaaggagaccctgggatgacaggaccaacgggagcagctgggcttcctggtttacatggaccacccggggacaagggaaaccggggggagagggggaagaaaggctctagagggcctaaaggggataagggagaccaaggagcgcctggattagatgccccctgcccattgggcgaagatggcttaccagtccaaggctgctggaacaagtgatgcctctaaccttggattggcctgtgtgtgtgtttgtacatagaatatttatttttatacagttttcactttttgaaaatgccagaagtatgatgcatcttacagattattaaaaaagaaagaaaaacctgcatattttgtacagaaaatatcaacctcttcccttttgtttacaagatgttttgtataagcctatgtctctaatacattttttgtttggtcgtaatgtctgcatgatatttgtgcacatttattaagtatcgaagcttaataaattattgtgtcctggtgccaaagggggccagccagaactgaggtgctggctagctcatgtgtgaattcacataaatgtagaggtccatgatatttgctaagctaggtgtgtctaagagtattttaaacccttatggattttcattattaaaggaaatgaaacatggcaattc

SEQ ID NO: 47699 - DNA, 3101 bp, Artificial Sequence
  derived and/or modified sequence
aagtagcacggattgctcatccgatccgtgccgccgcagggagtgtgtcaagttacagaggcgccggaatcggcccctgcgctcctcgccagccgccacgacccacctctgcccatggggccctccgtgtgcgccccttcgcccggggactgaaactgactggcccgggagacacgaggcgcccagaaggactgacagcgcggcaccaactgctctgcagacacttgaagggaaagactgggcggagagaaggagagccggtcagattcccctaactttcctggacttggaacgttcttcgaaataacttttttctcacctaggtgtaccccaattaccgctggttgtgctttttcggcacttcctctcctactgctaatttttccgtcctctttgccgggagcagcggaaagggacgttttccagcgatacaagccctttccccctgccccgcagtttggatagagccttttggcagcggctgtcgcctttatttattctatttatttatttattggttctcaagacgcgagaggatggtagcggagcgcacccacaaagcggcagccaccggtgcccgcggccctggggagttgggcgcgcccgggacggtggctctggtggcggcgcgggcggagcgcggcgcacggctgccgagtccagggtcgtgcgggctgctgacgctggccctctgctcgctggcactcagcctgctcgcccactttcggacggccgagctgcaggcccgggtgctgcgcctggaagcggagcgcggggagcagcaaatggagacggctattttgggacgagtcaatcaactgctggacgagaaatggaagctccactcaaggaggcgccgggaggccccaaagacatctccaggatgtaactgcccaccagcatttcagggtcccactggaagacccggactcccagggtcccccggagacgctgggctgtccatcattggtccccgcggcccccctggtcaaccaggaactagaggtttccctggatttccgggtcccattgggctggacggcaaaccgggccacccaggaccaaagggcgacatgggtctgacgggtcccccaggacagccgggaccccagggacaaaaaggagaaaagggtcagtgtggagagtacccacaccgggagtgcctaagcagcatgccagcagctctgcgctccagccaaataattgccctgaagctgctgcctctcctcaattcagtgcgactggctccacccccggtcataaaaaggcggacgttccagggcgaacagagccaggccagcatccaaggtccaccagggcccccaggcccccctggaccaagtggacctctggggcacccaggactgccagggcctatggggccacctggcttacctgggcctcctggaccaaagggagacccagggatccagggctaccacggccggaagggagaacggggcatgccagggatgccaggcaagcatggagccaagggggcgcccggaattgccgtggctgggatgaagggtgagccagggatcccaggaaccaagggtgagaagggggctgaaggctcccctgggcttcctggcctcctggggcagaagggagagaaaggcgatgctggcaactccattggaggaggcagaggggaacctggccctccagggctccctgggcccccagggccaaagggagaagcaggtgtcgatggccaggttggccccccagggcagccaggagacaagggggagcgtggagcagctggagaacagggaccagatggccccaagggctccaagggagaaccagggaaaggagagatggtggattacaatggaaacatcaatgaggctctccaggagatccggacgctggccttgatggggcctcctggtcttcctgggcaaattggcccacctggagctccagggattccaggccagaagggggagattggactgccaggccctccaggacacgatggggaaaagggacctcgcggtaaaccaggagacatgggccctcctggtccccaaggccccccaggaaaggatggacctccaggagtgaagggagaaaacgggcacccagggagcccaggagagaagggggaaaaaggggagacaggacaagcaggctcaccgggagagaaaggagaagccggggagaagggcaatccaggagcagaggttcctgggctgccagggccagaggggcctcccggacctccggggctccaaggtgttcctggaccaaagggggaagcaggactagatggagcaaaaggagagaaaggcttccagggagaaaaaggagaccgtggtcccctgggactacccggagcttcaggtttggacggcaggcctgggccaccgggtactccaggaccaattggagttccaggcccagcgggaccaaagggcgagaggggcagcaaaggagaccctgggatgacaggaccaacgggagcagctgggcttcctggtttacatggaccacccggggacaagggaaaccggggggagagggggaagaaaggctctagagggcctaaaggggataagggagaccaaggagcgcctggattagatgccccctgcccattgggcgaagatggcttaccagtccaaggctgctggaacaagtgatgcctctaaccttggattggcctgtgtgtgtgtttgtacatagaatatttatttttatacagttttcactttttgaaaatgccagaagtatgatgcatcttacagattattaaaaaagaaagaaaaacctgcatattttgtacagaaaatatcaacctcttcccttttgtttacaagatgttttgtataagcctatgtctctaatacattttttgtttggtcgtaatgtctgcatgatatttgtgcacatttattaagtatcgaagcttaataaattattgtgtcctggtgccaaagggggccagccagaactgaggtgctggctagctcatgtgtgaattcacataaatgtagaggtccatgatatttgctaagctaggtgtgtctaagagtattttaaacccttatggattttcattattaaaggaaatgaaacatggcaattca

SEQ ID NO: 47700 - DNA, 3093 bp, Artificial Sequence
  derived and/or modified sequence
gtgtcaagttacagaggcgccggaatcggcccctgcgctcctcgccagccgccacgacccacctctgcccatggggccctccgtgtgcgccccttcgcccggggactgaaactgactggcccgggagacacgaggcgcccagaaggactgacagcgcggcaccaactgctctgcagacacttgaagggaaagactgggcggagagaaggagagccggtcagattcccctaactttcctggacttggaacgttcttcgaaataacttttttctcacctaggtgtaccccaattaccgctggttgtgctttttcggcacttcctctcctactgctaatttttccgtcctctttgccgggagcagcggaaagggacgttttccagcgatacaagccctttccccctgccccgcagtttggatagagccttttggcagcggctgtcgcctttatttattctatttatttatttattggttctcaagacgcgagaggatggtagcggagcgcacccacaaagcggcagccaccggtgcccgcggccctggggagttgggcgcgcccgggacggtggctctggtggcggcgcgggcggagcgcggcgcacggctgccgagtccagggtcgtgcgggctgctgacgctggccctctgctcgctggcactcagcctgctcgcccactttcggacggccgagctgcaggcccgggtgctgcgcctggaagcggagcgcggggagcagcaaatggagacggctattttgggacgagtcaatcaactgctggacgagaaatggaagctccactcaaggaggcgccgggaggccccaaagacatctccaggatgtaactgcccaccaggacctcctggtcccactggaagacccggactcccaggggacaaaggtgccattgggatgcctggacgtgtggggtcccccggagacgctgggctgtccatcattggtccccgcggcccccctggtcaaccaggaactagaggtttccctggatttccgggtcccattgggctggacggcaaaccgggccacccaggaccaaagggcgacatgggtctgacgggtcccccaggacagccgggaccccagggacaaaaaggagaaaagggtcagtgtggagagtacccacaccgggagtgcctaagcagcatgccagcagctctgcgctccagccaaataattgccctgaagctgctgcctctcctcaattcagtgcgactggctccacccccggtcataaaaaggcggacgttccagggcgaacagagccaggccagcatccaaggtccaccagggcccccaggcccccctggaccaagtggacctctggggcacccaggactgccagggcctatggggccacctggcttacctgggcctcctggaccaaagggagacccagggatccagggctaccacggccggaagggagaacggggcatgccagggatgccaggcaagcatggagccaagggggcgcccggaattgccgtggctgggatgaagggtgagccagggatcccaggaaccaagggtgagaagggggctgaaggctcccctgggcttcctggcctcctggggcagaagggagagaaaggcgatgctggcaactccattggaggaggcagaggggaacctggccctccagggctccctgggcccccagggccaaagggagaagcaggtgtcgatggccaggttggccccccagggcagccaggagacaagggggagcgtggagcagctggagaacagggaccagatggccccaagggctccaagggagaaccagggaaaggagagatggtggattacaatggaaacatcaatgaggctctccaggagatccggacgctggccttgatggggcctcctggtcttcctgggcaaattggcccacctggagctccagggattccaggccagaagggggagattggactgccaggccctccaggacacgatggggaaaagggacctcgcggtaaaccaggagacatgggccctcctggtccccaaggccccccaggaaaggatggacctccaggagtgaagggagaaaacgggcacccagggagcccaggagagaagggggaaaaaggggagacaggacaagcaggctcaccgggagagaaaggagaagccggggagaagggcaatccaggagcagaggttcctgggctgccagggccagaggggcctcccggacctccggggctccaaggtgttcctggaccaaagggggaagcaggactagatggagcaaaaggagagaaaggcttccagggagaaaaaggagaccgtggtcccctgggactacccggagcttcaggtttggacggcaggcctgggccaccgggtactccaggaccaattggagttccaggcccagcgggaccaaagggcgagaggggcagcaaaggagaccctgggatgacaggaccaacgggagcagctgggcttcctggtttacatggaccacccggggacaagggaaaccggggggagagggggaagaaaggctctagagggcctaaaggggataagggagaccaaggagcgcctggattagatgccccctgcccattgggcgaagatggcttaccagtccaaggctgctggaacaagtgatgcctctaaccttggattggcctgtgtgtgtgtttgtacatagaatatttatttttatacagttttcactttttgaaaatgccagaagtatgatgcatcttacagattattaaaaaagaaagaaaaacctgcatattttgtacagaaaatatcaacctcttcccttttgtttacaagatgttttgtataagcctatgtctctaatacattttttgtttggtcgtaatgtctgcatgatatttgtgcacatttattaagtatcgaagcttaataaattattgtgtcctggtgccaaagggggccagccagaactgaggtgctggctagctcatgtgtgaattcacataaatgtagaggtccatgatatttgctaagctaggtgtgtctaagagtattttaaacccttatggattttcattattaaaggaaatgaaacatggcaattca

SEQ ID NO: 47701 - DNA, 2154 bp, Artificial Sequence
  derived and/or modified sequence
atggtggctgagaggacgcacaaggctgccgcaaccggggcaaggggaccaggggagcttggtgcgcctgggacagttgccctggtggcagctagggccgagagaggagccagattgccttcccccggaagctgcggcctgctgacactcgccctgtgtagcctggcactgagcctcctggcgcacttccgcactgccgagctccaggccagagtcctgagactggaggccgaacggggagagcagcaaatggagaccgcaatcctgggcagagtaaatcagctcttggacgaaaagtggaaattgcactcccggcgaagaagagaagcacctaaaacctcgcccggatgtaattgtccgccagcatttcaggggcctaccgggaggccaggccttcctggagataagggggctattggaatgcccggacgggtcggctctccaggtgacgccggactaagcatcatcggccctcggggaccccctggacaacctggcacccgtggatttccaggcttcccgggtcccatcgggctggatgggaagcctggtcaccccggaccaaagggagatatgggacttaccggcccacctggtcagcctggcccacagggtcagaagggcgaaaagggacagtgtggggagtaccctcaccgggagtgcctgtcttccatgccggcagccctgcgttcatcgcagattatcgccctgaagttgcttcctctcttaaacagcgttcggcttgctccgccaccagtcattaagcgcagaacctttcaaggggagcagtcacaggcgtccatccagggtcccccaggtccccctgggcctccaggaccttcaggaccactgggccatcctgggctccctggaccaatggggcctcctggtttgcccggacccccaggcccaaaaggggatccgggtatacagggttaccacggaaggaaaggggaacggggtatgcctggcatgcccggaaaacacggcgctaaaggtgcccctggcattgccgtggccggtatgaagggtgagcccggaattcccggaacaaaaggagagaagggtgctgagggaagtcctggactgcctggccttcttgggcaaaagggcgaaaagggagatgcgggtaacagcattggaggcggacggggtgaaccaggcccacccggactgcccggtcctccagggccaaaaggggaggcaggcgtggatggccaggtgggcccaccagggcagccgggagacaagggcgaacgcggagcagccggagagcaggggccagatggtcctaagggctccaaaggcgaaccaggcaagggagagatggtggactacaatggtaatataaatgaagctctgcaggagatcaggaccctagctctgatgggccctcctgggctaccagggcagattggcccacccggagccccaggcatccccggtcagaagggtgagatcggactgcctggaccgccaggtcatgacggagagaagggccctcgaggaaaaccaggcgatatggggccaccaggcccacaaggtcctccagggaaagatggccctcccggagtcaaaggggaaaacgggcatccaggcagtccgggagaaaaaggcgaaaagggagaaacaggacaggctgggtcccccggagagaaaggggaagcaggggaaaagggtaatcctggtgctgaggtgccgggacttcccggtccagagggtcctccaggaccccctgggttgcagggcgtgcctggtcctaagggggaggcaggactggatggtgcaaagggggaaaaaggcttccaaggggagaagggagaccggggacctttgggtctaccgggtgctagcggcctggatggcaggccaggacctcccggaacacctggccctatcggcgtacctgggccagccggacccaagggtgaaagaggatccaaaggagatcctggtatgaccggtcccacgggagctgcaggtttacccggtctgcacgggccacccggagataagggaaacaggggggagagaggcaagaagggatccaggggccctaagggcgataagggtgaccagggagcgcctggattggacgccccttgccccttaggcgaggacggcctgcccgtccagggctgctggaacaaatag

SEQ ID NO: 47702 - DNA, 2067 bp, Artificial Sequence
  derived and/or modified sequence
atggtggctgaacgaacgcacaaggcggctgctaccggtgcacgcggtccaggagagctgggcgctccagggacagtcgccctcgtcgccgctcgggcagagcgcggagcgagactgccctcacccggttcctgcgggctgctcacccttgcactctgctctcttgccttgtctctgcttgcccacttccggacggccgagctgcaggctcgggtgctccgccttgaagcagagcggggtgagcaacagatggaaaccgctatcctaggccgagtgaatcagctcctggatgaaaaatggaaattgcactccaggagacggagagaggcacccaaaacgagcccaggttgcaactgccctccagccttccagggacctaccggtaggccgggtctcccaggacagccagggacacgaggctttcctggattcccgggacccatcggcctcgatggaaagcccggacacccagggccaaaaggtgatatgggcctgaccggacctccaggccagcccggaccccaagggcagaaaggggaaaaaggtcagtgcggggaatatccacatcgtgaatgtctgtcatctatgcccgctgccctgcgttcaagccagataatagcactgaaactgctgccgctcctgaattctgtcagactcgcacctccaccagttatcaagcgaagaaccttccaaggcgaacaaagccaagcctctatccaagggcctcctggtccgccaggcccaccaggtccgtctggccctctgggccaccctgggctcccgggtccgatgggtccacccggacttccagggccacctggacctaaaggtgacccgggaattcaggggtatcatggcaggaagggcgagcgcggtatgccagggatgcctgggaagcacggcgctaaaggcgcacctgggatagccgtagctggaatgaagggcgagccaggcattccgggaacaaaaggggaaaagggcgcagaaggctcacctggactccccggactgctcggacagaaaggggaaaaaggcgacgctggcaactcgatcggagggggacgcggagagcccggacctccaggcctgccaggacccccaggccctaagggcgaagcaggcgtggacgggcaggttggccctccaggccagcccggagacaagggagagcgtggagctgccggagaacaggggccagacggtccaaaaggctctaaaggcgagccgggaaaaggagagatggtggactataatggaaacatcaacgaggcactccaagaaatcaggaccctggctttgatgggacccccagggctccccggtcagatcggacccccaggggctccaggaatccccggacagaaaggcgagattggcctgcccggacccccaggtcatgatggggagaaagggccaagaggaaaacccggtgacatgggaccgcctggcccacagggacccccaggcaaggacggcccacctggcgtgaaaggagagaacggccatcccggtagtccaggcgagaagggggaaaaaggggagaccggccaagccggatctcccggagaaaagggggaggccggagagaagggcaatcccggagccgaggtcccaggattgcccggtcctgaaggtccccctggcccaccaggcctccagggtgtgccaggtcctaagggtgaggcgggtctggacggggcaaaaggcgagaaaggatttcagggagagaagggcgaccggggaccccttgggcttcccggagcttctggtctggatggcagacccggaccgcctgggacgcccggtcccataggtgtacccggaccagccggacccaaaggcgagcgcggttccaaaggcgatcccggaatgaccggccctaccggtgccgctggcttgcccggactgcacggcccaccaggggacaaaggaaacaggggggagaggggaaaaaagggtagccggggaccgaaaggagataagggagaccagggggcacccggactcgatgccccatgccccctgggagaagacggtctgcccgtgcaaggctgctggaataagtag

SEQ ID NO: 47703 - DNA, 2112 bp, Artificial Sequence
  derived and/or modified sequence
atggtggccgagaggactcacaaggccgctgcgacaggggcaaggggccctggggagctcggtgctcccggtaccgtagcactggtggcagcacgcgcagaacggggtgctcgcctccctagccctgggtcttgcgggcttcttacgctggctctctgctcgctcgccctctcgctgcttgcccatttccgcactgcagagctccaggctcgggttcttcggttagaggctgaacgcggtgagcagcagatggagacagcaatcctgggccgagtgaatcagcttctagatgaaaaatggaaactgcacagccggaggcggagggaggcccctaaaacgagtccaggatgtaactgtccgcctgggccacctggcccaactggacgccctggtctgccgggagacaagggcgctattgggatgcctggcagagtcggaagcccgggtgacgcaggactgtccataatcggtcctcgcggtccacccggacagccgggaacccgcggttttcccggttttcccggacccatcggactggacggaaagcccggacaccccggacctaagggtgacatgggtctaacaggaccaccaggtcagccaggccctcagggacaaaaaggagaaaaagggcagtgtggagaataccctcatcgggagtgcttgagctctatgccagccgctctgcgctcttcacaaattattgctctgaaactgctaccactcttgaacagtgtccggctggctcctcccccagtcatcaaacggagaacgtttcagggagaacagtcccaagcatctattcagggccctccgggtcccccagggccacccggaccttccggccctctgggtcaccccggactgcccggacctatgggtccacccggtctgcctggcccaccaggtcccaagggcgaccctggaatccagggctatcacggcagaaaaggggaacggggtatgccaggcatgcctggcaaacacggtgccaagggcgctcctggcatcgccgtggcaggtatgaaaggcgagcccggtatccctgggaccaagggggaaaagggagctgagggttcacctggcttaccaggcctgctgggacagaagggggaaaaaggagacgccggaaatagcatcggaggagggaggggcgagccaggaccacccggtctgcccggacccccaggtcccaagggcgaggcgggagttgacggccaggtgggccctccaggtcagccaggagacaagggagagagaggcgcagctggggagcaagggccagacgggccaaagggctcaaagggcgagcccggaaagggcgagatggtcgattacaatggaaatatcaacgaggccttacaaccctcgagaggtcccgcactgagaggccctccaggcttgcccggtcagatcgggcctccgggtgcgccaggaatcccgggacagaagggggagatcggtctacctggcccacctggccatgatggtgaaaagggcccaaggggaaagcctggtgacatgggtcccccagggccacagggacctcctggcaaagacggtccccctggcgtgaaaggagaaaatggtcatccaggatcgccgggtgaaaagggggaaaaaggcgaaacaggccaggccggaagtcctggcgagaaaggggaggcaggagaaaaaggaaaccccggtgctgagggccttcagggtgtgcccggacccaagggggaagccggactggatggcgcaaaaggagaaaaaggctttcagggtgaaaagggagaccgtggccctttgggtctccccggagcttctggactcgatggacggccaggcccaccaggaacacccggaccaatcggagtgcctggacccgcagggccaaagggtgagaggggctccaagggggacccagggatgacgggacccaccggcgctgccggactccctggattgcatgggcctccgggtgacaaaggaaaccggggagagcgaggaaagaagggatcacggggacccaaaggcgataagggcgatcagggagcgcctgggcttgacgccccttgccctctcggcgaagatggactgccagtgcaaggatgttggaacaaatag

SEQ ID NO: 47704 - DNA, 2076 bp, Artificial Sequence
  derived and/or modified sequence
atggtcgcagaaagaactcataaggccgctgcgaccggagccagggggccaggcgaattgggggctcccggtaccgtcgcgctcgtcgcagcacgcgctgagcgcggagcccgactaccgtcccccggaagttgcgggcttctgacactggccctttgctctctggccctgtccctcttggcccatttccgcacggcagaactgcaagctcgagtactgaggctggaggccgagagaggcgaacagcaaatggagaccgctatcctgggtagggttaaccagctcctggatgagaagtggaaactccacagtagaagaagacgggaggcgcctaaaacctcccccggatgcaattgcccccctggacctccaggccctaccgggagacctgggcttccgggagacaagggagccattggaatgccagggagggtggggtcacccggtgatgcaggactcagcatcattggtccaaggggccctccgggtcagccaggtacgaggggatttccaggctttcctgggcctataggactcgacgggaagccaggacaccccggtccgaaaggagacatggggttgaccgggccaccgggacagcccggtccccaagggcaaaaaggagaaaaaggccagtgcggggaatacccccacagggagtgcctatccagtatgccagcggctctgcggtcaagtcaaatcatcgctctgaaactcctgccgcttctgaactccgtcaggctggcgcctccacctgtgattaagcgccgaacctttcaaggtgagcagagtcaggctagcattcaagggccaccagggccacctgggccacccggaccttctggtcctttgggtcaccccggtctgcctggccctatggggccaccaggacttcctggccctccagggcctaaaggagacccagggatccagggctaccacggcagaaaaggcgaaagaggtatgccaggaatgcctggcaagcacggggcaaaaggtgccccaggtattgctgtcgctggcatgaaaggagagcccggaatcccaggcactaaaggcgagaaaggcgctgagggatcccctgggctgcccggtctcttgggccagaagggcgaaaagggagacgctgggaattcaatcgggggagggcgaggcgagccaggcccacctggcctgcccggtccaccgggaccaaagggagaggcaggtgttgatgggcaggtcggccctcccggacagcccggtgataagggagagcgaggggctgcaggcgagcagggccctgacggtcctaagggaagcaaaggggaacccggtaagggcgagatggtcgattataatggcaatatcaatgaggccctccagccctctagagggccagcccttcggggaccgcctggcttgccagggcagatcgggccacctggcgctccgggtattccaggacagaaaggggagattggactccccggaccaccaggccatgatggcgaaaaaggcccaaggggtaaaccaggtgatatgggaccacctggtccacaggggccaccaggtaaggatggtcccccaggagtcaaaggagaaaatggtcatccaggcagcccaggcgagaagggcgagaaaggcgaaacagggcaggccggaagtccgggtgagaaaggcgaagccggtgagaaaggaaaccccggagcggaggggctccaaggagtgcctggccctaaaggcgaggcaggcctcgatggagccaagggtgagaagggatttcagggagagaaaggtgaccggggtcccctggggctgcccggtacgcccggacccatcggggttccaggacccgcagggcctaagggtgaacgaggtagcaaaggagacccaggcatgaccggtcctacaggggctgcaggcctccctgggctgcacggccctcccggagataagggaaatagaggggagcgcggaaagaagggctcaaggggccctaagggagataaaggcgatcagggcgcacctgggttggacgcgccttgcccattaggtgaggatggcctccctgtgcagggttgctggaacaagtag

SEQ ID NO: 47705 - DNA, 2118 bp, Artificial Sequence
  derived and/or modified sequence
atggtggcggaaagaactcataaggccgctgctaccggcgcaaggggtcctggcgagctgggtgcacctggcactgttgcgttggtggccgctcgcgcagaacgcggagctaggctgcccagcccgggtagctgtgggctccttacgttggccctgtgttcactggccctgagtctgttggcacattttcggacagctgaactgcaagctcgggtacttcgccttgaggccgagagaggggaacagcagatggaaacagcaatactcggacgagtgaaccagctgcttgatgagaaatggaaactgcactcccgaaggaggcgcgaggcacctaagacgtctcccggttgtaattgcccccctgccttccagggacccactggcaggcctggactccctggctcccccggagatgccggtcttagcatcatcggcccaagaggaccacccggacaacccggaacaaggggattccccggattcccaggccctatcggcctcgatggaaaacctgggcatccaggtccaaaaggcgacatgggccttaccggacctcctgggcagccaggaccccagggccagaaaggcgagaaaggccaatgcggcgagtacccccaccgagagtgtctttcaagtatgcccgctgccctgcggtcgagccagatcatcgccctgaaacttctgcccctgctcaactccgtgaggttggctccacccccagtgatcaaaaggcgcacattccaaggggagcagtcccaggcttccattcagggcccacccggtccgccaggaccgcctggtccctcagggcctttggggcatcctggacttcctgggccaatgggtccaccaggactccccggacccccaggccctaagggggaccccggaattcaggggtatcacggacgtaagggtgaacggggaatgccaggtatgcctggtaaacatggggcaaagggggctccagggatagctgtggctgggatgaaaggtgagccgggaattccaggaaccaaaggcgagaagggagccgagggaagtccaggactgcccggactgctgggacagaaaggcgaaaaaggggacgccggaaactctatcgggggaggcagaggcgagccagggcctcctgggctccctggcccaccaggccctaaaggtgaggccggtgttgacgggcaggtaggcccaccaggtcagccaggcgacaagggagaacgcggagccgcaggcgagcagggtccagatggtccaaagggctctaaaggggagccaggcaaaggagagatggtagactataacgggaatattaacgaggctcttcaagagattaggacactggcactgatgggtccaccaggactgcctggacaaattgggccacctggggcacctggtattcctgggcagaaaggagaaatcggcctgcctggccctcctggccatgacggagagaaaggaccccgaggcaagcccggagacatgggacccccaggccctcagggaccccctggaaaggatggtcccccaggcgtcaagggagagaatggacaccccggttcaccaggggagaagggagaaaagggggaaactggacaggccggaagccctggtgaaaaaggcgaggcaggcgagaaagggaatcccggtgctgaggtccccggactccccggacctgagggacctccgggtccaccagggcttcagggtgtgcccggaccaaaaggggaagccggtctcgacggggcaaagggcgagaagggcttccagggcgaaaagggtgaccggggaccgttggggctgcctggagctagcggccttgatggacgacccggtcctccaggaacacccggacccatcggcgtccccggacctgccggtcccaagggtgaaagagggtcgaagggtgatccaggcatgacaggtcccactggcgcagctggcttgcctggcctgcacggccctcccggtgacaagggaaacaggggagagcgaggcaagaagggatccagggggcctaaaggggataaaggagaccagggagcgccagggctcgacgcgccatgccctcttggggaagatggattacctgttcagggatgctggaacaaatag

SEQ ID NO: 47706 - DNA, 2154 bp, Artificial Sequence
  derived and/or modified sequence
atggtggcggagcgtacacacaaagcagccgctactggagctcggggacccggagagttaggcgcacctggcactgtggccctggttgctgcgagagccgagcgaggagccagactgccgtctccaggcagttgtggcctactgacactggctctctgttctctggccctgtcccttctagcccacttccggacagcggagctgcaggccagagtgttgagattagaggccgagcgaggtgagcagcaaatggagaccgccatccttggacgagttaaccagctgctggatgaaaaatggaaactgcactctaggcggaggcgggaagcccctaagactagccccggttgtaattgtcccccagggccacctggcccaaccggcaggcctgggttgcccggtgataagggcgctattggaatgcctggcagagtgggcagcccaggggacgcaggcctctccatcattggccctagggggcctccaggacagcccggaacgcgagggttccctggattccccggaccaatcggcctggatggaaagccaggtcaccccggacctaagggagacatgggcctgaccggaccccctgggcagccaggcccacaagggcagaagggagaaaaaggccagtgtggggaatacccacacagggaatgtctgtctagtatgccggctgcgctgcgaagctcgcagatcattgccctgaagctgctgcccctgcttaatagcgtccggttggctccaccaccagttattaaaagacgcacttttcagggagaacagtcccaagcttccattcaaggaccaccagggccacccggtcccccagggccatccggccctctgggccatccgggattacccggacccatggggccaccaggactccctggcccacctgggcctaagggagacccgggaatacagggttatcatgggcgaaagggagagagaggaatgccgggtatgcctggaaaacacggggcaaagggtgcccctggtattgcagtcgccggtatgaagggcgagcccggaatccctggcaccaagggcgagaaaggcgctgaaggaagtcccggactcccaggcctgctggggcagaaaggggaaaagggggatgccggaaacagtattgggggaggacggggtgagcccggtccccctggactgccgggtccgcctggccctaaaggggaggcaggcgtggacgggcaggtggggccacccggacagcccggagataaaggtgagcgcggtgccgctggcgaacagggacctgatggacccaaggggagcaagggggaacccggaaaaggtgagatggtcgattacaatggcaacatcaatgaagccttacaggagatccgtacccttgctctgatgggccctcccggtctcccaggccagatcggcccacccggtgcacctggcattccgggtcagaagggcgaaattggattgcccggacctccagggcacgacggtgaaaaagggcctagaggtaaacctggagatatggggccaccaggcccacagggccctccgggaaaggatggtccccctggagtgaagggtgagaatggccaccccggttctcctggggagaagggggaaaaaggcgagaccggacaggctggaagtcccggagaaaagggggaagcgggtgaaaagggtaatcctggagccgaggtgcctggtttgcccggacccgaaggtccaccaggccctcccggtttgcaaggtgtgccgggtcctaagggggaagctgggttagatggagctaaaggggagaaagggttccagggggagaagggcgatagggggccactgggactccccggtgcgagcggactggacggaaggcctggtccaccgggaacccctggaccgattggagtgcccggtcccgctggacccaaaggcgagaggggctctaaaggagatccaggcatgacaggacctactggcgctgcaggtctgccaggactccacgggcctccaggcgataaaggaaatagaggcgaaagagggaaaaaagggagccgaggccctaagggggataagggcgaccagggcgctccgggactggatgctccgtgccctctgggggaagacggcctccccgtgcagggctgctggaacaaatag

SEQ ID NO: 47707 - protein, 229 aa, Artificial Sequence
  derived and/or modified sequence
KVEEMVQNHMTYSLQDVGGDANWQLVVEEGEMKVYRREVEENGIVLDPLKATHAVKGVTGHEVCNYFWNVDVRNDWETTIENFHVVETLADNAIIIYQTHKRVWPASQRDVLYLSVIRKIPALTENDPETWIVCNFSVDHDSAPLNNRCVRAKINVAMICQTLVSPPEGNQEISRDNILCKITYVANVNPGGWAPASVLRAVAKREYPKFLKRFTSYVQEKTAGKPILF

SEQ ID NO: 47708 - protein, 752 aa, Artificial Sequence
  derived and/or modified sequence
MQHSCIPTPPSPFSAPPAFLPVVTRESRRGLSSGGSAGRNAGVTATAAAADGWKGRLPSPLVLLPRSARCQARRRRGGRTSSLLLLPPTPERALFASPSPDPSPRGLGASSGAAEGAGAGLLLGCRASMSDNQSWNSSGSEEDPETESGPPVERCGVLSKWTNYIHGWQDRWVVLKNNALSYYKSEDETEYGCRGSICLSKAVITPHDFDECRFDISVNDSVWYLRAQDPDHRQQWIDAIEQHKTESGYGSESSLRRHGSMVSLVSGASGYSATSTSSFKKGHSLREKLAEMETFRDILCRQVDTLQKYFDACADAVSKDELQRDKVVEDDEDDFPTTRSDGDFLHSTNGNKEKLFPHVTPKGINGIDFKGEAITFKATTAGILATLSHCIELMVKREDSWQKRLDKETEKKRRTEEAYKNAMTELKKKSHFGGPDYEEGPNSLINEEEFFDAVEAALDRQDKIEEQSQSEKVRLHWPTSLPSGDAFSSVGTHRFVQKPYSRSSSMSSIDLVSASDDVHRFSSQVEEMVQNHMTYSLQDVGGDANWQLVVEEGEMKVYRREVEENGIVLDPLKATHAVKGVTGHEVCNYFWNVDVRNDWETTIENFHVVETLADNAIIIYQTHKRVWPASQRDVLYLSVIRKIPALTENDPETWIVCNFSVDHDSAPLNNRCVRAKINVAMICQTLVSPPEGNQEISRDNILCKITYVANVNPGGWAPASVLRAVAKREYPKFLKRFTSYVQEKTAGKPILF

SEQ ID NO: 47709 - protein, 624 aa, Artificial Sequence
  derived and/or modified sequence
MSDNQSWNSSGSEEDPETESGPPVERCGVLSKWTNYIHGWQDRWVVLKNNALSYYKSEDETEYGCRGSICLSKAVITPHDFDECRFDISVNDSVWYLRAQDPDHRQQWIDAIEQHKTESGYGSESSLRRHGSMVSLVSGASGYSATSTSSFKKGHSLREKLAEMETFRDILCRQVDTLQKYFDACADAVSKDELQRDKVVEDDEDDFPTTRSDGDFLHSTNGNKEKLFPHVTPKGINGIDFKGEAITFKATTAGILATLSHCIELMVKREDSWQKRLDKETEKKRRTEEAYKNAMTELKKKSHFGGPDYEEGPNSLINEEEFFDAVEAALDRQDKIEEQSQSEKVRLHWPTSLPSGDAFSSVGTHRFVQKPYSRSSSMSSIDLVSASDDVHRFSSQVEEMVQNHMTYSLQDVGGDANWQLVVEEGEMKVYRREVEENGIVLDPLKATHAVKGVTGHEVCNYFWNVDVRNDWETTIENFHVVETLADNAIIIYQTHKRVWPASQRDVLYLSVIRKIPALTENDPETWIVCNFSVDHDSAPLNNRCVRAKINVAMICQTLVSPPEGNQEISRDNILCKITYVANVNPGGWAPASVLRAVAKREYPKFLKRFTSYVQEKTAGKPILF

SEQ ID NO: 47710 - DNA, 2259 bp, Artificial Sequence
  derived and/or modified sequence
atgcagcacagctgcatccccaccccccccagccccttcagcgccccccccgccttcctgcccgtggtgaccagagagagcagaagaggcctgagcagcggcggcagcgccggcagaaacgccggcgtgaccgccaccgccgccgccgccgacggctggaagggcagactgcccagccccctggtgctgctgcccagaagcgccagatgccaggccagaagaagaagaggcggcagaaccagcagcctgctgctgctgccccccacccccgagagagccctgttcgccagccccagccccgaccccagccccagaggcctgggcgccagcagcggcgccgccgagggcgccggcgccggcctgctgctgggctgcagagccagcatgagcgacaaccagagctggaacagcagcggcagcgaggaggaccccgagaccgagagcggcccccccgtggagagatgcggcgtgctgagcaagtggaccaactacatccacggctggcaggacagatgggtggtgctgaagaacaacgccctgagctactacaagagcgaggacgagaccgagtacggctgcagaggcagcatctgcctgagcaaggccgtgatcaccccccacgacttcgacgagtgcagattcgacatcagcgtgaacgacagcgtgtggtacctgagagcccaggaccccgaccacagacagcagtggatcgacgccatcgagcagcacaagaccgagagcggctacggcagcgagagcagcctgagaagacacggcagcatggtgagcctggtgagcggcgccagcggctacagcgccaccagcaccagcagcttcaagaagggccacagcctgagagagaagctggccgagatggagaccttcagagacatcctgtgcagacaggtggacaccctgcagaagtacttcgacgcctgcgccgacgccgtgagcaaggacgagctgcagagagacaaggtggtggaggacgacgaggacgacttccccaccaccagaagcgacggcgacttcctgcacagcaccaacggcaacaaggagaagctgttcccccacgtgacccccaagggcatcaacggcatcgacttcaagggcgaggccatcaccttcaaggccaccaccgccggcatcctggccaccctgagccactgcatcgagctgatggtgaagagagaggacagctggcagaagagactggacaaggagaccgagaagaagagaagaaccgaggaggcctacaagaacgccatgaccgagctgaagaagaagagccacttcggcggccccgactacgaggagggccccaacagcctgatcaacgaggaggagttcttcgacgccgtggaggccgccctggacagacaggacaagatcgaggagcagagccagagcgagaaggtgagactgcactggcccaccagcctgcccagcggcgacgccttcagcagcgtgggcacccacagattcgtgcagaagccctacagcagaagcagcagcatgagcagcatcgacctggtgagcgccagcgacgacgtgcacagattcagcagccaggtggaggagatggtgcagaaccacatgacctacagcctgcaggacgtgggcggcgacgccaactggcagctggtggtggaggagggcgagatgaaggtgtacagaagagaggtggaggagaacggcatcgtgctggaccccctgaaggccacccacgccgtgaagggcgtgaccggccacgaggtgtgcaactacttctggaacgtggacgtgagaaacgactgggagaccaccatcgagaacttccacgtggtggagaccctggccgacaacgccatcatcatctaccagacccacaagagagtgtggcccgccagccagagagacgtgctgtacctgagcgtgatcagaaagatccccgccctgaccgagaacgaccccgagacctggatcgtgtgcaacttcagcgtggaccacgacagcgcccccctgaacaacagatgcgtgagagccaagatcaacgtggccatgatctgccagaccctggtgagcccccccgagggcaaccaggagatcagcagagacaacatcctgtgcaagatcacctacgtggccaacgtgaaccccggcggctgggcccccgccagcgtgctgagagccgtggccaagagagagtaccccaagttcctgaagagattcaccagctacgtgcaggagaagaccgccggcaagcccatcctgttctag

SEQ ID NO: 47711 - DNA, 1875 bp, Artificial Sequence
  derived and/or modified sequence
atgagcgacaaccagagctggaacagcagcggcagcgaggaggaccccgagaccgagagcggcccccccgtggagagatgcggcgtgctgagcaagtggaccaactacatccacggctggcaggacagatgggtggtgctgaagaacaacgccctgagctactacaagagcgaggacgagaccgagtacggctgcagaggcagcatctgcctgagcaaggccgtgatcaccccccacgacttcgacgagtgcagattcgacatcagcgtgaacgacagcgtgtggtacctgagagcccaggaccccgaccacagacagcagtggatcgacgccatcgagcagcacaagaccgagagcggctacggcagcgagagcagcctgagaagacacggcagcatggtgagcctggtgagcggcgccagcggctacagcgccaccagcaccagcagcttcaagaagggccacagcctgagagagaagctggccgagatggagaccttcagagacatcctgtgcagacaggtggacaccctgcagaagtacttcgacgcctgcgccgacgccgtgagcaaggacgagctgcagagagacaaggtggtggaggacgacgaggacgacttccccaccaccagaagcgacggcgacttcctgcacagcaccaacggcaacaaggagaagctgttcccccacgtgacccccaagggcatcaacggcatcgacttcaagggcgaggccatcaccttcaaggccaccaccgccggcatcctggccaccctgagccactgcatcgagctgatggtgaagagagaggacagctggcagaagagactggacaaggagaccgagaagaagagaagaaccgaggaggcctacaagaacgccatgaccgagctgaagaagaagagccacttcggcggccccgactacgaggagggccccaacagcctgatcaacgaggaggagttcttcgacgccgtggaggccgccctggacagacaggacaagatcgaggagcagagccagagcgagaaggtgagactgcactggcccaccagcctgcccagcggcgacgccttcagcagcgtgggcacccacagattcgtgcagaagccctacagcagaagcagcagcatgagcagcatcgacctggtgagcgccagcgacgacgtgcacagattcagcagccaggtggaggagatggtgcagaaccacatgacctacagcctgcaggacgtgggcggcgacgccaactggcagctggtggtggaggagggcgagatgaaggtgtacagaagagaggtggaggagaacggcatcgtgctggaccccctgaaggccacccacgccgtgaagggcgtgaccggccacgaggtgtgcaactacttctggaacgtggacgtgagaaacgactgggagaccaccatcgagaacttccacgtggtggagaccctggccgacaacgccatcatcatctaccagacccacaagagagtgtggcccgccagccagagagacgtgctgtacctgagcgtgatcagaaagatccccgccctgaccgagaacgaccccgagacctggatcgtgtgcaacttcagcgtggaccacgacagcgcccccctgaacaacagatgcgtgagagccaagatcaacgtggccatgatctgccagaccctggtgagcccccccgagggcaaccaggagatcagcagagacaacatcctgtgcaagatcacctacgtggccaacgtgaaccccggcggctgggcccccgccagcgtgctgagagccgtggccaagagagagtaccccaagttcctgaagagattcaccagctacgtgcaggagaagaccgccggcaagcccatcctgttctag

SEQ ID NO: 47712 - DNA, 2259 bp, Artificial Sequence
  derived and/or modified sequence
atgcagcactcctgcattcccactccaccctcacccttttctgcccctccagcgttcctccctgtggtgacaagagagagtcgtagaggtctgtcctccggtgggtcagctggccgcaatgcgggagttacggctacagccgcggctgccgacggatggaagggccgccttcctagtcctttggtgctgctgcctagaagtgcacggtgccaagcacgccgccgccgtggtggccgaacgagcagcctcctactcttacctccgacaccagaacgcgcactattcgcatcaccatcgcctgatccaagtcctagaggcctgggtgctagtagcggtgcggccgagggcgccggagcgggcttgctcctgggctgccgggcaagtatgtcagacaatcagtcgtggaatagcagcggctccgaggaggacccggaaacagagagtggacctccggtcgagagatgcggcgtactctctaagtggacaaattatatacatgggtggcaggatcgatgggtcgtgttaaaaaataacgcactttcttactacaagtctgaggatgagacagagtacggctgcagaggcagtatctgtctgtcaaaggcagtcatcactccacatgactttgatgaatgcaggtttgacatctcagtgaatgacagcgtgtggtacctgcgcgctcaggatcccgaccacagacagcagtggattgacgctatcgagcagcacaagaccgagagcgggtatgggagcgagtcgagcctgaggaggcatgggtccatggtgtccctggtgtccggagccagcggatattcagcaacctctacatccagctttaaaaagggccacagcctgcgggaaaaactggccgaaatggaaacgtttcgggacatcctgtgtaggcaagtggacacccttcaaaaatatttcgacgcctgcgcggacgctgtctcgaaagatgaactgcagcgggacaaagtagttgaggatgacgaggacgatttccctaccaccaggtctgacggagactttcttcatagtacaaatggtaacaaggagaaactgtttccccacgtcacaccgaaaggaataaacggaattgactttaagggggaggcaatcacatttaaagctaccacagcaggtatcctggctaccctcagccactgcatagagctcatggtgaaacgggaggactcctggcagaaacggctggataaagagactgaaaagaagcgcaggaccgaagaagcttacaagaatgcgatgaccgaactaaagaagaagtctcatttcgggggtcccgactacgaggaaggacctaacagtctaataaatgaagaggaattcttcgacgcggtggaggccgcgctggataggcaagacaagattgaggagcaatcccagtcagaaaaggtacggctgcattggccaacgtctcttccttcaggcgatgcattctcttccgtgggaacacacaggttcgtgcagaaaccttatagtaggagcagttccatgtcgtccatcgatctggtgtccgcttctgacgatgtgcacagattctcttcccaagttgaggagatggtccagaatcacatgacatactcgctgcaagatgttggaggggacgcaaattggcagctcgtcgtggaagagggagagatgaaggtgtaccggagggaggtagaagagaacggtatcgtgcttgaccccttgaaggccacccatgcagttaagggggtaactgggcatgaggtgtgcaactacttttggaacgtggacgtgcggaatgattgggagactactatcgaaaattttcacgtcgtcgagacgctagctgacaatgccattataatataccagacgcacaagcgggtctggccagcaagccagagggatgttctgtacctgtctgtcatcaggaagatcccagcactgacagagaacgatccggagacgtggattgtgtgtaattttagcgttgaccacgatagtgcaccactaaataatagatgcgtgcgtgccaagattaatgtggccatgatatgtcaaacattggtgtcaccccccgaaggcaatcaagaaatcagccgggacaacattctctgtaagatcacctatgttgcgaacgtgaatcccggaggctgggcacccgcttcagtgctgcgagctgtcgccaagcgggagtaccctaaatttctgaaaaggtttactagctacgtacaggaaaaaactgctggaaaacccattctcttttag

SEQ ID NO: 47713 - DNA, 1875 bp, Artificial Sequence
  derived and/or modified sequence
atgtcggataaccagtcttggaatagcagcgggtctgaggaggaccctgagacagaatctgggccaccagtggaacgctgcggagttctgtcaaagtggacaaattatatccacgggtggcaagaccggtgggtcgtgcttaagaacaatgccctgtcatactacaaatctgaggacgagactgagtacggctgcagaggatccatctgcctgagcaaggccgtcatcacacctcacgactttgacgaatgtcggttcgacattagcgtgaacgactcggtatggtacttacgggcacaggatcctgatcacaggcagcagtggatcgatgcaatagagcagcacaagactgagagcggctatggcagcgaatcatccctgagacgccacgggagtatggtgtccctggtgagtggcgcctccggatattcagcgaccagcacttcatccttcaaaaaagggcactctctaagagagaaactggcagagatggagacgtttagagatatcctttgtcggcaagtagacaccttacaaaagtattttgatgcatgcgcggacgctgtcagcaaagatgagctgcagagggataaggtggtggaagatgatgaggacgacttcccgaccacgcgcagtgatggggacttcttgcattcaactaacggaaataaagagaaattattccctcatgtgactcctaagggaatcaacggaattgacttcaagggagaagcaatcacttttaaagctaccacggctggaatcttagccacacttagtcactgtattgagcttatggtgaagcgggaggacagctggcagaagaggctcgataaagagacggagaagaagcgtcgcacggaggaagcgtataagaatgctatgaccgagttgaagaaaaaatcacattttggaggtccagattatgaggaaggtcccaactcacttattaatgaggaggaattcttcgatgcagtcgaagcagcactggatcggcaggacaaaatcgaagagcagagtcagtctgagaaggtacgtctccactggccaacctccctcccctcaggcgacgccttctcgtccgtgggcacccaccgtttcgtgcaaaagccatactctagatcgagtagtatgagttctatcgatctcgtgagtgcttctgacgatgttcacagattcagtagtcaggtcgaggagatggtccagaaccacatgacttattccctgcaggatgtgggcggagatgctaattggcaactggtggtagaagagggcgaaatgaaagtctaccgcagggaagtagaagaaaacgggattgtgcttgaccctctgaaggccacacacgcagtgaaaggcgtcacaggccatgaggtctgtaattatttttggaacgtagatgtcagaaacgattgggagactaccattgagaattttcacgtggtcgagacgctagcggataatgctatcataatctatcaaacccacaaaagagtgtggccagccagtcagagggacgtcctatacctgtccgtcattcgcaagattcccgctcttactgagaacgacccagaaacttggatcgtttgcaacttttcagtggaccacgactcagccccacttaacaaccgctgtgttcgagctaagatcaatgtggccatgatatgtcagactctggtgtctcctcctgaaggcaatcaggagatcagcagagacaacatcttgtgtaagatcacctacgtagccaatgttaatcctggaggttgggcgccagccagcgttctgagggcagtcgctaagagagaataccccaagttcctcaaaaggtttacttcctacgtgcaggaaaaaaccgcagggaagccaattcttttttag

SEQ ID NO: 47714 - DNA, 2262 bp, Artificial Sequence
  derived and/or modified sequence
aaatagtgggccaggcaggaagatggcggcggtagcggaggtgtgagtggacgcgggactcagcggccggattttctcttcccttcttttcccttttccttccctatttgaaattggcatcgagggggctaagttcgggtggcagcgccgggcgcaacgcaggggtcacggcgacggcggcggcggctgacggctggaagggtaggcttccttcaccgctcgtcctccttcctcgctccgctcggtgtcaggcgcggcggcggcgcggcgggcggacttcgtccctcctcctgctcccccccacaccggagcgggcactcttcgcttcgccatcccccgacccttcaccccgaggactgggcgcctcctccggcgcagctgagggagcgggggccggtctcctgctcggttgtcgagcctccatgtcggataatcagagctggaactcgtcgggctcggaggaggatccagagacggagtctgggccgcctgtggagcgctgcggggtcctcagtaagtggacaaactacattcatgggtggcaggatcgttgggtagttttgaaaaataatgctctgagttactacaaatctgaagatgaaacagagtatggctgcagaggatccatctgtcttagcaaggctgtcatcacacctcacgattttgatgaatgtcgatttgatattagtgtaaatgatagtgtttggtatcttcgtgctcaggatccagatcatagacagcaatggatagatgccattgaacagcacaagactgaatctggatatggatctgaatccagcttgcgtcgacatggctcaatggtgtccctggtgtctggagcaagtggctactctgcaacatccacctcttcattcaagaaaggccacagtttacgtgagaagttggctgaaatggaaacatttagagacatcttatgtagacaagttgacacgctacagaagtactttgatgcctgtgctgatgctgtctctaaggatgaacttcaaagggataaagtggtagaagatgatgaagatgactttcctacaacgcgttctgatggtgacttcttgcatagtaccaacggcaataaagaaaagttatttccacatgtgacaccaaaaggaattaatggtatagactttaaaggggaagcgataacttttaaagcaactactgctggaatccttgcaacactttctcattgtattgaactaatggttaaacgtgaggacagctggcagaagagactggataaggaaactgagaagaaaagaagaacagaggaagcatataaaaatgcaatgacagaacttaagaaaaaatcccactttggaggaccagattatgaagaaggccctaacagtctgattaatgaagaagagttctttgatgctgttgaagctgctcttgacagacaagataaaatagaagaacagtcacagagtgaaaaggtgagattacattggcctacatccttgccctctggagatgccttttcttctgtggggacacatagatttgtccaaaaggttgaagagatggtgcagaaccacatgacttactcattacaggatgtaggcggagatgccaattggcagttggttgtagaagaaggagaaatgaaggtatacagaagagaagtagaagaaaatgggattgttctggatcctttaaaagctacccatgcagttaaaggcgtcacaggacatgaagtctgcaattatttctggaatgttgacgttcgcaatgactgggaaacaactatagaaaactttcatgtggtggaaacattagctgataatgcaatcatcatttatcaaacacacaagagggtgtggcctgcttctcagcgagacgtattatatctttctgtcattcgaaagataccagccttgactgaaaatgaccctgaaacttggatagtttgtaatttttctgtggatcatgacagtgctcctctaaacaaccgatgtgtccgtgccaaaataaatgttgctatgatttgtcaaaccttggtaagcccaccagagggaaaccaggaaattagcagggacaacattctatgcaagattacatatgtagctaatgtgaaccctggaggatgggcaccagcctcagtgttaagggcagtggcaaagcgagagtatcctaaatttctaaaacgttttacttcttacgtccaagaaaaaactgcaggaaagcctattttgttctagtattaacagtgactgaagcaaggctgtgtgacattccatgttg

SEQ ID NO: 47715 - DNA, 5421 bp, Artificial Sequence
  derived and/or modified sequence
agatgctcccgggctttcgacaagccgccctggaaagcaggcccgtcatcttcagcggaaagctctctcacgtctgggcccgcaagcccggagggttcgtcataaacacacaaggcaaggatagaagcgaggccgaggggctggtcacgcaactgtcaaacgaagcccacccaccgactgacaaggccccaaggggacaagcgatccccgcgcgggatactcacccgttacctcaggatcgcgactacaactcccaggaggctgcgcgagcgacggaccaacgcccttcccagaatgcagcacagctgcatccctaccccgccctctcctttctccgctcctcctgcttttctacccgtcgtcacccgggagagccggagggggctaagttcgggtggcagcgccgggcgcaacgcaggggtcacggcgacggcggcggcggctgacggctggaagggtaggcttccttcaccgctcgtcctccttcctcgctccgctcggtgtcaggcgcggcggcggcgcggcgggcggacttcgtccctcctcctgctcccccccacaccggagcgggcactcttcgcttcgccatcccccgacccttcaccccgaggactgggcgcctcctccggcgcagctgagggagcgggggccggtctcctgctcggttgtcgagcctccatgtcggataatcagagctggaactcgtcgggctcggaggaggatccagagacggagtctgggccgcctgtggagcgctgcggggtcctcagtaagtggacaaactacattcatgggtggcaggatcgttgggtagttttgaaaaataatgctctgagttactacaaatctgaagatgaaacagagtatggctgcagaggatccatctgtcttagcaaggctgtcatcacacctcacgattttgatgaatgtcgatttgatattagtgtaaatgatagtgtttggtatcttcgtgctcaggatccagatcatagacagcaatggatagatgccattgaacagcacaagactgaatctggatatggatctgaatccagcttgcgtcgacatggctcaatggtgtccctggtgtctggagcaagtggctactctgcaacatccacctcttcattcaagaaaggccacagtttacgtgagaagttggctgaaatggaaacatttagagacatcttatgtagacaagttgacacgctacagaagtactttgatgcctgtgctgatgctgtctctaaggatgaacttcaaagggataaagtggtagaagatgatgaagatgactttcctacaacgcgttctgatggtgacttcttgcatagtaccaacggcaataaagaaaagttatttccacatgtgacaccaaaaggaattaatggtatagactttaaaggggaagcgataacttttaaagcaactactgctggaatccttgcaacactttctcattgtattgaactaatggttaaacgtgaggacagctggcagaagagactggataaggaaactgagaagaaaagaagaacagaggaagcatataaaaatgcaatgacagaacttaagaaaaaatcccactttggaggaccagattatgaagaaggccctaacagtctgattaatgaagaagagttctttgatgctgttgaagctgctcttgacagacaagataaaatagaagaacagtcacagagtgaaaaggtgagattacattggcctacatccttgccctctggagatgccttttcttctgtggggacacatagatttgtccaaaagccctatagtcgctcttcctccatgtcttccattgatctagtcagtgcctctgatgatgttcacagattcagctcccaggttgaagagatggtgcagaaccacatgacttactcattacaggatgtaggcggagatgccaattggcagttggttgtagaagaaggagaaatgaaggtatacagaagagaagtagaagaaaatgggattgttctggatcctttaaaagctacccatgcagttaaaggcgtcacaggacatgaagtctgcaattatttctggaatgttgacgttcgcaatgactgggaaacaactatagaaaactttcatgtggtggaaacattagctgataatgcaatcatcatttatcaaacacacaagagggtgtggcctgcttctcagcgagacgtattatatctttctgtcattcgaaagataccagccttgactgaaaatgaccctgaaacttggatagtttgtaatttttctgtggatcatgacagtgctcctctaaacaaccgatgtgtccgtgccaaaataaatgttgctatgatttgtcaaaccttggtaagcccaccagagggaaaccaggaaattagcagggacaacattctatgcaagattacatatgtagctaatgtgaaccctggaggatgggcaccagcctcagtgttaagggcagtggcaaagcgagagtatcctaaatttctaaaacgttttacttcttacgtccaagaaaaaactgcaggaaagcctattttgttctagtattaacagtgactgaagcaaggctgtgtgacattccatgttggagaaaaaaagaaaaaaaaaagctgaatgctctaagctggaacgtaggatctatagccttgtctgtggcccaagaccttggccttgtgtacaaaaatgacaaaatattgcaatagcaaagctgaacatctaacactagctatctcttgctagatctccttgctcagcatataactataaatacatgtaaaattacatgtatatggctatatttttatttgcttgctcctagaagagaaaaaaaaatcaactttgaatcacaactaggaattgatgctttaatttttggatactttttcagaatttttaatttactatggtccggcctaagatcctctgttgtatcaggttttgtgcacaaaagaaaagcacaaaagttgaatgcacatggggcatgtgctttctgtgcaccaaatatctggatgaggttcttttttcaggcctacagtcaaatctgtgtccagaattttttgacttttttgctttgtataatcatagaattcattgctgctgatttctataatgattcatgttgtcatgtgtctcttaataactgagggctgtcagtaacctgtgattttgccttttctatagtcttactcccatgaagaaccttggttctgatggagaaagtgaaaagctttatttcttcccctagatatctttatatttctattatattttttagttgtgtactgtgtactagagatttttttcagtttgttatgaacacaatttggtaagccctaaattggttctgcctgtctccaaacagaaacatctgtacaaatcttgttggtatagactactttctggaaaatggtcaagataagttcatgttttcttgaaatttctaagatagtatatggtatcacttgtttaaagcaaatcagactgagtttgacatttaattcaatatttctggtattcagtaacgggtatatatgtttgttcttccagtttgggtcagtttaaaagatatgttgcaaagtatacatagaaaatgtgagcaatgcctctctttgccttttgatcagaaacttcagcagagcggtaaggattccacatgatttaaactgaaatgcttttctttgttgctgtaagaacttaaaatgtaaaatacctttttcagtttaagtcctgtaaacaacattgaagcatggagatgaggcaaggaatagtactcactgaagttgaaatgactgcccacttcaaaatcttcattgtgtttacacaccagtgtatttatacaaatcagaggcattttgtagatgctttgctgacttgttcagctctgtaaaaacacagaaatcagacccattttgtaaagcggaaaatcatgttacatggaacatgtcctgtatatatcacatacatggtaatggagtcttaatgataagtgcaagataataatttaatgatgggattagtctgatcgcttaatatgcacaatcctggaagtgaattacttgcatcagatatagtgatatttattattctgtacagagagaaaaatacatataaaacatatgcttacattacatgcacgcggatttcatgctccataatcttttctattttttaatttacctttctgtaaatgatgtgcatggaatatgccttatagaaaaatgctgttcataatttgactacgtggaaaagtgcctatatggtggtaatgctagtaaggcaaataagacaaattatcatgttggtttactacatcaccagttaacattttatattgtgatgtttaaaaaagaaaaatttatacctcaaatgtgtattttattttacaatcagctgtggggtatggggttgggatgggagaatgggggggttggggagggcaggtttattcaccatagccgctgataagaatcttcaaaaaaattctatatgcgcactataaatgtttctctgtttgccatttctggtaactatcatgaacacagacagttaactctttcataactgaattggatagctttattttacagaagtatggcaagtttacaaagcaatatctaaatctaattatcattagttgcatttggactaaatgtgatgatatacttttgcaattgattctgtaaataaaaggattacactaaaatatttgtattaaaagaagaaaagataacattttacctttagataactgcacttgtacctcactagagttaatcccacccaatcagattgagaaataaattggggaatgtggaaagagtccaaaagaggtcagaatttggagaggtactggccttctggacaacatttagaccctctacaattattttcattaagctgattcctacatcctgaatattcatgttttctcatctacagatatttgtcttcccccaaactaaaagaaaaaaaactaccctttactctcttttctactcagttactcttttgtgctatgttagaaacttgaaatatattggtgatgtggggattttgtccctgactgcccactgtacaggacaagagagtacagtgtttcagttggaattcaggactcctggttttgaggtagaggatgatcactgcagtacttggtttggaattgccacaggggtagctaaaccaaaggagggttatatctgcaagggaggtgtaagaaggcaaaataaggaaaaggaggaatgggttttctatttgttcagtttcatcaactaatttatacacttaatacaacttcagtgtcaattgctattaagaaatttttagttgggctgagctggttctcttgtgaaattgtgctggttatctttaagcttatcagttatttgtccaattaaacacttttcaccagta

SEQ ID NO: 47716 - DNA, 5151 bp, Artificial Sequence
  derived and/or modified sequence
gcaggaagatggcggcggtagcggaggtgtgagtggacgcgggactcagcggccggattttctcttcccttcttttcccttttccttccctatttgaaattggcatcgagggggctaagttcgggtggcagcgccgggcgcaacgcaggggtcacggcgacggcggcggcggctgacggctggaagggtaggcttccttcaccgctcgtcctccttcctcgctccgctcggtgtcaggcgcggcggcggcgcggcgggcggacttcgtccctcctcctgctcccccccacaccggagcgggcactcttcgcttcgccatcccccgacccttcaccccgaggactgggcgcctcctccggcgcagctgagggagcgggggccggtctcctgctcggttgtcgagcctccatgtcggataatcagagctggaactcgtcgggctcggaggaggatccagagacggagtctgggccgcctgtggagcgctgcggggtcctcagtaagtggacaaactacattcatgggtggcaggatcgttgggtagttttgaaaaataatgctctgagttactacaaatctgaagatgaaacagagtatggctgcagaggatccatctgtcttagcaaggctgtcatcacacctcacgattttgatgaatgtcgatttgatattagtgtaaatgatagtgtttggtatcttcgtgctcaggatccagatcatagacagcaatggatagatgccattgaacagcacaagactgaatctggatatggatctgaatccagcttgcgtcgacatggctcaatggtgtccctggtgtctggagcaagtggctactctgcaacatccacctcttcattcaagaaaggccacagtttacgtgagaagttggctgaaatggaaacatttagagacatcttatgtagacaagttgacacgctacagaagtactttgatgcctgtgctgatgctgtctctaaggatgaacttcaaagggataaagtggtagaagatgatgaagatgactttcctacaacgcgttctgatggtgacttcttgcatagtaccaacggcaataaagaaaagttatttccacatgtgacaccaaaaggaattaatggtatagactttaaaggggaagcgataacttttaaagcaactactgctggaatccttgcaacactttctcattgtattgaactaatggttaaacgtgaggacagctggcagaagagactggataaggaaactgagaagaaaagaagaacagaggaagcatataaaaatgcaatgacagaacttaagaaaaaatcccactttggaggaccagattatgaagaaggccctaacagtctgattaatgaagaagagttctttgatgctgttgaagctgctcttgacagacaagataaaatagaagaacagtcacagagtgaaaaggtgagattacattggcctacatccttgccctctggagatgccttttcttctgtggggacacatagatttgtccaaaagccctatagtcgctcttcctccatgtcttccattgatctagtcagtgcctctgatgatgttcacagattcagctcccaggttgaagagatggtgcagaaccacatgacttactcattacaggatgtaggcggagatgccaattggcagttggttgtagaagaaggagaaatgaaggtatacagaagagaagtagaagaaaatgggattgttctggatcctttaaaagctacccatgcagttaaaggcgtcacaggacatgaagtctgcaattatttctggaatgttgacgttcgcaatgactgggaaacaactatagaaaactttcatgtggtggaaacattagctgataatgcaatcatcatttatcaaacacacaagagggtgtggcctgcttctcagcgagacgtattatatctttctgtcattcgaaagataccagccttgactgaaaatgaccctgaaacttggatagtttgtaatttttctgtggatcatgacagtgctcctctaaacaaccgatgtgtccgtgccaaaataaatgttgctatgatttgtcaaaccttggtaagcccaccagagggaaaccaggaaattagcagggacaacattctatgcaagattacatatgtagctaatgtgaaccctggaggatgggcaccagcctcagtgttaagggcagtggcaaagcgagagtatcctaaatttctaaaacgttttacttcttacgtccaagaaaaaactgcaggaaagcctattttgttctagtattaacagtgactgaagcaaggctgtgtgacattccatgttggagaaaaaaagaaaaaaaaaagctgaatgctctaagctggaacgtaggatctatagccttgtctgtggcccaagaccttggccttgtgtacaaaaatgacaaaatattgcaatagcaaagctgaacatctaacactagctatctcttgctagatctccttgctcagcatataactataaatacatgtaaaattacatgtatatggctatatttttatttgcttgctcctagaagagaaaaaaaaatcaactttgaatcacaactaggaattgatgctttaatttttggatactttttcagaatttttaatttactatggtccggcctaagatcctctgttgtatcaggttttgtgcacaaaagaaaagcacaaaagttgaatgcacatggggcatgtgctttctgtgcaccaaatatctggatgaggttcttttttcaggcctacagtcaaatctgtgtccagaattttttgacttttttgctttgtataatcatagaattcattgctgctgatttctataatgattcatgttgtcatgtgtctcttaataactgagggctgtcagtaacctgtgattttgccttttctatagtcttactcccatgaagaaccttggttctgatggagaaagtgaaaagctttatttcttcccctagatatctttatatttctattatattttttagttgtgtactgtgtactagagatttttttcagtttgttatgaacacaatttggtaagccctaaattggttctgcctgtctccaaacagaaacatctgtacaaatcttgttggtatagactactttctggaaaatggtcaagataagttcatgttttcttgaaatttctaagatagtatatggtatcacttgtttaaagcaaatcagactgagtttgacatttaattcaatatttctggtattcagtaacgggtatatatgtttgttcttccagtttgggtcagtttaaaagatatgttgcaaagtatacatagaaaatgtgagcaatgcctctctttgccttttgatcagaaacttcagcagagcggtaaggattccacatgatttaaactgaaatgcttttctttgttgctgtaagaacttaaaatgtaaaatacctttttcagtttaagtcctgtaaacaacattgaagcatggagatgaggcaaggaatagtactcactgaagttgaaatgactgcccacttcaaaatcttcattgtgtttacacaccagtgtatttatacaaatcagaggcattttgtagatgctttgctgacttgttcagctctgtaaaaacacagaaatcagacccattttgtaaagcggaaaatcatgttacatggaacatgtcctgtatatatcacatacatggtaatggagtcttaatgataagtgcaagataataatttaatgatgggattagtctgatcgcttaatatgcacaatcctggaagtgaattacttgcatcagatatagtgatatttattattctgtacagagagaaaaatacatataaaacatatgcttacattacatgcacgcggatttcatgctccataatcttttctattttttaatttacctttctgtaaatgatgtgcatggaatatgccttatagaaaaatgctgttcataatttgactacgtggaaaagtgcctatatggtggtaatgctagtaaggcaaataagacaaattatcatgttggtttactacatcaccagttaacattttatattgtgatgtttaaaaaagaaaaatttatacctcaaatgtgtattttattttacaatcagctgtggggtatggggttgggatgggagaatgggggggttggggagggcaggtttattcaccatagccgctgataagaatcttcaaaaaaattctatatgcgcactataaatgtttctctgtttgccatttctggtaactatcatgaacacagacagttaactctttcataactgaattggatagctttattttacagaagtatggcaagtttacaaagcaatatctaaatctaattatcattagttgcatttggactaaatgtgatgatatacttttgcaattgattctgtaaataaaaggattacactaaaatatttgtattaaaagaagaaaagataacattttacctttagataactgcacttgtacctcactagagttaatcccacccaatcagattgagaaataaattggggaatgtggaaagagtccaaaagaggtcagaatttggagaggtactggccttctggacaacatttagaccctctacaattattttcattaagctgattcctacatcctgaatattcatgttttctcatctacagatatttgtcttcccccaaactaaaagaaaaaaaactaccctttactctcttttctactcagttactcttttgtgctatgttagaaacttgaaatatattggtgatgtggggattttgtccctgactgcccactgtacaggacaagagagtacagtgtttcagttggaattcaggactcctggttttgaggtagaggatgatcactgcagtacttggtttggaattgccacaggggtagctaaaccaaaggagggttatatctgcaagggaggtgtaagaaggcaaaataaggaaaaggaggaatgggttttctatttgttcagtttcatcaactaatttatacacttaatacaacttcagtgtcaattgctattaagaaatttttagttgggctgagctggttctcttgtgaaattgtgctggttatctttaagcttatcagttatttgtccaattaaacacttttcaccagta

SEQ ID NO: 47717 - DNA, 2259 bp, Artificial Sequence
  derived and/or modified sequence
atgcagcacagctgcatccccaccccacccagccccttcagcgcccccccagccttcctgcctgtggtgacccgggagagccggcggggcctgagcagcggcggcagcgctggaagaaatgctggggtgacagccacagctgctgctgctgatggctggaagggccgcctgcccagccccctggtgctgctgcccaggtctgcccgctgccaggccaggagaagaagaggaggccgcaccagcagcctgctgctgctgccccccaccccagagcgggccctgtttgccagccccagcccagaccccagcccccggggcctgggcgccagcagtggagctgctgagggcgctggggccggcctgctgctgggctgccgggcctccatgtctgacaaccagagctggaacagcagcggcagcgaggaggaccctgagacagagagcggcccccctgtggagcgctgtggggtgctgagcaagtggaccaactacatccacggctggcaggaccgctgggtggtgctgaagaacaatgccctgagctactacaagtcagaagatgaaacagaatatggctgccggggcagcatctgcctgagcaaggccgtcatcacccctcatgactttgatgaatgtagatttgacatctctgtgaatgattctgtgtggtacctgcgggcccaggaccctgaccaccggcagcagtggattgatgccatcgagcagcacaagacagaaagtggctacggcagcgagagcagcctgcggcggcacggctccatggtgtccctggtgtctggggccagcggctacagcgccaccagcaccagcagcttcaagaagggccacagcctgcgggagaagctggccgagatggagaccttccgggacatcctgtgccggcaggtggacaccctgcagaagtactttgatgcctgtgctgatgctgtgtccaaggatgagctgcagagggacaaggtggtggaggatgatgaagatgacttccccaccaccaggagtgatggagacttcctgcacagcaccaatggaaacaaggagaagctgttcccccacgtgacccccaagggcatcaatggaattgacttcaagggggaggccatcaccttcaaggccaccacagctggcatcctggccaccctgagccactgcatcgagctgatggtgaagcgggaggacagctggcagaagaggctggacaaggagacagagaagaagagaagaacagaggaggcctacaagaatgccatgacagagctgaagaagaagagccactttggaggccctgactatgaggagggccccaacagcctcatcaatgaggaggagttctttgatgctgtggaggccgccctggaccggcaggacaagattgaggagcagagccagagcgagaaggtgcggctgcactggcccaccagcctgcccagcggagatgccttcagctctgtgggcacccacagatttgtgcagaagccctacagccgcagcagctccatgagcagcattgacctggtgtctgccagtgatgatgtgcaccgcttcagcagccaggtggaggagatggtgcagaaccacatgacctacagcctgcaggatgtgggcggagatgccaactggcagctggtggtggaggagggggagatgaaggtgtacagaagagaggtggaggagaatggaattgtgctggaccccctgaaggccacccatgctgtgaagggcgtgacaggccacgaggtgtgcaactacttctggaatgtggatgtgagaaatgactgggagaccaccatcgagaacttccacgtggtggagaccctggccgacaatgccatcatcatctaccagacccacaagagggtgtggccagccagccagagagatgtgctgtacctgagcgtcatcaggaagatcccagccctgacagaaaatgaccctgagacctggatcgtgtgcaacttctctgtggaccatgattctgcccccctgaacaacagatgtgtgcgggccaagatcaacgtggccatgatctgccagaccctggtgtccccacctgagggcaaccaggagatcagccgggacaacatcctgtgcaagatcacctacgtggccaacgtgaaccctgggggctgggccccagcctctgtgctgcgggctgtggccaagcgggagtaccccaagttcctgaagcgcttcaccagctatgtgcaggagaagacagctgggaagcccatcctcttctag

SEQ ID NO: 47718 - DNA, 1875 bp, Artificial Sequence
  derived and/or modified sequence
atgtctgacaaccagagctggaacagcagcggcagcgaggaggaccctgagacagagagcggcccccctgtggagcgctgtggggtgctgagcaagtggaccaactacatccacggctggcaggaccgctgggtggtgctgaagaacaatgccctgagctactacaagtcagaagatgaaacagaatatggctgccggggcagcatctgcctgagcaaggccgtcatcacccctcatgactttgatgaatgtagatttgacatctctgtgaatgattctgtgtggtacctgcgggcccaggaccctgaccaccggcagcagtggattgatgccatcgagcagcacaagacagaaagtggctacggcagcgagagcagcctgcggcggcacggctccatggtgtccctggtgtctggggccagcggctacagcgccaccagcaccagcagcttcaagaagggccacagcctgcgggagaagctggccgagatggagaccttccgggacatcctgtgccggcaggtggacaccctgcagaagtactttgatgcctgtgctgatgctgtgtccaaggatgagctgcagagggacaaggtggtggaggatgatgaagatgacttccccaccaccaggagtgatggagacttcctgcacagcaccaatggaaacaaggagaagctgttcccccacgtgacccccaagggcatcaatggaattgacttcaagggggaggccatcaccttcaaggccaccacagctggcatcctggccaccctgagccactgcatcgagctgatggtgaagcgggaggacagctggcagaagaggctggacaaggagacagagaagaagagaagaacagaggaggcctacaagaatgccatgacagagctgaagaagaagagccactttggaggccctgactatgaggagggccccaacagcctcatcaatgaggaggagttctttgatgctgtggaggccgccctggaccggcaggacaagattgaggagcagagccagagcgagaaggtgcggctgcactggcccaccagcctgcccagcggagatgccttcagctctgtgggcacccacagatttgtgcagaagccctacagccgcagcagctccatgagcagcattgacctggtgtctgccagtgatgatgtgcaccgcttcagcagccaggtggaggagatggtgcagaaccacatgacctacagcctgcaggatgtgggcggagatgccaactggcagctggtggtggaggagggggagatgaaggtgtacagaagagaggtggaggagaatggaattgtgctggaccccctgaaggccacccatgctgtgaagggcgtgacaggccacgaggtgtgcaactacttctggaatgtggatgtgagaaatgactgggagaccaccatcgagaacttccacgtggtggagaccctggccgacaatgccatcatcatctaccagacccacaagagggtgtggccagccagccagagagatgtgctgtacctgagcgtcatcaggaagatcccagccctgacagaaaatgaccctgagacctggatcgtgtgcaacttctctgtggaccatgattctgcccccctgaacaacagatgtgtgcgggccaagatcaacgtggccatgatctgccagaccctggtgtccccacctgagggcaaccaggagatcagccgggacaacatcctgtgcaagatcacctacgtggccaacgtgaaccctgggggctgggccccagcctctgtgctgcgggctgtggccaagcgggagtaccccaagttcctgaagcgcttcaccagctatgtgcaggagaagacagctgggaagcccatcctcttctag

SEQ ID NO: 47719 - DNA, 2259 bp, Artificial Sequence
  derived and/or modified sequence
atgcagcacagctgcatccccaccccccccagccccttcagcgccccaccagcctttctccccgtggtgacaagagaaagcagaagggggctttccagtggcggtagcgctggacgaaacgcgggagtaaccgctactgccgccgcagctgatggctggaaggggcgactcccatcccctctggtgcttttgcctaggtctgcccggtgtcaagctaggagacgtaggggcggaagaacgtcatcactgctcctgttgcctccaactcccgaaagagcattgttcgccagtccaagcccagatccttctccacgcgggctgggcgcctcaagcggagccgccgaaggggccggggccggattgctcttggggtgcagagcctcaatgagtgacaaccagtcctggaattctagcggcagtgaagaggacccagagaccgagagtggtccccccgtggaaagatgcggcgttctgtcaaaatggacaaattacattcatggttggcaagaccgctgggtcgtgctgaagaataacgcactgtcgtattataagagcgaagatgaaactgagtacgggtgccgcggatccatttgcctctctaaggccgtgatcactcctcatgatttcgacgagtgtcggtttgacatcagcgtcaatgatagcgtgtggtacctaagggcccaagaccctgaccaccggcagcagtggatcgatgccatcgaacagcataaaacagagtccgggtatggctccgagagctctctgaggcggcacggatccatggtctcactggtgtctggtgcctctggttattccgctaccagcactagcagctttaaaaagggtcactccctgagagagaagctagctgagatggaaaccttcagggatatcctgtgtcgccaagtggataccctccaaaagtactttgacgcctgcgctgatgccgtctcaaaggatgagctgcagagggataaggttgtggaggacgacgaggatgatttccccaccacccgatccgacggggacttcctgcatagcacaaacggcaacaaagagaaactcttccctcacgtaacccctaagggcattaacggtattgattttaagggagaggccataacattcaaagcaacaacagctggaatactggccaccctatctcactgtattgaattgatggtaaagcgtgaagacagctggcagaaacgacttgataaagaaacggagaaaaagaggcgcacagaggaagcatataagaacgctatgaccgaattaaagaagaagagccactttgggggaccagattacgaagaaggtccaaattcgttgattaacgaggaggagtttttcgacgccgttgaagcagctctggatcggcaggataagatcgaggaacagtcccagtcggagaaggtcagactgcactggcccacatcgctgccttctggtgacgcctttagctccgtgggaacacatcggtttgttcagaagccatattctcgatcctcttccatgtcctccattgacctggtgtctgctagtgatgacgttcaccgattttcctcacaggtcgaagagatggtacagaaccacatgacctattctctgcaggatgtcgggggagacgccaactggcagctcgtcgtggaagaaggggagatgaaggtataccggcgggaggtggaggagaatggtattgtccttgatcccttaaaggctacacacgccgttaagggcgtgacaggccatgaagtgtgtaattatttctggaacgtcgatgttcggaatgactgggagacaactattgaaaactttcacgtggttgaaacgctcgccgacaacgctatcattatatatcagacacacaaaagagtttggcccgcctcacaacgggatgtgctgtatctatcggtgattaggaagattcccgccttgacagagaacgatccagaaacttggatcgtctgcaatttctcagttgatcacgactctgccccactgaataataggtgtgtgagggctaagatcaatgtggccatgatctgccagacactggtgtcgcccccagaggggaatcaggagatcagtagggataatatcttatgtaaaattacgtacgtcgcaaacgtgaatcctggagggtgggccccagctagtgtgctgagagccgtggctaaacgagagtacccaaagtttcttaaaaggtttactagttacgtccaagagaagacagccggaaagccaattctgttttag

SEQ ID NO: 47720 - DNA, 1875 bp, Artificial Sequence
  derived and/or modified sequence
atgagcgacaaccagagctggaacagcagcggcagcgaggaggacccagagactgagtccgggccaccagtagaacgctgcggtgtcctgagcaaatggacgaattatatccacggatggcaggatcgatgggtggtgctgaaaaacaacgcactgtcatattacaaatctgaagacgagaccgagtatggctgtaggggcagtatatgcctgtccaaggctgtcatcacacctcatgacttcgatgagtgtaggtttgacatttcagtcaacgattcggtgtggtacctgagggctcaggatcctgatcaccggcagcagtggatcgatgctatcgaacaacacaagaccgagagcggatatggtagcgagagttcgctgcgtagacatggatccatggtgagtctagtatcaggcgcaagcgggtacagcgcaactagtacatcttccttcaagaaaggccacagtttacgggagaagctcgccgaaatggagacctttcgggatatactgtgcagacaagtggataccttgcaaaaatattttgatgcgtgtgctgacgcggtgagcaaggacgaattgcaacgtgacaaagtggttgaggatgatgaggatgacttccctacaacccgatctgacggtgacttccttcattcgacaaacgggaacaaggagaagctgtttcctcatgtgaccccaaagggcattaatggaattgattttaagggcgaggcgataaccttcaaggctacaaccgcaggaattctcgctaccctttcacattgcattgagttaatggtgaagcgcgaggatagttggcagaagagactggataaagaaaccgagaaaaagcggaggacagaggaggcttacaaaaatgctatgaccgagttgaaaaagaaatcccactttgggggccctgactatgaggagggcccaaattccttgattaacgaggaggagttttttgatgcagttgaagcagcacttgatcgtcaggacaagatcgaagaacagagccagagcgagaaggtgagacttcactggcccacgagtctgccctcgggagatgcctttagcagcgtcggtacccatcggttcgtgcaaaagccctattctcgctcctcatctatgtcctcaattgatctagtctccgcatccgacgatgttcataggttttcctcccaggttgaagagatggtacaaaatcacatgacctatagcctccaggacgtgggcggagacgccaactggcaactcgtggtcgaggaaggagaaatgaaggtttatagacgggaagtggaagagaacggtattgtattagacccgctgaaagctacgcacgccgttaaaggggttactgggcacgaagtgtgcaactacttttggaatgtcgatgtacgaaatgattgggagaccactatcgaaaactttcatgttgttgaaacacttgcagataatgccattattatttatcaaacccacaagagagtatggcccgcatcccagcgggacgtgctgtatctgagcgttataaggaaaatcccggccttaaccgaaaatgatcccgagacgtggatcgtgtgcaacttttctgtggaccatgactccgcaccgttgaataaccgctgtgttcgggccaagatcaatgtagccatgatctgccaaaccctggtcagcccccccgaaggaaaccaggagattagccgagacaatattctgtgtaagataacatacgttgctaatgtcaacccgggagggtgggctcctgcctctgtcctccgcgcggtggccaagagagagtatccaaaattcttgaagaggttcacctcatacgtacaggaaaaaactgccggaaaacctatccttttttag

SEQ ID NO: 47721 - DNA, 2259 bp, Artificial Sequence
  derived and/or modified sequence
atgcagcactcatgcattccgaccccaccctcccctttcagtgccccacctgcatttttgcccgtggtgactagggaaagcagaaggggactgtccagtggcggatccgccggtagaaacgcaggtgtgactgctaccgcagctgcagccgacggatggaagggcaggttgcccagtccgctggtacttcttcccagaagcgcacgctgccaggccaggcggaggcggggtgggagaacttccagcctgttactgcttcctcccacccctgaaagggcactgtttgccagtccctctcccgatccctcgccacgcggtcttggggcttcctccggggctgccgagggtgctggagctggtttgcttcttggatgtcgcgcttcaatgagcgataaccagagttggaattcttctgggtctgaggaagaccccgaaaccgaatcgggacccccagtcgagcggtgcggagtgttatccaaatggactaactatattcacggctggcaggatagatgggtggtgctgaaaaacaatgcactgagctattacaagagtgaggacgaaactgagtatggatgtaggggctcaatatgcctgagcaaagcagtgatcaccccgcatgactttgacgaatgccggtttgacatctcagtgaacgattccgtatggtacttgagggcgcaggaccccgaccatcggcagcagtggattgacgcaatcgaacaacacaaaacagaaagcggttatggatcagagagtagcctgcggcgtcatggaagtatggtgagcctcgtgagcggcgcttccgggtactcagccacctccacttcgtcattcaaaaaagggcacagcctaagggaaaagctagccgagatggaaacttttcgggacatcttatgtaggcaggtggatacgttgcagaagtatttcgatgcttgtgccgatgctgttagcaaggacgagcttcagagagataaggtggtggaggacgatgaggacgacttcccaaccacgcgcagtgatggcgactttctgcattcgactaatggcaacaaagagaaactgtttccccacgtcacccccaagggcattaatgggatcgatttcaaaggcgaagccattacctttaaagccacaacagccggtattctggctactctgtcacactgcattgagctgatggttaagagggaggattcatggcagaaaagattagacaaagagaccgaaaaaaagcggagaaccgaagaggcttacaaaaacgcgatgacagaactcaagaaaaagtcccactttggcggaccagattacgaagagggacctaacagccttataaacgaagaggaattttttgacgcggttgaggcagccctggataggcaggataagattgaggaacaaagtcagagcgaaaaggtgcggcttcattggccaacttccctgccatcaggcgatgcattcagttccgtggggacccacagattcgtgcagaagccctacagcagatctagcagtatgtccagcatcgacctggtgtctgcaagcgatgatgtgcaccgcttcagttcccaggtggaagagatggtccagaatcatatgacctactccttgcaggatgtcggcggtgacgcaaattggcaacttgtggtcgaggagggagagatgaaagtctatcgcagagaagtggaagagaatggcatagtgcttgatcccctgaaggccacccatgccgtgaagggggtcactggacatgaagtgtgtaactatttttggaacgttgacgtgcgcaatgattgggagacaaccatcgagaactttcacgtcgtcgagacactagcagataatgcaatcatcatctaccagacccacaagagagtgtggccagcctcacaacgggacgtcctctacctgtcagttattcgcaagatccccgcactgaccgaaaatgaccccgagacctggatcgtgtgcaattttagcgtggatcatgactctgcgccattgaataacaggtgcgtgcgggcaaagattaacgtcgccatgatttgccagaccctcgtgagcccaccagagggcaatcaagagatttcccgggacaatatcctctgcaaaattacgtacgtggctaatgtgaaccccggtggctgggcccctgctagcgtgttaagagccgtggccaaaagagagtatcccaagtttctgaagcgtttcacttcatacgtccaagagaagaccgcaggcaaaccaatccttttctag

SEQ ID NO: 47722 - DNA, 1875 bp, Artificial Sequence
  derived and/or modified sequence
atgtcagataatcagtcatggaattcctccgggtccgaggaggatcccgaaacagagagtggacctcccgtggaacgctgtggagtgctgtccaagtggacaaattacatccacggttggcaggaccgctgggtcgtgctcaagaataacgccctcagctattacaaatcggaggacgaaaccgaatatggctgtcgtggctcaatctgtcttagcaaagcagttatcaccccccacgattttgatgagtgtcgatttgatatatccgtgaacgatagcgtgtggtatcttcgcgctcaggatcccgaccaccggcagcaatggattgacgctattgagcagcacaagactgagtctggatatgggtcggagtcatctttaaggaggcacgggtccatggtgtccctggtgtccggagcctcaggatattctgcaactagcacgagctcctttaaaaagggacactcactgcgtgaaaaattagccgagatggagacattccgggatattctgtgccgacaagtggatacactgcagaagtacttcgacgcatgtgccgatgccgtgtcgaaggacgaactccagagggataaggtcgtggaggacgatgaagacgatttcccaacaaccagatccgatggggatttcctgcattcgaccaacgggaacaaggaaaagctgtttccacatgtgacccctaaaggcatcaacgggatcgacttcaaaggtgaagccataactttcaaggcaacaactgcaggaatcttggccacgttgtcccattgtatcgagctgatggtaaagagagaggatagttggcagaaaaggcttgataaagagacagaaaaaaagagacggaccgaggaggcatataaaaatgctatgacggaacttaagaaaaaaagtcatttcgggggtcccgattatgaggagggaccaaatagcctcattaacgaagaggagttttttgacgccgtcgaagcagctctcgacaggcaggacaagatcgaagagcaatcccaaagtgaaaaggtccgcctacactggcctacttcactgccttcgggtgacgccttcagttccgtcggaacccaccggtttgtacaaaagccttattcaagaagctccagcatgtcctccattgatctggtgagcgcatctgatgacgtccaccgcttttcctctcaggtggaggaaatggttcaaaaccatatgacttatagcctccaagacgttgggggtgacgcaaattggcagctggtggtggaggagggcgagatgaaggtgtataggcgggaagtcgaggaaaatggaatcgtcctggatcctctgaaggccacccacgccgtgaagggcgttactggtcacgaggtttgcaactatttttggaatgtcgacgtgcggaatgattgggaaactaccatagagaacttccatgtggttgagactctggcagataacgccatcatcatctaccagacacacaaaagggtgtggcctgcatctcagcgggacgtcttgtacttaagcgtcatccgcaaaatacctgcactaacggagaatgatcctgaaacatggattgtatgtaactttagtgtggatcacgatagcgccccactgaacaataggtgtgtacgcgcaaagattaacgtggcgatgatctgccagactttggtttcgcccccagagggtaaccaggaaatttcacgggacaatatcctgtgcaagattacatatgtcgcgaacgttaacccaggcggatgggcacctgccagcgtgctgagagccgtagccaagagagagtatcccaaattcctcaagcgatttacttcttatgtgcaggagaagacggctggaaaaccaatccttttttag

SEQ ID NO: 47723 - protein, 359 aa, Artificial Sequence
  derived and/or modified sequence
MSDEGSRGSRLPLALPPASQGCSSGGGGGGSSAGGSGNSRPPRNLQGLLQMAITAGSEEPDPPPEPMSEERRQWLQEAMSAAFRGQREEVEQMKSCLRVLSQPMPPTAGEAEQAADQQEREGALELLADLCENMDNAADFCQLSGMHLLVGRYLEAGAAGLRWRAAQLIGTCSQNVAAIQEQVLGLGALRKLLRLLDRDACDTVRVKALFAISCLVREQEAGLLQFLRLDGFSVLMRAMQQQVQKLKVKSAFLLQNLLVGHPEHKGTLCSMGMVQQLVALVRTEHSPFHEHVLGALCSLVTDFPQGVRECREPELGLEELLRHRCQLLQQHEEYQEELEFCEKLLQTCFSSPADDSMDR

SEQ ID NO: 47724 - DNA, 1080 bp, Artificial Sequence
  derived and/or modified sequence
atgagtgacgaaggcagtcgcggctctcgccttccactggccctgcccccagccagtcaaggctgcagctcaggcggtggaggaggcggatcaagtgccgggggctcaggcaactctaggccacccagaaacctccagggattgctgcagatggccataacagccggttctgaggaacccgacccgcccccagagcccatgagtgaagaacgccgccagtggctgcaggaagctatgtcggccgcattccgcggccagagggaggaagtggagcagatgaaatcttgccttagggtcctttcacagcccatgcctcccactgcaggtgaagcagaacaagcggcagatcagcaagagcgcgaaggggccctggagctgctggctgacctgtgcgaaaacatggataacgccgcagacttctgccaactgtctggaatgcatttgcttgtgggacgttatctggaggcgggcgccgcaggactcaggtggagggccgcccagctgatcggcacttgctcacagaacgtggctgctattcaggagcaagtactgggccttggcgccttgaggaagctgcttagactgcttgacagggatgcctgtgatacagtgcgcgtgaaagcactgttcgcaatctcatgcctcgtgcgagagcaggaagcagggctcttacagttcctgcggttggacggcttttccgttttgatgagagcaatgcaacagcaggtacagaagctaaaagtaaagtctgctttcctactccagaatctacttgttgggcatccagagcataagggtacactgtgctcaatgggcatggttcaacaacttgtggctctcgtgcggactgaacattcaccctttcacgaacacgtgcttggggctctctgtagtctggtcacggatttccctcagggcgtccgcgagtgccgcgagcccgaactggggcttgaagaactcctacggcacagatgccaactgctgcagcagcacgaggagtaccaggaggaacttgagttttgcgaaaaactgctacagacgtgcttctcttcccccgccgacgattcgatggatcgctag

SEQ ID NO: 47725 - DNA, 774 bp, Artificial Sequence
  derived and/or modified sequence
atgtctgacgagggtagtcgaggttctcgccttcctctggctctaccaccagcttcgcagggctgttcttccggcggagggggaggaggctcttccgcaggaggtagcggcaactctcgcccaccgagaaatttacaagggctcctgcagatggccatcactgcaggatctgaagaacccgacccccctccagagccaatgagtgaggaaaggcggcagtggcttcaggaggcaatgtctgctgcattcagagggcaaagagaggaggtcgaacaaatgaagagttgcctgagggtgctgtctcaacctatgcctcccactgcgggagaggctgaacaggccgctgaccagcaggaacgcgaaggcgcattggaactgcttgctgacttatgcgagaatatggacaacgccgctgacttttgccaactgtcaggtatgcacctgttggttggcaggtacttagaggctggagcagccgggctcagatggagggctgcgcagctcatcggaacctgtagtcagaacgtggccgctatccaggagcaggtgctggggttgggggctctgagaaagcttctccgcctcctcgaccgtgatgcctgcgacacgggcgtcagagagtgtcgagagccagaactcggtctcgaggaactactgcggcataggtgccaactcctccagcaacatgaagagtatcaggaagaactggaattctgtgaaaaactgcttcagacctgcttcagctcacctgccgatgattccatggacaggtag

SEQ ID NO: 47726 - DNA, 1080 bp, Artificial Sequence
  derived and/or modified sequence
atgtccgacgaggggagccgggggtctcggctgcccctggctttgcccccggcttctcaaggctgcagctcaggaggaggaggaggaggctcgtccgccggtggttctggcaacagcaggccgcccagaaacctgcagggcctgctccagatggccatcaccgcagggtctgaagaaccagacccccctcccgagcctatgagcgaagagcggcggcagtggctccaagaagctatgagtgcggcgtttcggggccaaagggaggaagtggagcaaatgaagagctgcttgcgggtgctgtcgcagccaatgccacccacggcaggagaagctgaacaggccgctgaccagcaagagagagaaggcgctctggagctgttggctgatctttgcgaaaacatggacaacgccgccgatttttgccaactgagcgggatgcacctcctggtggggcggtacctggaagccggagccgctggcttgcgttggcgcgccgcccagcttatcggcacttgctcccagaacgtggctgccatacaagagcaggttctgggtctgggcgcactgaggaagctgctgagactcctggatcgggatgcatgcgatacagtgcgtgtgaaagctctttttgctatatcctgtctggtacgggagcaagaggcaggcttgttgcaattcttgagactagatggattcagtgtgctgatgcgggccatgcagcaacaggttcagaagctaaaggtgaaatccgcattcttgttgcagaacttgctcgtaggtcatccggagcacaagggtaccctctgctccatgggaatggtccagcagctggtagcattagtgcgcactgaacactcaccctttcatgagcacgtgcttggggctctgtgctctctggtgactgactttcctcagggcgtccgagagtgcagagagcccgagctcggactcgaagagcttcttcgccaccggtgccaacttctgcagcaacatgaggaatatcaggaagaactggagttttgtgagaaactactgcagacctgcttctcaagtcccgctgatgatagcatggaccggtag

SEQ ID NO: 47727 - DNA, 1080 bp, Artificial Sequence
  derived and/or modified sequence
atgtctgatgagggcagccggggcagccggctgcccctggccctgcccccagccagccagggctgcagcagcggcggcggcggcggcggcagcagcgctgggggcagcggcaacagccggcccccaagaaacctgcagggcctgctgcagatggccatcacagctggcagcgaggagccagaccccccacctgagcccatgtctgaggagcggcggcagtggctgcaggaggccatgtctgctgccttccggggccagcgggaggaggtggagcagatgaagagctgcctgcgggtgctgagccagcccatgccacccacagctggggaggccgagcaggccgctgaccagcaggagcgggagggcgccctggagctgctggccgacctgtgtgagaacatggacaatgctgctgacttctgccagctgagcggcatgcacctgctggtgggccgctacctggaggccggggctgctggcctgcgctggagggctgcccagctgattggcacctgcagccagaatgtggccgccatccaggagcaggtgctgggcctgggcgccctgaggaagctgctgcggctgctggacagagatgcctgtgacacagtgcgggtgaaggccctgtttgccatcagctgcctggtgcgggagcaggaggccggcctgctgcagttcctgcggctggatggcttctctgtgctgatgagggccatgcagcagcaggtgcagaagctgaaggtgaagagcgccttcctgctgcagaacctgctggtgggccaccctgagcacaagggcaccctgtgcagcatgggcatggtgcagcagctggtggccctggtgaggacagagcacagccccttccatgaacatgtgctgggcgccctgtgcagcctggtgacagacttcccccagggcgtgagagaatgtcgggagcctgagctgggcctggaggagctgctgcggcaccgctgccagctgctgcagcagcacgaggagtaccaggaggagctggagttctgtgagaagctgctgcagacctgcttcagcagccctgcagatgacagcatggacagatag

SEQ ID NO: 47728 - DNA, 774 bp, Artificial Sequence
  derived and/or modified sequence
atgtctgatgagggcagccggggcagccggctgcccctggccctgcccccagccagccagggctgcagcagcggcggcggcggcggcggcagcagcgctgggggcagcggcaacagccggcccccaagaaacctgcagggcctgctgcagatggccatcacagctggcagcgaggagccagaccccccacctgagcccatgtctgaggagcggcggcagtggctgcaggaggccatgtctgctgccttccggggccagcgggaggaggtggagcagatgaagagctgcctgcgggtgctgagccagcccatgccacccacagctggggaggccgagcaggccgctgaccagcaggagcgggagggcgccctggagctgctggccgacctgtgtgagaacatggacaatgctgctgacttctgccagctgagcggcatgcacctgctggtgggccgctacctggaggccggggctgctggcctgcgctggagggctgcccagctgattggcacctgcagccagaatgtggccgccatccaggagcaggtgctgggcctgggcgccctgaggaagctgctgcggctgctggacagagatgcctgtgacacaggagtgagagaatgtcgggagcctgagctgggcctggaggagctgctgcggcaccgctgccagctgctgcagcagcacgaggagtaccaggaggagctggagttctgtgagaagctgctgcagacctgcttcagcagccctgcagatgacagcatggacagatag

SEQ ID NO: 47729 - DNA, 1080 bp, Artificial Sequence
  derived and/or modified sequence
atgagcgacgagggcagccggggcagccggctgcccctggccctgccgccagcttctcagggttgcagttctggaggcggcggggggggcagtagtgccgggggctccggaaacagcaggccacccaggaatctgcagggccttctccagatggcaatcactgctggtagcgaagaacccgaccctccccccgaacctatgagtgaagaacgcagacaatggcttcaggaagccatgtctgcggctttccggggacagcgagaagaagtagagcagatgaagagctgcttgcgcgtcctgtctcagcccatgccccctaccgccggcgaagccgagcaagccgccgatcagcaggagcgggaaggggcccttgagctcctggccgacctgtgcgagaacatggacaacgcagccgacttctgccagctgagcggcatgcacctcctggtgggccgctatcttgaggctggtgccgccgggctgaggtggagagcagcccagcttatcgggacctgcagccagaacgttgcggcaattcaagaacaagtgctgggactaggcgccctgcggaaacttctccgtctactggacagagacgcctgtgacaccgtgagggtcaaggccctgtttgcgatttcatgtttagtccgggagcaggaagcaggcctcctccagttcctgaggctggatggattttcagtgctgatgcgggcaatgcagcagcaagtgcagaagctgaaagtgaaaagtgcctttctgctacagaacctgcttgtgggccaccctgaacacaagggcactttatgttcgatggggatggtgcagcagctggtggcgttggtgcgaaccgagcactccccatttcacgagcatgtgctgggcgcattatgttctctcgttactgattttccacaaggggtgcgcgagtgcagagaacccgaactagggctggaagaactactgcggcatcggtgccagctgctgcagcagcacgaggagtatcaggaggagctggagttctgcgagaagctgctgcagacatgtttcagcagccccgcggatgactcaatggacaggtag

SEQ ID NO: 47730 - DNA, 774 bp, Artificial Sequence
  derived and/or modified sequence
atgagcgacgagggcagccggggcagccggctgcccctggccctgccccccgcatcccagggctgttcttcaggtggcggggggggaggatccagcgccggcggaagcggaaattcccggccacccaggaacttacagggcctgcttcagatggccatcaccgcagggtccgaggagcccgaccctccccctgagccgatgtccgaagaaaggcgccagtggctgcaagaggctatgtctgctgctttcagaggccagcgggaagaggtggaacagatgaaatcctgcctgagagtactgtctcaacccatgcctccaaccgccggtgaagctgagcaggctgctgaccagcaggaacgtgagggcgctctggagctgctggctgatctgtgcgagaacatggacaatgcagctgatttttgccaattaagcggtatgcacctgcttgtggggagatacctggaagccggggctgccggtcttcgctggagggccgctcagctcatcggcacatgtagtcagaacgtcgcagcaattcaggagcaagtcctgggcctgggggctcttcgcaagctgctacgccttctggatagggatgcctgtgatacaggagtgcgggagtgccgagaacctgaacttggcttggaagaacttctcagacatagatgccaactactgcaacaacacgaggagtaccaggaagagctagagttttgcgagaagctgttgcagacttgtttctcttcgccggccgacgatagtatggaccgatag

SEQ ID NO: 47731 - DNA, 1080 bp, Artificial Sequence
  derived and/or modified sequence
atgagcgacgagggcagccggggcagccggctgcccctggccctgccacccgcatctcagggatgctcatcaggtggaggcggaggaggttcaagcgctggaggctccggaaatagcaggcccccccgcaatttgcagggactactccagatggctattaccgccggctcagaagagcctgatcctcctccggagccaatgtccgaggagcgcaggcagtggctccaagaggcaatgtccgccgcctttcgcggccagagggaggaggtggagcagatgaaatcttgtttgcgcgtgcttagccagcccatgccaccaactgcaggtgaagcagagcaggcagccgaccagcaggagcgggagggggcactggaactcctggccgacttgtgtgaaaacatggataatgccgctgatttctgccagctctctgggatgcatctgctggtaggtcgatacctggaggccggagccgctggcctaaggtggcgggcagcacaattaattgggacttgtagccaaaacgttgctgctatccaggagcaagtgctgggcttgggcgccctccgaaagctgttacgcctgctggaccgcgatgcgtgtgatacagtcagggtaaaagctctattcgctatatcttgtttggtcagagaacaagaagccgggctgcttcagttcctgagacttgatggcttctcagtgttgatgcgtgcaatgcagcagcaggtccaaaaactgaaagtgaagagcgcattcctcctgcagaatctcctggtcggacaccccgagcataaggggaccttgtgttctatgggcatggtgcagcagctggtggctttagtcaggacagagcactccccattccatgaacatgtgctgggcgccctgtgtagcctggtgaccgactttcctcagggagtccgagagtgtcgcgagccggagttgggcctcgaggagctgctgcgccacaggtgtcaactgctccagcagcacgaagaataccaggaagaattggagttttgcgaaaagttgttgcagacatgcttctcgagccctgcagacgatagcatggatcggtag

SEQ ID NO: 47732 - DNA, 1080 bp, Artificial Sequence
  derived and/or modified sequence
atgtctgatgagggctctcgtggatcacgcctgcctctggctctccccccagccagtcagggctgctcatcggggggagggggtggtggcagctcagccggaggcagcggaaactctcgccctcctcggaatctgcagggcctgctgcagatggcaatcacggccggaagcgaggagcctgatcctcccccagagcccatgagcgaggaacggagacaatggctccaggaggccatgagcgccgcatttagggggcagcgtgaggaagttgagcagatgaagagctgtttgagggtgctgtcacaaccaatgccacctacagcaggggaggccgagcaggcagctgaccagcaggaacgggaaggggcacttgagctcctcgctgacctgtgcgagaatatggacaacgctgccgacttttgccaactgagcggaatgcacctcctggtcggtcgttacctggaggccggagcggctggactccggtggcgtgccgctcaactcattggcacttgtagccaaaacgtcgctgccatacaagagcaagtgctgggcctcggagctctgcgtaagctcctgcgtctgctggatcgcgatgcctgtgatacagttagagtgaaggccttgttcgctatctcttgcctagtaagggaacaagaggcaggactgcttcagttccttcggctcgatggattcagtgtattgatgcgagccatgcagcagcaggtccagaagctcaaggtcaaaagcgccttccttctgcaaaacctattggttgggcacccagagcacaagggaacactgtgctccatgggcatggtgcagcagctcgtggcattggtccggacggaacacagtccttttcatgagcatgttttgggggctctctgctctctcgttaccgactttccacaaggggtgcgggaatgcagggagcccgaattgggtctcgaggagctgttacgccacagatgtcagctgttgcagcagcatgaagaataccaggaagagctggagttctgtgagaagctgctccagacatgtttctcgtcgccagcagatgatagtatggatcgatag

SEQ ID NO: 47733 - DNA, 774 bp, Artificial Sequence
  derived and/or modified sequence
atgtccgatgaaggatcccggggaagtcggttacccttagccctaccccctgccagtcaaggatgtagcagtggagggggagggggaggctcttccgccggtgggtcaggcaatagcagaccacctaggaacctccaagggctcttacaaatggccattacagctggctctgaagaacccgaccctcccccagaaccgatgagcgaggaacgccgacaatggctccaagaagcaatgtcggctgcttttagaggccagcgcgaggaagtggagcagatgaaaagctgtctgagggttctgagtcagccaatgccacccaccgcgggagaggccgagcaggccgcagaccagcaggagagggaaggcgctcttgagctcctggcagacctgtgtgaaaatatggacaacgcggctgacttctgtcaattgtccggtatgcaccttctggtgggcagatatctcgaggccggagccgcaggtctccggtggagggccgctcagcttattggtacttgctcccagaatgtggccgctattcaagagcaggtgctcgggctcggcgcactgcggaaattgctacggctccttgatcgggatgcctgcgacacaggcgtgcgcgagtgccgagagccagaactgggcctggaagaattgctgcgacatcggtgtcaactgcttcaacaacatgaggagtaccaagaggagttggagttctgtgaaaagctcctgcagacctgtttttcctcaccggcagatgactctatggatcgttag

SEQ ID NO: 47734 - DNA, 1080 bp, Artificial Sequence
  derived and/or modified sequence
atgtccgacgaaggaagccgaggctctaggttgcctctcgcattgcccccagcctctcaaggatgcagctccgggggaggaggaggcggaagcagcgctggcggttcaggcaattcccggcctcctagaaatctccagggcctgctccagatggcgattacagcgggtagtgaagaacctgatccccctcctgaacccatgtctgaggagagacggcagtggttacaggaagccatgtctgccgctttccgtggccaaagggaggaggtagaacagatgaaatcttgtttaagagtgttgtcccagcctatgccacctaccgctggggaggccgaacaggctgcagaccagcaggaacgggagggagccctcgaattacttgctgacctctgtgagaacatggataatgcagcagacttttgccagctgtcaggaatgcaccttctagtggggagatacttggaagccggagctgccggattaagatggcgcgctgctcagctgatcggtacatgcagccagaacgttgccgcaattcaagaacaggtcctgggtctcggggcactgcgcaaacttctcagactgttggatcgggacgcatgtgatacggtcagagttaaagctctgttcgccatctcctgcctcgtccgtgagcaagaggctgggttgctccagttcctgaggcttgatggttttagcgttctcatgcgggctatgcagcagcaggttcagaagctgaaagtcaagtccgctttcctattgcagaatctcctggtcggtcacccagagcataagggtaccctgtgtagcatgggtatggtgcagcaacttgtagccttagttcggactgaacattcgccattccacgaacacgtcctcggagctctctgctcgctagtgacagattttccccaaggggtgagagagtgtcgggaaccggaacttggacttgaggagctgctgaggcataggtgccagcttctgcaacaacatgaagagtaccaggaggagttggagttctgtgaaaagctcctccagacctgcttctcctcaccggcagatgattccatggatcgatag

SEQ ID NO: 47735 - DNA, 1080 bp, Artificial Sequence
  derived and/or modified sequence
atgagcgacgagggcagcagaggcagcagactgcccctggccctgccccccgccagccagggctgcagcagcggcggcggcggcggcggcagcagcgccggcggcagcggcaacagcagaccccccagaaacctgcagggcctgctgcagatggccatcaccgccggcagcgaggagcccgaccccccccccgagcccatgagcgaggagagaagacagtggctgcaggaggccatgagcgccgccttcagaggccagagagaggaggtggagcagatgaagagctgcctgagagtgctgagccagcccatgccccccaccgccggcgaggccgagcaggccgccgaccagcaggagagagagggcgccctggagctgctggccgacctgtgcgagaacatggacaacgccgccgacttctgccagctgagcggcatgcacctgctggtgggcagatacctggaggccggcgccgccggcctgagatggagagccgcccagctgatcggcacctgcagccagaacgtggccgccatccaggagcaggtgctgggcctgggcgccctgagaaagctgctgagactgctggacagagacgcctgcgacaccgtgagagtgaaggccctgttcgccatcagctgcctggtgagagagcaggaggccggcctgctgcagttcctgagactggacggcttcagcgtgctgatgagagccatgcagcagcaggtgcagaagctgaaggtgaagagcgccttcctgctgcagaacctgctggtgggccaccccgagcacaagggcaccctgtgcagcatgggcatggtgcagcagctggtggccctggtgagaaccgagcacagccccttccacgagcacgtgctgggcgccctgtgcagcctggtgaccgacttcccccagggcgtgagagagtgcagagagcccgagctgggcctggaggagctgctgagacacagatgccagctgctgcagcagcacgaggagtaccaggaggagctggagttctgcgagaagctgctgcagacctgcttcagcagccccgccgacgacagcatggacagatag

SEQ ID NO: 47736 - DNA, 774 bp, Artificial Sequence
  derived and/or modified sequence
atgagcgacgagggcagcagaggcagcagactgcccctggccctgccccccgccagccagggctgcagcagcggcggcggcggcggcggcagcagcgccggcggcagcggcaacagcagaccccccagaaacctgcagggcctgctgcagatggccatcaccgccggcagcgaggagcccgaccccccccccgagcccatgagcgaggagagaagacagtggctgcaggaggccatgagcgccgccttcagaggccagagagaggaggtggagcagatgaagagctgcctgagagtgctgagccagcccatgccccccaccgccggcgaggccgagcaggccgccgaccagcaggagagagagggcgccctggagctgctggccgacctgtgcgagaacatggacaacgccgccgacttctgccagctgagcggcatgcacctgctggtgggcagatacctggaggccggcgccgccggcctgagatggagagccgcccagctgatcggcacctgcagccagaacgtggccgccatccaggagcaggtgctgggcctgggcgccctgagaaagctgctgagactgctggacagagacgcctgcgacaccggcgtgagagagtgcagagagcccgagctgggcctggaggagctgctgagacacagatgccagctgctgcagcagcacgaggagtaccaggaggagctggagttctgcgagaagctgctgcagacctgcttcagcagccccgccgacgacagcatggacagatag

SEQ ID NO: 47737 - protein, 637 aa, Artificial Sequence
  derived and/or modified sequence
MYDNMSTMVYIKEDKLEKLTQDEIISKTKQVIQGLEALKNEHNSILQSLLETLKCLKKDDESNLVEEKSNMIRKSLEMLELGLSEAQVMMALSNHLNAVESEKQKLRAQVRRLCQENQWLRDELANTQQKLQKSEQSVAQLEEEKKHLEFMNQLKKYDDDISPSEDKDTDSTKEPLDDLFPNDEDDPGQGIQQQHSSAAAAAQQGGYEIPARLRTLHNLVIQYASQGRYEVAVPLCKQALEDLEKTSGHDHPDVATMLNILALVYRDQNKYKDAANLLNDALAIREKTLGKDHPAVAATLNNLAVLYGKRGKYKEAEPLCKRALEIREKVLGKDHPDVAKQLNNLALLCQNQGKYEEVEYYYQRALEIYQTKLGPDDPNVAKTKNNLASCYLKQGKFKQAETLYKEILTRAHEREFGSVDDENKPIWMHAEEREECKGKQKDGTSFGEYGGWYKACKVDSPTVTTTLKNLGALYRRQGKFEAAETLEEAAMRSRKQGLDNVHKQRVAEVLNDPENMEKRRSRESLNVDVVKYESGPDGGEEVSMSVEWNGDGTGSLKRSGSFSKLRASIRRSSEKLVRKLKGGSSRESEPKNPGMKRASSLNVLNVGGKAAEDRFQERNNCLADSRALSASHTDLAH

SEQ ID NO: 47738 - protein, 639 aa, Artificial Sequence
  derived and/or modified sequence
MYDNMSTMVYIKEDKLEKLTQDEIISKTKQVIQGLEALKNEHNSILQSLLETLKCLKKDDESNLVEEKSNMIRKSLEMLELGLSEAQVMMALSNHLNAVESEKQKLRAQVRRLCQENQWLRDELANTQQKLQKSEQSVAQLEEEKKHLEFMNQLKKYDDDISPSEDKDTDSTKEPLDDLFPNDEDDPGQGIQQQHSSAAAAAQQGGYEIPARLRTLHNLVIQYASQGRYEVAVPLCKQALEDLEKTSGHDHPDVATMLNILALVYRDQNKYKDAANLLNDALAIREKTLGKDHPAVAATLNNLAVLYGKRGKYKEAEPLCKRALEIREKVLGKDHPDVAKQLNNLALLCQNQGKYEEVEYYYQRALEIYQTKLGPDDPNVAKTKNNLASCYLKQGKFKQAETLYKEILTRAHEREFGSVDDENKPIWMHAEEREECKGKQKDGTSFGEYGGWYKACKVDSPTVTTTLKNLGALYRRQGKFEAAETLEEAAMRSRKQGLDNVHKQRVAEVLNDPENMEKRRSRESLNVDVVKYESGPDGGEEVSMSVEWNGDGTGSLKRSGSFSKLRASIRRSSEKLVRKLKGGSSRESEPKNPGMKRASSLNVLNVGGKAAEDRFQGVSGRASFCGKRQQQQWPGRRHR

SEQ ID NO: 47739 - protein, 628 aa, Artificial Sequence
  derived and/or modified sequence
MYDNMSTMVYIKEDKLEKLTQDEIISKTKQVIQGLEALKNEHNSILQSLLETLKCLKKDDESNLVEEKSNMIRKSLEMLELGLSEAQVMMALSNHLNAVESEKQKLRAQVRRLCQENQWLRDELANTQQKLQKSEQSVAQLEEEKKHLEFMNQLKKYDDDISPSEDKDTDSTKEPLDDLFPNDEDDPGQGIQQQHSSAAAAAQQGGYEIPARLRTLHNLVIQYASQGRYEVAVPLCKQALEDLEKTSGHDHPDVATMLNILALVYRDQNKYKDAANLLNDALAIREKTLGKDHPAVAATLNNLAVLYGKRGKYKEAEPLCKRALEIREKVLGKDHPDVAKQLNNLALLCQNQGKYEEVEYYYQRALEIYQTKLGPDDPNVAKTKNNLASCYLKQGKFKQAETLYKEILTRAHEREFGSVDDENKPIWMHAEEREECKGKQKDGTSFGEYGGWYKACKVDSPTVTTTLKNLGALYRRQGKFEAAETLEEAAMRSRKQGLDNVHKQRVAEVLNDPENMEKRRSRESLNVDVVKYESGPDGGEEDGTGSLKRSGSFSKLRASIRRSSEKLVRKLKGGSSRESEPKNPGMKRASSLNVLNVGGKAAEDRFQERNNCLADSRALSASHTDLAH

SEQ ID NO: 47740 - protein, 584 aa, Artificial Sequence
  derived and/or modified sequence
MYDNMSTMVYIKEDKLEKLTQDEIISKTKQVIQGLEALKNEHNSILQSLLETLKCLKKDDESNLVEEKSNMIRKSLEMLELGLSEAQVMMALSNHLNAVESEKQKLRAQVRRLCQENQWLRDELANTQQKLQKSEQSVAQLEEEKKHLEFMNQLKKYDDDISPSEDKDTDSTKEPLDDLFPNDEDDPGQGIQQQHSSAAAAAQQGGYEIPARLRTLHNLVIQYASQGRYEVAVPLCKQALEDLEKTSGHDHPDVATMLNILALVYRDQNKYKDAANLLNDALAIREKTLGKDHPAVAATLNNLAVLYGKRGKYKEAEPLCKRALEIREKVLGKDHPDVAKQLNNLALLCQNQGKYEEVEYYYQRALEIYQTKLGPDDPNVAKTKNNLASCYLKQGKFKQAETLYKEILTRAHEREFGSVDDENKPIWMHAEEREECKGKQKDGTSFGEYGGWYKACKVDSPTVTTTLKNLGALYRRQGKFEAAETLEEAAMRSRKQGLDNVHKQRVAEVLNDPENMEKRRSRESLNVDVVKYESGPDGGEEMKRASSLNVLNVGGKAAEDRFQERNNCLADSRALSASHTDLAH

SEQ ID NO: 47741 - protein, 618 aa, Artificial Sequence
  derived and/or modified sequence
MYDNMSTMVYIKEDKLEKLTQDEIISKTKQVIQGLEALKNEHNSILQSLLETLKCLKKDDESNLVEEKSNMIRKSLEMLELGLSEAQVMMALSNHLNAVESEKQKLRAQVRRLCQENQWLRDELANTQQKLQKSEQSVAQLEEEKKHLEFMNQLKKYDDDISPSEDKDTDSTKEPLDDLFPNDEDDPGQGIQQQHSSAAAAAQQGGYEIPARLRTLHNLVIQYASQGRYEVAVPLCKQALEDLEKTSGHDHPDVATMLNILALVYRDQNKYKDAANLLNDALAIREKTLGKDHPAVAATLNNLAVLYGKRGKYKEAEPLCKRALEIREKVLGKDHPDVAKQLNNLALLCQNQGKYEEVEYYYQRALEIYQTKLGPDDPNVAKTKNNLASCYLKQGKFKQAETLYKEILTRAHEREFGSVDDENKPIWMHAEEREECKGKQKDGTSFGEYGGWYKACKVDSPTVTTTLKNLGALYRRQGKFEAAETLEEAAMRSRKQGLDNVHKQRVAEVLNDPENMEKRRSRESLNVDVVKYESGPDGGEEVSMSVEWNGDGTGSLKRSGSFSKLRASIRRSSEKLVRKLKGGSSRESEPKNPGASLAEPLFVENDSSSSGLEDATAN

SEQ ID NO: 47742 - protein, 630 aa, Artificial Sequence
  derived and/or modified sequence
MYDNMSTMVYIKEDKLEKLTQDEIISKTKQVIQGLEALKNEHNSILQSLLETLKCLKKDDESNLVEEKSNMIRKSLEMLELGLSEAQVMMALSNHLNAVESEKQKLRAQVRRLCQENQWLRDELANTQQKLQKSEQSVAQLEEEKKHLEFMNQLKKYDDDISPSEDKDTDSTKEPLDDLFPNDEDDPGQGIQQQHSSAAAAAQQGGYEIPARLRTLHNLVIQYASQGRYEVAVPLCKQALEDLEKTSGHDHPDVATMLNILALVYRDQNKYKDAANLLNDALAIREKTLGKDHPAVAATLNNLAVLYGKRGKYKEAEPLCKRALEIREKVLGKDHPDVAKQLNNLALLCQNQGKYEEVEYYYQRALEIYQTKLGPDDPNVAKTKNNLASCYLKQGKFKQAETLYKEILTRAHEREFGSVDDENKPIWMHAEEREECKGKQKDGTSFGEYGGWYKACKVDSPTVTTTLKNLGALYRRQGKFEAAETLEEAAMRSRKQGLDNVHKQRVAEVLNDPENMEKRRSRESLNVDVVKYESGPDGGEEDGTGSLKRSGSFSKLRASIRRSSEKLVRKLKGGSSRESEPKNPGMKRASSLNVLNVGGKAAEDRFQGVSGRASFCGKRQQQQWPGRRHR

SEQ ID NO: 47743 - protein, 150 aa, Artificial Sequence
  derived and/or modified sequence
MYDNMSTMVYIKEDKLEKLTQDEIISKTKQVIQGLEALKNEHNSILQSLLETLKCLKKDDESNLVEEKSNMIRKSLEMLELGLSEAQVMMALSNHLNAVESEKQKLRAQVRRLCQENQWLRDELANTQQKLQKSEQSVAQLEEEKKHLEF

SEQ ID NO: 47744 - protein, 564 aa, Artificial Sequence
  derived and/or modified sequence
MYDNMSTMVYIKEDKLEKLTQDEIISKTKQVIQGLEALKNEHNSILQSLLETLKCLKKDDESNLVEEKSNMIRKSLEMLELGLSEAQVMMALSNHLNAVESEKQKLRAQVRRLCQENQWLRDELANTQQKLQKSEQSVAQLEEEKKHLEFMNQLKKYDDDISPSEDKDTDSTKEPLDDLFPNDEDDPGQGIQQQHSSAAAAAQQGGYEIPARLRTLHNLVIQYASQGRYEVAVPLCKQALEDLEKTSGHDHPDVATMLNILALVYRDQNKYKDAANLLNDALAIREKTLGKDHPAVAATLNNLAVLYGKRGKYKEAEPLCKRALEIREKVLGKDHPDVAKQLNNLALLCQNQGKYEEVEYYYQRALEIYQTKLGPDDPNVAKTKNNLASCYLKQGKFKQAETLYKEILTRAHEREFGSVDDENKPIWMHAEEREECKGKQKDGTSFGEYGGWYKACKVDSPTVTTTLKNLGALYRRQGKFEAAETLEEAAMRSRKQGLDNVHKQRVAEVLNDPENMEKRRSRESLNVDVVKYESGPDGGEEGVSGRASFCGKRQQQQWPGRRHR

SEQ ID NO: 47745 - DNA, 1914 bp, Artificial Sequence
  derived and/or modified sequence
atgtacgacaatatgtcgacaatggtgtatattaaagaggataaactggagaagcttacacaggatgaaattatcagtaagaccaagcaggttattcagggactggaggcactaaaaaatgagcataactcaatcctccaatcattgttagaaacgctgaagtgtctgaagaaggatgacgaatctaatctagttgaggaaaaatcaaatatgatccgcaagtccttggaaatgctcgagctgggcctgtccgaagctcaggtaatgatggctctctcaaatcacctgaacgccgtggagagcgagaagcagaagttgcgcgcacaggtacggcgcttgtgtcaggaaaatcagtggctacgggacgagctcgctaacacgcagcaaaaactgcagaagagtgagcagtctgtagcacagcttgaagaagagaaaaagcatctggaattcatgaatcagctcaagaaatatgatgacgacatatctccctctgaggataaagacacagatagcaccaaggagcccctggatgacctattccccaacgacgaagacgaccctggtcagggaattcagcagcagcactctagcgcagccgctgccgcacagcaaggcgggtatgaaattccggctaggctgaggaccctccacaacctggtcatccagtacgcatcgcagggacgatatgaagtggccgtacccctgtgtaaacaggccctggaagatctggagaagactagcgggcatgatcaccccgacgtcgccactatgctgaatatcctggcattggtataccgtgatcagaacaagtacaaagacgccgccaacctgctcaacgatgcacttgccattagagaaaagactcttggaaaggaccaccccgccgttgcagccaccctcaacaatctggccgtgttgtacggcaagagagggaagtacaaagaggccgaaccactgtgtaagcgggcacttgagataagggagaaggttctcggcaaggaccatcctgatgtggcgaagcagcttaataacctagccttgctctgccagaaccaaggaaagtatgaggaggtggaatactattaccaacgagctctggaaatctatcaaactaagctgggacctgacgatcccaatgtcgctaaaaccaagaacaaccttgctagttgttacctcaaacaaggcaagtttaagcaagcagagacattgtacaaggaaattctcactagagcgcacgaaagagaattcggtagcgtggatgatgagaacaaacctatctggatgcacgccgaagaacgggaagaatgtaagggtaaacagaaggatgggactagtttcggtgaatatggtggttggtataaggcatgcaaggtggactcccccacagtgaccactactcttaagaacctcggcgctctttatagaagacaaggaaagttcgaggccgcagaaactcttgaagaagctgccatgagaagcaggaaacaagggttagataacgtccataagcagcgggttgccgaagtattgaatgatcccgaaaacatggaaaaaagacgctctcgggagagcctcaatgtggacgtggtgaaatacgaatcagggcctgatggcggtgaagaagttagcatgtcggtagaatggaacggcgatggcacaggctccctgaaacgctctggatcctttagcaagctgcgggcatcaattcgcaggtcttccgaaaaacttgtcaggaaactaaaaggagggtcttcacgggagtccgaacccaagaatccagggatgaagcgagctagctcgttgaacgttttgaacgtgggtggaaaggccgccgaggatcgttttcaggagcgaaacaattgtttggcagactcacgggccctgtcagcttcccacactgatttggcacactag

SEQ ID NO: 47746 - DNA, 1920 bp, Artificial Sequence
  derived and/or modified sequence
atgtatgacaatatgagcactatggtatatattaaggaggacaaactagagaagttgactcaggatgagatcatcagcaagaccaaacaagtgattcagggcctggaagcgcttaagaatgaacacaactcaatcctccagtcgttactggagaccttgaaatgcttgaagaaagatgatgaatctaacttggtggaagagaagtcaaacatgatcagaaaaagccttgagatgctcgaacttggactgagcgaagcacaggtgatgatggccctcagcaaccaccttaacgccgtcgaaagtgagaaacagaagctgcgagcccaggttcgaaggctgtgccaggagaaccagtggctgagggacgagctggccaacactcagcagaagctgcaaaagtccgaacagtcagtcgcccagctggaggaggaaaaaaagcacctcgagttcatgaaccaattgaagaagtatgacgacgatatatctccaagtgaggataaagacaccgattccactaaggagccacttgacgacctcttcccgaacgatgaggacgatccagggcagggcatccagcagcagcattcctccgccgccgccgccgcgcagcagggcggctatgaaatcccagcccgactccggaccttgcataatctggtgattcagtatgccagtcagggacggtatgaggtcgccgtgccgctctgtaagcaggctctcgaagacctggagaagacatcaggccacgaccatcccgacgtcgccacaatgttgaacatcttggccctggtctatcgcgatcagaacaaatacaaggatgccgcgaacctgctgaacgacgcccttgccattcgcgagaagaccctgggcaaggaccaccccgccgtggcggccacgctgaacaatttggctgtgctatatggcaagcgaggtaagtacaaagaggccgaacccttgtgcaaaagggcacttgagataagggaaaaggttctgggaaaggaccaccctgacgttgctaaacaactcaacaacttggccctcctgtgccaaaatcagggaaaatacgaagaggttgagtattattaccagcgcgctcttgagatatatcagacaaagctcgggcccgacgaccctaacgtggccaagaccaaaaacaatctggccagctgctatctgaagcaaggaaagtttaagcaggcagagacgctgtacaaggagatcctcacacgggcgcacgagcgagagttcggctcagtggatgacgagaacaagccaatctggatgcacgccgaggagcgcgaagagtgtaagggcaaacaaaaggacgggacatcctttggagaatatggcggctggtacaaagcctgcaaggtggattcaccgacagtcactacaaccctgaagaacttaggagccctttatagacggcaaggaaagtttgaagctgccgaaactctggaagaagccgcgatgcgtagcaggaaacagggactagacaacgtacacaagcagcgggtcgcagaggtgttgaacgaccccgagaacatggaaaagaggaggagtagagagtccctaaacgtcgatgtggtgaaatatgagtcagggccagacggcggtgaggaagtgagtatgagtgtagaatggaacggggatggcactgggtctctcaaacggagcggttctttttcaaagttacgggctagcatccgcaggagcagtgaaaaactggtgaggaagctgaaaggcggcagctcaagggagagtgagcccaaaaaccccggaatgaaaagagccagctctctgaatgtgcttaacgtgggtggaaaggcagcagaggatcggtttcagggcgtctcagggcgtgcctccttctgcggcaaaagacaacagcagcagtggcccggccgcagacatcggtag

SEQ ID NO: 47747 - DNA, 1887 bp, Artificial Sequence
  derived and/or modified sequence
atgtacgataatatgtctacaatggtctatattaaggaggacaagctcgagaagttaacgcaagacgaaatcatctccaagactaaacaggttatccagggtctggaggctctgaaaaacgagcacaattcaatcctccagtcactgttggaaacactgaaatgcctgaagaaggacgatgagagcaatctggtagaagagaagtcaaatatgattagaaagtctttagagatgcttgaactgggtctcagtgaggctcaggttatgatggcacttagtaaccaccttaacgctgtcgaatctgagaagcagaagctcagagcgcaggtgaggcggctgtgccaagagaatcaatggctgcgggacgaacttgccaacactcaacagaaactgcagaaaagcgaacagagcgtggcccagcttgaagaggaaaagaagcacttagagttcatgaaccagcttaagaagtatgatgacgatataagtccctctgaggacaaggacaccgatagtacaaaagagccactcgatgatctgttcccgaacgatgaggacgatcctggtcaggggattcaacagcagcacagctccgctgccgccgcggcccagcagggtggctacgagatccccgctagattacgaacacttcacaatctggtgattcaatatgcatcacagggtagatacgaggtggcagtgcccttgtgcaaacaagcgctggaagatctggaaaagacgagtggtcacgatcaccccgatgtggccaccatgctgaacattctcgctttagtgtatagggaccagaacaaatacaaggacgcggccaatttgctgaatgacgcccttgccattcgggaaaagaccctgggcaaagaccatcctgcggtggctgccaccttaaacaatctggccgtgctgtatggcaaaaggggcaagtacaaggaggccgagccgctctgtaagcgggcactggagatacgtgaaaaggtgctgggaaaggatcaccccgatgttgctaagcaactaaacaatctagccctgctttgtcaaaatcaggggaagtatgaggaggtcgaatactattatcaacgggcccttgaaatttaccaaactaaactgggcccagacgatcccaacgtggcaaagactaagaacaatctggcctcctgttacttgaagcaaggcaaatttaagcaggcggaaactctgtataaggaaatactgacacgtgcccacgagagggagtttggatctgtcgatgacgagaataaaccaatttggatgcatgcagaagagagggaagagtgcaagggcaagcaaaaagacgggacgtcattcggcgaatacggaggctggtacaaagcatgcaaggtcgatagtcccactgtgactaccactttgaagaatctcggggccctttaccgtcgccagggcaagttcgaggccgccgaaaccctggaggaggcggccatgaggtcacgcaaacagggccttgataatgttcacaaacagcgtgtggcagaggttttgaatgatcctgaaaacatggaaaaaagaagaagcagggagtccctgaacgtggacgtcgtcaagtatgagtcagggccggacggcggcgaggaagacggaaccggatccctgaagcggtcaggcagtttttccaaacttcgggcctctatccgacggagcagcgagaaattagtgagaaagctgaagggtggtagctctcgggaatctgaaccgaaaaacccggggatgaaacgggccagttcacttaatgtgctcaacgttgggggcaaagcagctgaggaccggttccaagaacggaacaattgtttagccgacagccgggcgctttcagcgagccataccgacctagcccactag

SEQ ID NO: 47748 - DNA, 1857 bp, Artificial Sequence
  derived and/or modified sequence
atgtacgacaacatgagcaccatggtgtacattaaggaagataaactggaaaagctgacacaggacgagattatttccaagactaaacaagtcattcagggactggaggccctgaagaacgaacataactccatactgcaatccttactggaaacattgaaatgtctgaaaaaagatgacgagagcaacctcgtggaagaaaagtctaacatgataaggaagagtctcgaaatgctcgagctgggcctcagtgaggcccaggtgatgatggccctgtcaaaccacctcaatgcagtcgaatccgaaaagcaaaagctgcgagcacaagtgaggcgtctgtgtcaggaaaaccagtggctgcgcgacgagctagcaaatacacaacagaagttgcagaaaagtgaacagtccgttgcccagctggaagaagaaaaaaagcatctggaatttatgaatcaactgaaaaagtacgacgatgacatatccccctccgaggataaggacacagatagtacaaaggaaccgctcgatgacctgttcccaaatgatgaagatgacccaggacaaggaattcagcagcagcactcatctgctgccgcagctgcccagcagggcgggtatgagatacctgctaggctccgcacactgcacaaccttgtaattcagtatgcttcccagggacggtatgaagtcgccgtgcccctgtgcaaacaagcgttggaagatctcgagaagactagcgggcacgatcatccagatgtcgctactatgctgaatatcctcgcactcgtgtacagggaccagaataaatacaaggatgcagccaacctgctgaatgatgctcttgctataagagaaaagaccctgggaaaagaccaccctgctgtggctgccacgctcaataatctcgccgtcttgtacggtaaacggggcaaatataaagaagctgaacccctgtgtaaacgcgctctggaaattagggagaaggtcctcggaaaggatcacccggatgtcgcaaagcagttgaataacctggcactgctgtgccagaatcagggcaagtacgaggaggttgagtattactaccagagggccctggaaatttatcagaccaagcttgggccagatgatcctaacgtagcaaaaactaaaaataatttagcctcttgctatcttaaacagggaaagtttaaacaggcagagaccctctacaaggagatactaacaagagctcatgaacgcgagttcggttccgtagacgacgagaataaacccatctggatgcacgccgaggagagggaagagtgtaagggaaaacagaaggatggcacgtcatttggagagtatgggggctggtataaggcttgcaaggtggactcgcccacagttacaacgacattgaaaaacctgggagcactgtatcggaggcagggtaaattcgaagctgccgagacgctggaagaggctgctatgcgctctcggaagcaaggcctcgacaatgtacataagcaaagggtggccgaagttttaaacgacccagagaatatggaaaagcgacggtcaagggagagcctcaacgtggacgtggtgaagtacgaatcggggcccgacggcggtgaggaagtaagcatgtcagtcgaatggaatggtgatggaactggctccctcaaacggtctgggtctttctccaaactcagagcttccatacgtcgctcaagcgagaagctcgttcgcaaactcaagggtggcagttcaagagagagcgagccgaaaaaccccggcgcttctctggcggagccactcttcgtggagaacgactctagttcatcagggctggaagatgccacagccaattag

SEQ ID NO: 47749 - DNA, 1893 bp, Artificial Sequence
  derived and/or modified sequence
atgtatgataacatgtccactatggtgtatatcaaggaagacaaactcgaaaaactgacgcaggacgaaattattagtaagacaaagcaggtgatccaaggtctcgaggctttgaaaaatgaacacaattccattctgcagagcctgctggaaactctcaagtgtctgaagaaggatgatgaatccaacctcgtcgaagaaaagagtaatatgatcaggaaaagccttgaaatgctcgagctgggactctctgaagcacaggttatgatggcattaagcaaccatcttaatgccgtcgaatcggaaaaacagaaacttagggcgcaggttcggcgactatgccaagagaaccaatggctcagagacgagctggcgaacacacaacagaaactgcagaaaagcgagcagtccgtggcccaattggaggaagaaaagaagcacttagagtttatgaatcaactcaaaaagtatgacgacgatatttcaccgagcgaagacaaggacactgattctacaaaggaaccactagacgacctctttccaaacgacgaagatgaccctgggcagggcattcagcaacagcacagctcagcggccgccgcagcccagcagggggggtacgagatacccgcccgtctccgcacgttacataaccttgtaattcagtacgcctcacaaggtagatacgaggtggcagtccctctgtgcaaacaggctctggaagatttggagaagacaagtgggcatgatcacccagatgtcgccaccatgttgaacatcttggcgctggtttatcgcgatcagaataagtataaggatgcagccaatttgttaaatgacgccctcgcaattcgtgagaagaccctgggaaaggaccacccagcagttgctgctaccctgaataacctggcagtgttgtatggcaagcgcggaaaatacaaagaagcggaaccgctctgtaagcgggcgttagaaatcagagagaaggttctggggaaggaccacccagatgtagcgaaacagttaaataatttggcacttctctgtcagaatcaagggaagtacgaggaagtggagtattactatcaacgcgccctcgagatttatcaaaccaagcttgggccagacgacccgaacgtcgcaaaaaccaagaataaccttgcgagttgctaccttaagcaaggcaagttcaagcaggccgagactctttacaaagagatactcaccagggctcacgagcgcgaattcggatctgtagacgatgaaaataagcctatctggatgcacgctgaggaaagggaagaatgcaagggcaaacagaaggacggaacctcattcggagaatacggagggtggtacaaggcctgcaaagttgattcccccaccgtcacgacgacactgaagaatcttggcgctctgtacaggaggcaggggaaatttgaggctgctgaaactctggaagaggctgcgatgagaagcaggaaacaggggctagacaatgtgcataaacagagggtggctgaagttcttaatgatccagagaatatggagaagcgaagatctagggagagtctgaatgtggacgtcgtcaagtatgaatctggccctgacggaggagaggaggacggaactgggtcgctgaagcgctctgggagtttttctaaacttcgggcatctatcagacgcagttctgaaaagctcgtgcgtaaattgaaaggaggaagcagtcgggagtcagagccaaagaaccctggcatgaaacgcgcgagctccctgaacgtgttgaatgtggggggaaaagccgcagaagacagattccagggggtttccggaagagcttccttttgcggaaaacgccagcaacagcaatggcctggcagacgccacagatag

SEQ ID NO: 47750 - DNA, 2294 bp, Artificial Sequence
  derived and/or modified sequence
cgagcgggactggctgggtcggctgggctgctggtgcgaggagccgcggggctgtgctcggcggccaaggggacagcgcgtgggtggccgaggatgctgcggggcggtagctccggcgcccctagctggtgactgctgcgccgtgcctcacacagccgaggcgggctcggcgcacagtcgctgctccgcgcgcgcgcccggcggcgctccaggtgctgacagcgcgagagagcgcggccctcaggagcaaggcgaatgtatgacaacatgtccacaatggtgtacataaaggaagacaagttggagaagcttacacaggatgaaattatttctaagacaaagcaagtaattcaggggctggaagctttgaagaatgagcacaattccattttacaaagtttgctggagacactgaagtgtttgaagaaagatgatgaaagtaatttggtggaggagaaatcaaacatgatccggaagtcactggagatgttggagctcggcctgagtgaggcacaggttatgatggctttgtcaaatcacctgaatgctgtggagtccgagaagcagaaactgcgtgcgcaggttcgtcgtctgtgccaggagaatcagtggctacgggatgaactggccaacacgcagcagaaactgcagaagagtgagcagtctgtggctcaactggaggaggagaagaagcatctggagtttatgaatcagctaaaaaaatatgatgacgacatttccccatccgaggacaaagacactgattctaccaaagagcctctggatgaccttttccccaatgatgaagacgacccagggcaaggaatccagcagcagcacagcagtgcagccgcggctgcccagcagggcggctacgagatccccgcgcggctgcggacgctccacaacctggtgatccagtacgcctcgcaggggcgctacgaggtagctgtgcccctctgcaagcaggccctggaggacctggagaagacttcaggacacgaccacccggacgtggccaccatgctcaacatcctggccttggtgtacagggatcagaataaatacaaagatgcagctaacctactgaatgatgccttggctattcgtgagaaaactttgggcaaagatcatcctgcggtggcggcgactttgaataaccttgcagtcctttatggtaaaagagggaagtacaaagaagcagagccgttgtgtaaaagagctctggaaatccgagaaaaggttttggggaaggatcaccccgatgttgccaagcagttaaataacttggccttactgtgccagaaccagggcaagtatgaagaagtagaatattattatcaaagagccctcgagatctaccagacaaaactgggacctgatgaccccaacgtggctaagacgaaaaataacctggcatcctgctatttgaaacaaggaaagttcaagcaagcagaaacactgtacaaagagattctcactcgtgcacatgaaagggagtttggttctgtagatgatgaaaataaacccatctggatgcatgctgaagaaagagaagaatgcaaaggaaagcaaaaggatgggacatcttttggagagtatggcggctggtacaaagcctgcaaagttgatagtccaactgttacaaccactctaaaaaaccttggggcactttacagacgtcaaggcaaatttgaagctgcagaaacgttagaagaagctgctatgaggtctcgtaaacagggtcttgacaatgttcacaaacagagggtggcagaagtgctcaatgaccctgagaacatggagaagcgcaggagccgtgagagcctcaacgtggacgtggtcaagtacgagagtggccctgacggaggggaggaagtgagtatgagcgtagagtggaacggggatggcactggatctttaaaacgcagtggttcctttagcaaactccgggcttccattagacgcagcagtgagaagctggttaggaagctgaagggaggaagttcacgagagagtgagccaaagaaccccggcatgaagcgtgccagctctctgaatgtccttaacgtgggtggcaaggctgctgaagatcgctttcaagaacgaaataattgtctggccgactcgcgagctctgagtgccagccacactgacctggcccactgagagccagcagggctaggtaacctgtcttgggagtgtgagaccgccccgccctgccacgcccctcaccgccctgcccggaggcgccagccgcactccttggcttcctttcctagatagtgacgtcc

SEQ ID NO: 47751 - DNA, 2524 bp, Artificial Sequence
  derived and/or modified sequence
cggccgagcgggactggctgggtcggctgggctgctggtgcgaggagccgcggggctgtgctcggcggccaaggggacagcgcgtgggtggccgaggatgctgcggggcggtagctccggcgcccctagctggtgactgctgcgccgtgcctcacacagccgaggcgggctcggcgcacagtcgctgctccgcgcgcgcgcccggcggcgctccaggtgctgacagcgcgagagagcgcggccctcaggagcaaggcgaatgtatgacaacatgtccacaatggtgtacataaaggaagacaagttggagaagcttacacaggatgaaattatttctaagacaaagcaagtaattcaggggctggaagctttgaagaatgagcacaattccattttacaaagtttgctggagacactgaagtgtttgaagaaagatgatgaaagtaatttggtggaggagaaatcaaacatgatccggaagtcactggagatgttggagctcggcctgagtgaggcacaggttatgatggctttgtcaaatcacctgaatgctgtggagtccgagaagcagaaactgcgtgcgcaggttcgtcgtctgtgccaggagaatcagtggctacgggatgaactggccaacacgcagcagaaactgcagaagagtgagcagtctgtggctcaactggaggaggagaagaagcatctggagtttatgaatcagctaaaaaaatatgatgacgacatttccccatccgaggacaaagacactgattctaccaaagagcctctggatgaccttttccccaatgatgaagacgacccagggcaaggaatccagcagcagcacagcagtgcagccgcggctgcccagcagggcggctacgagatccccgcgcggctgcggacgctccacaacctggtgatccagtacgcctcgcaggggcgctacgaggtagctgtgcccctctgcaagcaggccctggaggacctggagaagacttcaggacacgaccacccggacgtggccaccatgctcaacatcctggccttggtgtacagggatcagaataaatacaaagatgcagctaacctactgaatgatgccttggctattcgtgagaaaactttgggcaaagatcatcctgcggtggcggcgactttgaataaccttgcagtcctttatggtaaaagagggaagtacaaagaagcagagccgttgtgtaaaagagctctggaaatccgagaaaaggttttggggaaggatcaccccgatgttgccaagcagttaaataacttggccttactgtgccagaaccagggcaagtatgaagaagtagaatattattatcaaagagccctcgagatctaccagacaaaactgggacctgatgaccccaacgtggctaagacgaaaaataacctggcatcctgctatttgaaacaaggaaagttcaagcaagcagaaacactgtacaaagagattctcactcgtgcacatgaaagggagtttggttctgtagatgatgaaaataaacccatctggatgcatgctgaagaaagagaagaatgcaaaggaaagcaaaaggatgggacatcttttggagagtatggcggctggtacaaagcctgcaaagttgatagtccaactgttacaaccactctaaaaaaccttggggcactttacagacgtcaaggcaaatttgaagctgcagaaacgttagaagaagctgctatgaggtctcgtaaacagggtcttgacaatgttcacaaacagagggtggcagaagtgctcaatgaccctgagaacatggagaagcgcaggagccgtgagagcctcaacgtggacgtggtcaagtacgagagtggccctgacggaggggaggaagtgagtatgagcgtagagtggaacggggatggcactggatctttaaaacgcagtggttcctttagcaaactccgggcttccattagacgcagcagtgagaagctggttaggaagctgaagggaggaagttcacgagagagtgagccaaagaaccccggcatgaagcgtgccagctctctgaatgtccttaacgtgggtggcaaggctgctgaagatcgctttcaaggcgtctctggccgagcctctttttgtggaaaacgacagcagcagcagtggcctggaagacgccaccgctaactgaccccgacctggccccgctccaggatgggactgccgagtgtggcccggagctggcccgggacagccagggcggcagggagggcccctggccgggagccgcagcgctcactcatttctcctgcgtctgtgtgcataggacatgatactaataaccacacggctggcgtgaccttggggctggggctgggcctaagctggtgccctggtgcggcgtggtctctcccaggagacctggggcatgagctgggcccacggctcccttcccatgtgtaacttcctcacgttgtgtgcgataacgtattttattgtacatttttttaaattaaaagtttatatgcctta

SEQ ID NO: 47752 - DNA, 2271 bp, Artificial Sequence
  derived and/or modified sequence
cggccgagcgggactggctgggtcggctgggctgctggtgcgaggagccgcggggctgtgctcggcggccaaggggacagcgcgtgggtggccgaggatgctgcggggcggtagctccggcgcccctagctggtgactgctgcgccgtgcctcacacagccgaggcgggctcggcgcacagtcgctgctccgcgcgcgcgcccggcggcgctccaggtgctgacagcgcgagagagcgcggccctcaggagcaaggcgaatgtatgacaacatgtccacaatggtgtacataaaggaagacaagttggagaagcttacacaggatgaaattatttctaagacaaagcaagtaattcaggggctggaagctttgaagaatgagcacaattccattttacaaagtttgctggagacactgaagtgtttgaagaaagatgatgaaagtaatttggtggaggagaaatcaaacatgatccggaagtcactggagatgttggagctcggcctgagtgaggcacaggttatgatggctttgtcaaatcacctgaatgctgtggagtccgagaagcagaaactgcgtgcgcaggttcgtcgtctgtgccaggagaatcagtggctacgggatgaactggccaacacgcagcagaaactgcagaagagtgagcagtctgtggctcaactggaggaggagaagaagcatctggagtttatgaatcagctaaaaaaatatgatgacgacatttccccatccgaggacaaagacactgattctaccaaagagcctctggatgaccttttccccaatgatgaagacgacccagggcaaggaatccagcagcagcacagcagtgcagccgcggctgcccagcagggcggctacgagatccccgcgcggctgcggacgctccacaacctggtgatccagtacgcctcgcaggggcgctacgaggtagctgtgcccctctgcaagcaggccctggaggacctggagaagacttcaggacacgaccacccggacgtggccaccatgctcaacatcctggccttggtgtacagggatcagaataaatacaaagatgcagctaacctactgaatgatgccttggctattcgtgagaaaactttgggcaaagatcatcctgcggtggcggcgactttgaataaccttgcagtcctttatggtaaaagagggaagtacaaagaagcagagccgttgtgtaaaagagctctggaaatccgagaaaaggttttggggaaggatcaccccgatgttgccaagcagttaaataacttggccttactgtgccagaaccagggcaagtatgaagaagtagaatattattatcaaagagccctcgagatctaccagacaaaactgggacctgatgaccccaacgtggctaagacgaaaaataacctggcatcctgctatttgaaacaaggaaagttcaagcaagcagaaacactgtacaaagagattctcactcgtgcacatgaaagggagtttggttctgtagatgatgaaaataaacccatctggatgcatgctgaagaaagagaagaatgcaaaggaaagcaaaaggatgggacatcttttggagagtatggcggctggtacaaagcctgcaaagttgatagtccaactgttacaaccactctaaaaaaccttggggcactttacagacgtcaaggcaaatttgaagctgcagaaacgttagaagaagctgctatgaggtctcgtaaacagggtcttgacaatgttcacaaacagagggtggcagaagtgctcaatgaccctgagaacatggagaagcgcaggagccgtgagagcctcaacgtggacgtggtcaagtacgagagtggccctgacggaggggaggaagatggcactggatctttaaaacgcagtggttcctttagcaaactccgggcttccattagacgcagcagtgagaagctggttaggaagctgaagggaggaagttcacgagagagtgagccaaagaaccccggcatgaagcgtgccagctctctgaatgtccttaacgtgggtggcaaggctgctgaagatcgctttcaagaacgaaataattgtctggccgactcgcgagctctgagtgccagccacactgacctggcccactgagagccagcagggctaggtaacctgtcttgggagtgtgagaccgccccgccctgccacgcccctcaccgccctgcccggaggcgccagccgcactccttggcttcctttcctagatagtgacgtcc

SEQ ID NO: 47753 - DNA, 2453 bp, Artificial Sequence
  derived and/or modified sequence
cgagcgggactggctgggtcggctgggctgctggtgcgaggagccgcggggctgtgctcggcggccaaggggacagcgcgtgggtggccgaggatgctgcggggcggtagctccggcgcccctagctggtgactgctgcgccgtgcctcacacagccgaggcgggctcggcgcacagtcgctgctccgcgcgcgcgcccggcggcgctccaggtgctgacagcgcgagagagcgcggccctcaggagcaaggcgaatgtatgacaacatgtccacaatggtgtacataaaggaagacaagttggagaagcttacacaggatgaaattatttctaagacaaagcaagtaattcaggggctggaagctttgaagaatgagcacaattccattttacaaagtttgctggagacactgaagtgtttgaagaaagatgatgaaagtaatttggtggaggagaaatcaaacatgatccggaagtcactggagatgttggagctcggcctgagtgaggcacaggttatgatggctttgtcaaatcacctgaatgctgtggagtccgagaagcagaaactgcgtgcgcaggttcgtcgtctgtgccaggagaatcagtggctacgggatgaactggccaacacgcagcagaaactgcagaagagtgagcagtctgtggctcaactggaggaggagaagaagcatctggagtttatgaatcagctaaaaaaatatgatgacgacatttccccatccgaggacaaagacactgattctaccaaagagcctctggatgaccttttccccaatgatgaagacgacccagggcaaggaatccagcagcagcacagcagtgcagccgcggctgcccagcagggcggctacgagatccccgcgcggctgcggacgctccacaacctggtgatccagtacgcctcgcaggggcgctacgaggtagctgtgcccctctgcaagcaggccctggaggacctggagaagacttcaggacacgaccacccggacgtggccaccatgctcaacatcctggccttggtgtacagggatcagaataaatacaaagatgcagctaacctactgaatgatgccttggctattcgtgagaaaactttgggcaaagatcatcctgcggtggcggcgactttgaataaccttgcagtcctttatggtaaaagagggaagtacaaagaagcagagccgttgtgtaaaagagctctggaaatccgagaaaaggttttggggaaggatcaccccgatgttgccaagcagttaaataacttggccttactgtgccagaaccagggcaagtatgaagaagtagaatattattatcaaagagccctcgagatctaccagacaaaactgggacctgatgaccccaacgtggctaagacgaaaaataacctggcatcctgctatttgaaacaaggaaagttcaagcaagcagaaacactgtacaaagagattctcactcgtgcacatgaaagggagtttggttctgtagatgatgaaaataaacccatctggatgcatgctgaagaaagagaagaatgcaaaggaaagcaaaaggatgggacatcttttggagagtatggcggctggtacaaagcctgcaaagttgatagtccaactgttacaaccactctaaaaaaccttggggcactttacagacgtcaaggcaaatttgaagctgcagaaacgttagaagaagctgctatgaggtctcgtaaacagggtcttgacaatgttcacaaacagagggtggcagaagtgctcaatgaccctgagaacatggagaagcgcaggagccgtgagagcctcaacgtggacgtggtcaagtacgagagtggccctgacggaggggaggaagtgagtatgagcgtagagtggaacggggatggcactggatctttaaaacgcagtggttcctttagcaaactccgggcttccattagacgcagcagtgagaagctggttaggaagctgaagggaggaagttcacgagagagtgagccaaagaaccccggggcgtctctggccgagcctctttttgtggaaaacgacagcagcagcagtggcctggaagacgccaccgctaactgaccccgacctggccccgctccaggatgggactgccgagtgtggcccggagctggcccgggacagccagggcggcagggagggcccctggccgggagccgcagcgctcactcatttctcctgcgtctgtgtgcataggacatgatactaataaccacacggctggcgtgaccttggggctggggctgggcctaagctggtgccctggtgcggcgtggtctctcccaggagacctggggcatgagctgggcccacggctcccttcccatgtgtaacttcctcacgttgtgtgcgataacgtattttattgtacatttttttaaattaaaagtttatatgcctta

SEQ ID NO: 47754 - DNA, 2467 bp, Artificial Sequence
  derived and/or modified sequence
cggccgagcgggactggctgggtcggctgggctgctggtgcgaggagccgcggggctgtgctcggcggccaaggggacagcgcgtgggtggccgaggatgctgcggggcggtagctccggcgcccctagctggtgactgctgcgccgtgcctcacacagccgaggcgggctcggcgcacagtcgctgctccgcgcgcgcgcccggcggcgctccaggtgctgacagcgcgagagagcgcggccctcaggagcaaggcgaatgtatgacaacatgtccacaatggtgtacataaaggaagacaagttggagaagcttacacaggatgaaattatttctaagacaaagcaagtaattcaggggctggaagctttgaagaatgagcacaattccattttacaaagtttgctggagacactgaagtgtttgaagaaagatgatgaaagtaatttggtggaggagaaatcaaacatgatccggaagtcactggagatgttggagctcggcctgagtgaggcacaggttatgatggctttgtcaaatcacctgaatgctgtggagtccgagaagcagaaactgcgtgcgcaggttcgtcgtctgtgccaggagaatcagtggctacgggatgaactggccaacacgcagcagaaactgcagaagagtgagcagtctgtggctcaactggaggaggagaagaagcatctggagtttatgaatcagctaaaaaaatatgatgacgacatttccccatccgaggacaaagacactgattctaccaaagagcctctggatgaccttttccccaatgatgaagacgacccagggcaaggaatccagcagcagcacagcagtgcagccgcggctgcccagcagggcggctacgagatccccgcgcggctgcggacgctccacaacctggtgatccagtacgcctcgcaggggcgctacgaggtagctgtgcccctctgcaagcaggccctggaggacctggagaagacttcaggacacgaccacccggacgtggccaccatgctcaacatcctggccttggtgtacagggatcagaataaatacaaagatgcagctaacctactgaatgatgccttggctattcgtgagaaaactttgggcaaagatcatcctgcggtggcggcgactttgaataaccttgcagtcctttatggtaaaagagggaagtacaaagaagcagagccgttgtgtaaaagagctctggaaatccgagaaaaggttttggggaaggatcaccccgatgttgccaagcagttaaataacttggccttactgtgccagaaccagggcaagtatgaagaagtagaatattattatcaaagagccctcgagatctaccagacaaaactgggacctgatgaccccaacgtggctaagacgaaaaataacctggcatcctgctatttgaaacaaggaaagttcaagcaagcagaaacactgtacaaagagattctcactcgtgcacatgaaagggagtttggttctgtagatgatgaaaataaacccatctggatgcatgctgaagaaagagaagaatgcaaaggaaagcaaaaggatgggacatcttttggagagtatggcggctggtacaaagcctgcaaagttgatagtccaactgttacaaccactctaaaaaaccttggggcactttacagacgtcaaggcaaatttgaagctgcagaaacgttagaagaagctgctatgaggtctcgtaaacagggtcttgacaatgttcacaaacagagggtggcagaagtgctcaatgaccctgagaacatggagaagcgcaggagccgtgagagcctcaacgtggacgtggtcaagtacgagagtggccctgacggaggggaggaagatggcactggatctttaaaacgcagtggttcctttagcaaactccgggcttccattagacgcagcagtgagaagctggttaggaagctgaagggaggaagttcacgagagagtgagccaaagaaccccggcatgaagcgtgccagctctctgaatgtccttaacgtgggtggcaaggctgctgaagatcgctttcaaggcgtctctggccgagcctctttttgtggaaaacgacagcagcagcagtggcctggaagacgccaccgctaactgaccccgacctggccccgctccaggatgggactgccgagtgtggcccggagctggcccgggacagccagggcggcagggagggcccctggccgggagccgcagcgctcactcatttctcctgcgtctgtgtgcataggacatgatactaataaccacacggctggcgtgaccttggggctggggctgggcctaagctggtgccctggtgcggcgtggtctctcccaggagacctggggcatgagctgggcccacggctcccttcccatgtgtaacttcctcacgttgtgtgcgataacgtattttattgtaca

SEQ ID NO: 47755 - DNA, 1914 bp, Artificial Sequence
  derived and/or modified sequence
atgtatgacaacatgagcaccatggtgtacatcaaggaggacaagctggagaagctgacccaggatgagatcatcagcaagaccaagcaggtgatccagggcctggaggccctgaagaatgagcacaacagcatcctgcagagcctgctggagaccctgaagtgcctgaagaaggatgatgagagcaacctggtggaggagaagagcaacatgatcaggaagagcctggagatgctggagctgggcctgtctgaggcccaggtgatgatggccctgagcaaccacctgaatgctgtggagagcgagaagcagaagctgcgggcccaggtgcggcggctgtgccaggagaaccagtggctgagagatgagctggccaacacccagcagaagctgcagaagtctgagcagagcgtggcccagctggaggaggagaagaagcacctggagttcatgaaccagctgaagaagtatgatgatgacatcagccccagcgaggacaaggacacagacagcaccaaggagcccctggatgacctcttccccaatgatgaagatgatcctggccagggcatccagcagcagcacagcagcgctgctgctgctgcccagcagggcggctatgagatcccagcccggctgcggaccctgcacaacctggtgatccagtatgccagccagggccgctatgaggtggccgtgcccctgtgcaagcaggccctggaggacctggagaagaccagcggccatgaccacccagatgtggccaccatgctgaacatcctggccctggtgtacagagaccagaacaagtacaaggatgctgccaacctgctgaatgatgccctggccatccgggagaagaccctgggcaaggaccaccctgctgtggccgccaccctgaacaacctggccgtgctgtatggcaagaggggcaagtacaaggaggccgagcccctgtgcaagagggccctggagatccgggagaaggtgctgggcaaggaccacccagatgtggccaagcagctgaacaacctggccctgctgtgccagaaccagggcaagtatgaggaggtggagtactactaccagagggccctggagatctaccagaccaagctgggcccagatgaccccaacgtggccaagaccaagaacaacctggccagctgctacctgaagcagggcaagttcaagcaggccgagaccctgtacaaggagatcctgacccgggcccacgagcgggagtttggatctgtggatgatgagaacaagcccatctggatgcacgccgaggagcgggaggagtgcaagggcaagcagaaggatggcaccagctttggagaatatggaggctggtacaaggcctgcaaggtggacagccccaccgtgaccaccaccctgaagaacctgggcgccctgtaccgccggcagggcaagtttgaggccgctgagaccctggaggaggccgccatgaggagcaggaagcagggcctggacaacgtgcacaagcagagggtggccgaggtgctgaatgaccctgagaacatggagaagagaagaagccgggagagcctgaatgtggatgtggtgaagtatgagagcggcccagatggaggagaggaggtgtccatgtctgtggagtggaatggagatggcaccggcagcctgaagaggagcggcagcttcagcaagctgcgggccagcatccgccgcagcagcgagaagctggtgaggaagctgaagggcggcagcagccgggagagcgagcccaagaaccctggcatgaagagggccagcagcctgaatgtgctgaatgtgggcggcaaggctgctgaggaccgcttccaggagaggaacaactgcctggccgacagccgggccctgagcgccagccacacagacctggcccactag

SEQ ID NO: 47756 - DNA, 1920 bp, Artificial Sequence
  derived and/or modified sequence
atgtatgacaacatgagcaccatggtgtacatcaaggaggacaagctggagaagctgacccaggatgagatcatcagcaagaccaagcaggtgatccagggcctggaggccctgaagaatgagcacaacagcatcctgcagagcctgctggagaccctgaagtgcctgaagaaggatgatgagagcaacctggtggaggagaagagcaacatgatcaggaagagcctggagatgctggagctgggcctgtctgaggcccaggtgatgatggccctgagcaaccacctgaatgctgtggagagcgagaagcagaagctgcgggcccaggtgcggcggctgtgccaggagaaccagtggctgagagatgagctggccaacacccagcagaagctgcagaagtctgagcagagcgtggcccagctggaggaggagaagaagcacctggagttcatgaaccagctgaagaagtatgatgatgacatcagccccagcgaggacaaggacacagacagcaccaaggagcccctggatgacctcttccccaatgatgaagatgatcctggccagggcatccagcagcagcacagcagcgctgctgctgctgcccagcagggcggctatgagatcccagcccggctgcggaccctgcacaacctggtgatccagtatgccagccagggccgctatgaggtggccgtgcccctgtgcaagcaggccctggaggacctggagaagaccagcggccatgaccacccagatgtggccaccatgctgaacatcctggccctggtgtacagagaccagaacaagtacaaggatgctgccaacctgctgaatgatgccctggccatccgggagaagaccctgggcaaggaccaccctgctgtggccgccaccctgaacaacctggccgtgctgtatggcaagaggggcaagtacaaggaggccgagcccctgtgcaagagggccctggagatccgggagaaggtgctgggcaaggaccacccagatgtggccaagcagctgaacaacctggccctgctgtgccagaaccagggcaagtatgaggaggtggagtactactaccagagggccctggagatctaccagaccaagctgggcccagatgaccccaacgtggccaagaccaagaacaacctggccagctgctacctgaagcagggcaagttcaagcaggccgagaccctgtacaaggagatcctgacccgggcccacgagcgggagtttggatctgtggatgatgagaacaagcccatctggatgcacgccgaggagcgggaggagtgcaagggcaagcagaaggatggcaccagctttggagaatatggaggctggtacaaggcctgcaaggtggacagccccaccgtgaccaccaccctgaagaacctgggcgccctgtaccgccggcagggcaagtttgaggccgctgagaccctggaggaggccgccatgaggagcaggaagcagggcctggacaacgtgcacaagcagagggtggccgaggtgctgaatgaccctgagaacatggagaagagaagaagccgggagagcctgaatgtggatgtggtgaagtatgagagcggcccagatggaggagaggaggtgtccatgtctgtggagtggaatggagatggcaccggcagcctgaagaggagcggcagcttcagcaagctgcgggccagcatccgccgcagcagcgagaagctggtgaggaagctgaagggcggcagcagccgggagagcgagcccaagaaccctggcatgaagagggccagcagcctgaatgtgctgaatgtgggcggcaaggctgctgaggaccgcttccagggcgtgtctggccgggccagcttctgtgggaagaggcagcagcagcagtggccaggccgccgccacaggtag

SEQ ID NO: 47757 - DNA, 1887 bp, Artificial Sequence
  derived and/or modified sequence
atgtatgacaacatgagcaccatggtgtacatcaaggaggacaagctggagaagctgacccaggatgagatcatcagcaagaccaagcaggtgatccagggcctggaggccctgaagaatgagcacaacagcatcctgcagagcctgctggagaccctgaagtgcctgaagaaggatgatgagagcaacctggtggaggagaagagcaacatgatcaggaagagcctggagatgctggagctgggcctgtctgaggcccaggtgatgatggccctgagcaaccacctgaatgctgtggagagcgagaagcagaagctgcgggcccaggtgcggcggctgtgccaggagaaccagtggctgagagatgagctggccaacacccagcagaagctgcagaagtctgagcagagcgtggcccagctggaggaggagaagaagcacctggagttcatgaaccagctgaagaagtatgatgatgacatcagccccagcgaggacaaggacacagacagcaccaaggagcccctggatgacctcttccccaatgatgaagatgatcctggccagggcatccagcagcagcacagcagcgctgctgctgctgcccagcagggcggctatgagatcccagcccggctgcggaccctgcacaacctggtgatccagtatgccagccagggccgctatgaggtggccgtgcccctgtgcaagcaggccctggaggacctggagaagaccagcggccatgaccacccagatgtggccaccatgctgaacatcctggccctggtgtacagagaccagaacaagtacaaggatgctgccaacctgctgaatgatgccctggccatccgggagaagaccctgggcaaggaccaccctgctgtggccgccaccctgaacaacctggccgtgctgtatggcaagaggggcaagtacaaggaggccgagcccctgtgcaagagggccctggagatccgggagaaggtgctgggcaaggaccacccagatgtggccaagcagctgaacaacctggccctgctgtgccagaaccagggcaagtatgaggaggtggagtactactaccagagggccctggagatctaccagaccaagctgggcccagatgaccccaacgtggccaagaccaagaacaacctggccagctgctacctgaagcagggcaagttcaagcaggccgagaccctgtacaaggagatcctgacccgggcccacgagcgggagtttggatctgtggatgatgagaacaagcccatctggatgcacgccgaggagcgggaggagtgcaagggcaagcagaaggatggcaccagctttggagaatatggaggctggtacaaggcctgcaaggtggacagccccaccgtgaccaccaccctgaagaacctgggcgccctgtaccgccggcagggcaagtttgaggccgctgagaccctggaggaggccgccatgaggagcaggaagcagggcctggacaacgtgcacaagcagagggtggccgaggtgctgaatgaccctgagaacatggagaagagaagaagccgggagagcctgaatgtggatgtggtgaagtatgagagcggcccagatggaggagaagaagatggcaccggcagcctgaagaggagcggcagcttcagcaagctgcgggccagcatcagaagaagcagcgagaagctggtgaggaagctgaagggcggcagcagccgggagagcgagcccaagaaccctggcatgaagagggccagcagcctgaatgtgctgaatgtgggcggcaaggccgcagaagatcgcttccaggagaggaacaactgcctggccgacagccgggccctgagcgccagccacacagacctggcccactag

SEQ ID NO: 47758 - DNA, 1857 bp, Artificial Sequence
  derived and/or modified sequence
atgtatgacaacatgagcaccatggtgtacatcaaggaggacaagctggagaagctgacccaggatgagatcatcagcaagaccaagcaggtgatccagggcctggaggccctgaagaatgagcacaacagcatcctgcagagcctgctggagaccctgaagtgcctgaagaaggatgatgagagcaacctggtggaggagaagagcaacatgatcaggaagagcctggagatgctggagctgggcctgtctgaggcccaggtgatgatggccctgagcaaccacctgaatgctgtggagagcgagaagcagaagctgcgggcccaggtgcggcggctgtgccaggagaaccagtggctgagagatgagctggccaacacccagcagaagctgcagaagtctgagcagagcgtggcccagctggaggaggagaagaagcacctggagttcatgaaccagctgaagaagtatgatgatgacatcagccccagcgaggacaaggacacagacagcaccaaggagcccctggatgacctcttccccaatgatgaagatgatcctggccagggcatccagcagcagcacagcagcgctgctgctgctgcccagcagggcggctatgagatcccagcccggctgcggaccctgcacaacctggtgatccagtatgccagccagggccgctatgaggtggccgtgcccctgtgcaagcaggccctggaggacctggagaagaccagcggccatgaccacccagatgtggccaccatgctgaacatcctggccctggtgtacagagaccagaacaagtacaaggatgctgccaacctgctgaatgatgccctggccatccgggagaagaccctgggcaaggaccaccctgctgtggccgccaccctgaacaacctggccgtgctgtatggcaagaggggcaagtacaaggaggccgagcccctgtgcaagagggccctggagatccgggagaaggtgctgggcaaggaccacccagatgtggccaagcagctgaacaacctggccctgctgtgccagaaccagggcaagtatgaggaggtggagtactactaccagagggccctggagatctaccagaccaagctgggcccagatgaccccaacgtggccaagaccaagaacaacctggccagctgctacctgaagcagggcaagttcaagcaggccgagaccctgtacaaggagatcctgacccgggcccacgagcgggagtttggatctgtggatgatgagaacaagcccatctggatgcacgccgaggagcgggaggagtgcaagggcaagcagaaggatggcaccagctttggagaatatggaggctggtacaaggcctgcaaggtggacagccccaccgtgaccaccaccctgaagaacctgggcgccctgtaccgccggcagggcaagtttgaggccgctgagaccctggaggaggccgccatgaggagcaggaagcagggcctggacaacgtgcacaagcagagggtggccgaggtgctgaatgaccctgagaacatggagaagagaagaagccgggagagcctgaatgtggatgtggtgaagtatgagagcggcccagatggaggagaggaggtgtccatgtctgtggagtggaatggagatggcaccggcagcctgaagaggagcggcagcttcagcaagctgcgggccagcatccgccgcagcagcgagaagctggtgaggaagctgaagggcggcagcagccgggagagcgagcccaagaaccctggggccagcctggccgagcccctgtttgtggagaatgacagcagcagcagcggcctggaggatgccacagccaactag

SEQ ID NO: 47759 - DNA, 1893 bp, Artificial Sequence
  derived and/or modified sequence
atgtatgacaacatgagcaccatggtgtacatcaaggaggacaagctggagaagctgacccaggatgagatcatcagcaagaccaagcaggtgatccagggcctggaggccctgaagaatgagcacaacagcatcctgcagagcctgctggagaccctgaagtgcctgaagaaggatgatgagagcaacctggtggaggagaagagcaacatgatcaggaagagcctggagatgctggagctgggcctgtctgaggcccaggtgatgatggccctgagcaaccacctgaatgctgtggagagcgagaagcagaagctgcgggcccaggtgcggcggctgtgccaggagaaccagtggctgagagatgagctggccaacacccagcagaagctgcagaagtctgagcagagcgtggcccagctggaggaggagaagaagcacctggagttcatgaaccagctgaagaagtatgatgatgacatcagccccagcgaggacaaggacacagacagcaccaaggagcccctggatgacctcttccccaatgatgaagatgatcctggccagggcatccagcagcagcacagcagcgctgctgctgctgcccagcagggcggctatgagatcccagcccggctgcggaccctgcacaacctggtgatccagtatgccagccagggccgctatgaggtggccgtgcccctgtgcaagcaggccctggaggacctggagaagaccagcggccatgaccacccagatgtggccaccatgctgaacatcctggccctggtgtacagagaccagaacaagtacaaggatgctgccaacctgctgaatgatgccctggccatccgggagaagaccctgggcaaggaccaccctgctgtggccgccaccctgaacaacctggccgtgctgtatggcaagaggggcaagtacaaggaggccgagcccctgtgcaagagggccctggagatccgggagaaggtgctgggcaaggaccacccagatgtggccaagcagctgaacaacctggccctgctgtgccagaaccagggcaagtatgaggaggtggagtactactaccagagggccctggagatctaccagaccaagctgggcccagatgaccccaacgtggccaagaccaagaacaacctggccagctgctacctgaagcagggcaagttcaagcaggccgagaccctgtacaaggagatcctgacccgggcccacgagcgggagtttggatctgtggatgatgagaacaagcccatctggatgcacgccgaggagcgggaggagtgcaagggcaagcagaaggatggcaccagctttggagaatatggaggctggtacaaggcctgcaaggtggacagccccaccgtgaccaccaccctgaagaacctgggcgccctgtaccgccggcagggcaagtttgaggccgctgagaccctggaggaggccgccatgaggagcaggaagcagggcctggacaacgtgcacaagcagagggtggccgaggtgctgaatgaccctgagaacatggagaagagaagaagccgggagagcctgaatgtggatgtggtgaagtatgagagcggcccagatggaggagaagaagatggcaccggcagcctgaagaggagcggcagcttcagcaagctgcgggccagcatcagaagaagcagcgagaagctggtgaggaagctgaagggcggcagcagccgggagagcgagcccaagaaccctggcatgaagagggccagcagcctgaatgtgctgaatgtgggcggcaaggccgcagaagatcgcttccagggcgtgtctggccgggccagcttctgtgggaagaggcagcagcagcagtggccaggaagaagacacaggtag

SEQ ID NO: 47760 - DNA, 1914 bp, Artificial Sequence
  derived and/or modified sequence
atgtacgacaacatgagcaccatggtgtacatcaaggaggacaagttagagaagctgacacaggacgaaattatttcaaaaaccaagcaggtcatccagggactggaggcattgaaaaatgagcacaatagtattctgcagtctctattagagacactcaaatgtctgaagaaagatgatgagagtaatctggtggaggaaaagagtaatatgatcagaaagagcctggaaatgttggagctgggactcagtgaagctcaagtcatgatggcactgagcaatcatctcaacgcagttgagagcgaaaagcagaagctgagggctcaggtgaggagactttgccaggaaaaccagtggctgcgcgacgagctggccaacacccagcagaaacttcaaaaatctgagcagagcgtggcccaactggaagaggagaaaaagcacttagaatttatgaaccagcttaagaagtatgacgacgatatttcacccagcgaagataaagacacagactccaccaaggagcctctggacgatttatttcccaacgatgaggacgaccctggccaaggcatccagcaacagcatagttccgcagccgccgccgcacaacaaggcggttatgaaattccggcacggctgagaacactgcataatctcgtgattcagtacgcttcccaggggcggtacgaggtcgccgtgcctctgtgcaaacaggccctcgaggatttagagaagacctctgggcatgatcatccggatgttgcaaccatgttaaacattttagcattagtatacagggaccagaacaaatataaggacgcggctaatctacttaacgatgcactggctattagggagaagaccctgggcaaagatcaccccgctgtcgccgccaccctgaacaacctggccgtcctatacgggaagcgaggtaagtataaggaggctgagcccttgtgcaagcgagcattagaaatacgcgagaaggtgctgggcaaagaccatcctgacgtcgccaaacagttaaacaacctcgctctgctttgccaaaaccaaggtaagtacgaggaagtggaatattactatcaacgagcactcgagatctaccaaacgaagctgggcccggacgaccccaacgtggccaaaaccaaaaacaatctggccagctgttaccttaaacaaggaaagttcaaacaggcagagaccttgtacaaagagatattgacaagagctcatgaaagagagttcggctctgtggacgacgaaaataaacccatctggatgcacgccgaggaacgggaggagtgcaagggcaaacagaaggatggaaccagtttcggggagtacgggggctggtacaaggcatgtaaagtggactcaccgacagtcaccaccacgctgaaaaacttaggcgcactgtacagacgccagggtaaatttgaggccgctgagactcttgaggaggccgccatgcggtctcggaagcaggggcttgacaatgtccacaagcaacgcgtagctgaagtgctgaacgatccagagaacatggaaaagaggcgctccagggagagtctgaacgtggacgtggtcaaatatgaaagcggccctgacgggggggaagaagtatcgatgagtgtcgagtggaacggcgacgggactgggtcgcttaaaagaagcgggtccttcagtaagcttcgggcctcaatccggcgatcctccgaaaagttagtgcgtaaattaaagggcggaagttctcgagaatccgaaccaaagaatcctggaatgaaaagggcttcctccctgaacgtgctaaacgttggaggaaaagccgccgaagaccggttccaagaaagaaacaactgcctggctgacagtcgtgcccttagtgccagccatactgacttagctcattag

SEQ ID NO: 47761 - DNA, 1920 bp, Artificial Sequence
  derived and/or modified sequence
atgtacgacaacatgagcaccatggtgtacatcaaggaggacaagttggaaaagctgacacaggacgagattatcagcaagaccaagcaggttattcagggcctggaggcgctgaaaaacgagcataattccatcttacagtcccttcttgaaactctgaaatgtttgaagaaggacgatgaaagcaacctggttgaggagaagtctaatatgatcagaaaaagcctcgagatgctggagctcggactttctgaggctcaggtgatgatggcgctaagcaatcatcttaatgcagtggagtctgagaaacagaagttgcgcgcgcaggtccgtaggctgtgccaggaaaatcaatggctcagggacgaactcgctaacacgcagcagaagctacagaagagcgagcagtctgtggcccagttagaagaagagaagaaacacttggagttcatgaaccagctgaaaaagtacgatgacgacatcagcccttccgaggataaagacacagattctaccaaagagcctctggatgatctattccccaacgacgaggacgaccccggccagggaatccagcagcagcactcatctgctgccgctgctgcccagcagggtggctatgagatcccagccagactacgcaccctgcataatctagtgatccagtacgcctcgcagggaaggtatgaagtggctgtgcccctctgcaagcaggctcttgaagatttggagaagaccagcgggcatgatcatccagacgtggcaacgatgctgaatattcttgcactggtctaccgcgatcagaataaatacaaagacgcagcgaatctgcttaatgatgcactggcgattcgcgagaaaaccttagggaaggatcatccagccgtggcggcgaccctgaataaccttgccgtcctttatgggaaaagagggaagtacaaggaggctgaacctttgtgtaaacgggccctggagatcagagagaaggtcctgggcaaggaccatccggacgtggccaagcaacttaacaacctcgcgttactgtgccagaaccagggcaagtacgaggaagtcgagtattattatcagagggctctggaaatctatcagactaaattgggccctgacgatccgaacgtggctaaaacgaaaaataacctagcatcttgctaccttaagcaaggaaaattcaagcaggcagagactctgtacaaggaaattctgacccgggctcatgaacgggagttcggtagtgtagatgacgagaataagcctatctggatgcatgccgaggagagagaggaatgtaaagggaagcaaaaggatgggacgtccttcggggaatacggcggctggtacaaggcttgcaaggttgatagccccacggttacgacgaccctcaagaacctgggagccctgtataggaggcaaggcaagttcgaggctgccgagacactagaagaagctgcaatgcgatctcgcaagcaaggcctggataatgtccacaagcagcgtgtggccgaggtactcaatgatccagagaatatggagaaacgtaggagccgcgaatctctcaatgtagacgtggtgaaatacgagagtggccctgacggaggtgaagaggtatctatgagtgtggaatggaacggagatggtacaggatcactgaaacgcagtgggtcctttagtaagcttcgagcctccattcgacggtcatcggagaagctagtgaggaagctgaaaggaggatccagccgagaaagcgagccgaaaaatccaggaatgaagagagcatcttctctgaacgttttaaatgttgggggtaaagcagccgaggacagatttcagggtgtcagcggacgcgcctctttttgtggaaaacggcagcagcaacaatggccaggaagaaggcataggtag

SEQ ID NO: 47762 - DNA, 1887 bp, Artificial Sequence
  derived and/or modified sequence
atgtacgacaacatgagcaccatggtgtacatcaaggaggacaagctagagaaactgacacaagatgaaattattagcaagacaaaacaagtgatccagggtcttgaagcacttaaaaacgagcacaacagtatcctccaatccctgctcgagactctgaagtgtctcaagaaggacgacgaatcaaacttagtagaggagaagtccaacatgatcaggaaaagcctagagatgctggaactgggtctatctgaggcacaagtgatgatggcactttccaatcatctaaatgccgtcgaaagtgaaaagcagaagttgcgagcccaggtacgccggttatgccaggaaaatcaatggctgcgtgacgaactggccaacacccagcagaaacttcagaaaagcgaacaatcggtcgcccaactggaggaagaaaagaaacatctagagtttatgaaccagttaaagaagtacgatgatgacatctccccttcagaggataaggataccgacagtactaaagagccgctggacgacctgtttcccaatgatgaggacgatcctgggcaggggatccagcaacaacactctagcgcagcagcagctgcacagcagggcggatatgaaatccctgcaaggctgcgcactctgcataacttggtcatccagtacgcttcacaaggacggtacgaggtcgccgtgcccctgtgtaagcaggccctggaagatttggagaaaacctccggtcacgaccatccagacgtggcaactatgctgaatatcttggcccttgtgtacagggatcagaacaagtacaaggacgcagcaaaccttcttaatgacgccctcgcgattcgagaaaaaacacttggaaaagaccaccccgctgttgcagcgaccttgaataacctggctgtgttgtacggcaaacgtggaaaatacaaggaggcagagccactttgcaagagagcactcgaaatcagggaaaaggtgctgggaaaagaccatccagatgtggccaagcagctcaacaacctggcccttctttgccaaaatcaggggaagtacgaggaggtggagtactactatcagcgagctctagagatttatcagacaaaactggggcctgacgatcccaacgttgccaagacgaagaacaatctggcctcttgctaccttaaacagggaaagttcaaacaggctgaaactctctacaaggaaatccttacccgcgctcatgagcgcgaatttggctccgtggacgacgaaaacaagcccatatggatgcacgccgaggagcgcgaggagtgcaagggcaagcagaaggacggcacatctttcggcgagtatggtggctggtacaaagcctgtaaggtggatagtcccactgttacaactaccctcaaaaatcttggcgccctgtacaggagacaaggtaaattcgaggcagcggagacactggaagaggccgcaatgcggtctcgaaagcagggtctggacaacgtgcacaagcaacgcgttgccgaagtgttgaatgacccagaaaatatggagaagaggaggagccgcgagagcctgaacgtggacgtagttaagtacgaaagcggtcccgatggcggcgaggaagatgggactggatcgctcaaacgctctggaagctttagcaagctgagggcgtctatacgtcgtagcagcgaaaagctagttcggaagcttaagggtggctcatcccgggagtcggagcccaaaaatccgggcatgaaaagagcaagcagcctgaatgtgctgaacgtgggtgggaaagccgccgaggacaggttccaggaacgtaataattgcctggcagactctagggcgctctctgcgtcgcatactgacttagctcactag

SEQ ID NO: 47763 - DNA, 1857 bp, Artificial Sequence
  derived and/or modified sequence
atgtacgacaacatgagcaccatggtgtacatcaaggaggacaagctagaaaaactcacccaggatgagatcatatcaaagaccaaacaggtgattcagggactggaagccttgaaaaatgagcacaactcgatcctccagtccctgctggagacactcaagtgtctcaaaaaagatgatgagagcaatttggtcgaggaaaaatcgaacatgatcagaaaatctctggagatgctcgagctgggtctgagcgaggcgcaggtgatgatggcactatccaatcatctgaatgccgtggaatcagagaagcagaagctgagggcacaagtcagacgcctgtgtcaggaaaatcaatggttacgcgacgagctcgccaacacccagcagaagttacagaagtcagaacagtcagtggcacaactcgaagaggaaaaaaagcaccttgagtttatgaatcaattgaagaagtatgatgacgacatctcaccctctgaagataaggacacggattcgactaaggaaccgctggacgacctgtttcctaatgacgaagatgatcccggtcagggtatacagcagcagcactcatctgccgccgccgcggctcagcagggggggtacgaaatccccgcgcgactacggacccttcataatttggtaatacagtatgcttcccagggtcgttatgaggtggctgtgcctctgtgtaagcaagctctggaggatctcgaaaagaccagcggccacgaccatcccgatgttgccacaatgctcaacattcttgcgctggtgtacagagaccagaacaagtacaaggacgccgccaatttgctgaacgatgcgctagccatccgtgagaaaacactaggtaaggatcaccctgccgtggctgccactcttaacaatcttgcggtgttatacggtaagcgaggaaaatacaaggaagctgagcccctgtgcaagagggcacttgaaattcgggagaaagtcttaggtaaggatcaccctgacgtagcgaagcaacttaacaacttagccctactgtgtcagaatcagggtaagtacgaggaagtggagtactattatcagagggccttggagatctaccagacgaagctcgggcctgatgatcccaacgttgcaaagacgaaaaataatttagcatcctgttatttaaaacaagggaaattcaagcaagctgaaactctgtacaaggaaattctcacacgagctcacgagagagagttcggctctgtcgacgatgaaaataaaccaatctggatgcacgctgaagagagagaagagtgtaagggaaaacagaaggatgggacaagtttcggggagtatgggggctggtacaaggcatgtaaggtcgactctcctacagtgaccaccaccttgaagaatctgggggcactctaccgcagacaggggaagtttgaggctgccgagactctcgaggaagctgccatgcgctctaggaaacaagggctagataacgtgcataaacagcgcgtggccgaagttctcaatgatccagagaatatggaaaagagacgttccagggaaagtctgaatgtcgacgtagtaaagtacgagagcggacccgatggcggagaagaagtttcaatgagcgtggaatggaatggcgacgggaccgggtcgctcaagagaagtggaagtttcagcaagttaagggcatcaatcagacggtcctccgagaaactggtgcgtaaactgaaaggcgggagctctcgcgaatccgagcctaaaaaccccggggcaagcctggccgagccgttgtttgtggaaaatgattcgtccagctccgggttagaagatgcgacagccaattag

SEQ ID NO: 47764 - DNA, 1893 bp, Artificial Sequence
  derived and/or modified sequence
atgtacgacaacatgagcaccatggtgtacatcaaggaggacaagctggagaaactgacacaggacgaaatcattagtaagaccaaacaggtaatccaggggcttgaggcactgaagaatgaacacaacagcattctgcaaagtctcctagagactcttaaatgcctaaagaaggatgacgaatcaaacctcgtggaagagaagagcaatatgattaggaagtctttggaaatgctggagctcgggctcagcgaggcacaggtcatgatggctctcagcaaccatttgaacgcagttgagagcgagaaacaaaagttacgagcgcaagtccgccggctttgccaggagaatcagtggcttagagatgagcttgctaacacacagcaaaagctgcaaaaatctgagcagtctgtcgcccagcttgaggaggagaagaagcatctggagttcatgaaccagctgaagaaatacgatgatgacatatctcctagtgaggataaggatacagattcaacaaaagagcccctcgatgatctgtttcctaacgatgaagatgaccctggacagggtatacagcagcagcattcatcggcagccgcagcagctcaacagggcgggtatgagatccctgcccgtttacggaccttgcacaatttggtaatccaatatgctagccagggtagatatgaggttgccgtgcccctctgcaagcaggccctcgaagatttggagaaaacatccggacatgatcacccagatgtggctactatgcttaacattctggccctagtctatagggaccaaaacaagtacaaggatgcggccaatcttctgaatgatgctctggccattagggagaagaccctcggtaaagaccaccctgctgtggccgccacactcaacaatctggctgtattgtacggaaaacgggggaagtataaggaggcagaacctttgtgcaagcgggctctggaaatccgcgagaaagtcctgggaaaagaccaccctgacgttgccaaacagcttaacaatctggctctgttgtgccagaaccagggaaagtacgaagaagtcgagtattattaccagagagccctggagatttatcaaaccaagctgggtcctgacgacccaaatgtggccaaaacaaaaaacaatttggcaagctgttacctgaaacagggaaagtttaagcaggccgagactttgtacaaggagattttaacacgcgcccatgaacgagaatttggctcggtggacgacgagaataagcctatctggatgcacgccgaagagcgcgaggagtgcaagggcaagcagaaggacggaacatcatttggtgagtacgggggttggtacaaagcgtgtaaggtcgattccccaactgtaaccaccactctgaagaatcttggtgcactttacagacgccaggggaagttcgaggctgctgaaactctggaggaggccgctatgcggtctcgcaagcagggactggataacgtgcacaaacagagggtagctgaggttctcaatgatcctgagaacatggagaagcgaaggtcgcgggaaagtctgaacgtcgacgttgtcaaatacgaatctggcccagacggaggggaagaagatggcacgggctctctgaagagatctggatccttttcaaagctacgggcttctatccggagatcaagcgagaaattggtgcgcaaactgaagggcggcagcagtagggaatctgaacctaaaaaccccgggatgaaacgtgctagctctctcaacgttcttaatgtgggcggcaaagctgctgaggaccgcttccagggagtgtccggcagggcctcattctgtgggaagcgccagcaacagcagtggcccggccgtcgtcatcgctag

SEQ ID NO: 47765 - DNA, 1914 bp, Artificial Sequence
  derived and/or modified sequence
atgtatgacaacatgtccaccatggtgtatatcaaggaagacaagctcgagaaactcactcaggacgaaattatcagtaaaacaaaacaggtgattcagggactcgaagccctaaaaaacgaacataatagcatcctgcagagtctgctggaaacacttaaatgtctgaaaaaagacgacgaatcaaacttggtagaggagaagtcgaacatgattcgcaagtcattggaaatgctggagcttggactgagcgaagctcaggtgatgatggccctgtctaaccatctaaacgcagtcgagtcagagaagcagaaattgcgagctcaggtaagaagattatgccaagagaatcagtggctgagggacgagctggctaatacccagcagaagctccagaagtctgagcagagcgtcgcccagctggaggaggagaagaaacacttggaattcatgaaccagctgaaaaaatacgatgacgacatttctccctctgaggacaaagacactgacagtactaaggagcccctggatgatctctttccgaacgacgaagatgaccccggacagggaatccagcagcagcattcgtctgcagccgcagccgctcaacaggggggttatgagatccccgcaagacttcgcacactgcataatctggttatccagtacgcaagtcaagggagatatgaagttgctgtgcctctgtgcaagcaagcactggaggatctcgagaagacatcaggtcacgatcacccagacgttgccacaatgttgaacatcctggccttagtgtatagagatcaaaataaatacaaagatgctgccaatctgctcaatgatgccctagccattcgggaaaagacactgggcaaggatcatcccgcagtagcagccaccttgaacaacttagcggtcctgtacggcaaaagggggaagtacaaagaggctgagcccctttgcaagagagcgctcgaaattcgcgaaaaggtgctggggaaagaccaccccgatgttgcaaagcaactgaacaatttggctttactatgccagaatcagggcaagtatgaggaagttgaatactactaccagagggcccttgagatctaccagaccaagctggggcctgatgaccccaacgtcgctaagaccaaaaataacctggcatcgtgttacttgaagcagggcaaatttaagcaggcagagaccctatataaggaaatcctgactcgggctcacgaacgcgagtttgggagcgtggacgacgagaacaaaccaatatggatgcatgcagaggagagagaagagtgcaagggtaagcaaaaagatggtacttccttcggcgaatatgggggttggtacaaggcctgtaaggtggactcccctacagtgactacgacacttaaaaacctcggggcactgtatcgcaggcagggcaagttcgaggctgccgaaaccctggaggaggccgctatgcgcagcagaaagcagggcctagacaacgtccacaagcagagggtcgccgaggtactgaacgaccccgaaaatatggagaagcgtcgcagccgtgagagcctgaacgttgacgttgtgaaatacgagtctggccctgatgggggagaggaagtgagtatgtccgtagagtggaacggcgatgggactggaagcctgaagcggagtgggtcgttcagcaaactgagagcttctatccgacgcagtagcgagaaattagttcgcaagctcaaagggggttctagccgggaaagtgagcccaagaatcctggtatgaaacgggcttccagcctcaacgtccttaacgtgggcggaaaggccgctgaggataggtttcaagaaagaaataactgcctggccgacagtagagcactgtccgccagccataccgatctcgcgcattag

SEQ ID NO: 47766 - DNA, 1920 bp, Artificial Sequence
  derived and/or modified sequence
atgtatgataacatgagcaccatggtctatattaaagaagataagctggagaaactgactcaggacgaaattattagcaagacaaagcaggtaatccaggggttagaggctctgaaaaacgagcacaatagtattctgcagtccctgctggaaactctgaaatgtcttaagaaagacgacgagagcaacttggtcgaagaaaaatcaaacatgatccgcaagtcacttgagatgcttgagctgggtctatccgaagcccaagtcatgatggctctgtctaaccacctgaatgctgttgaatccgaaaagcagaaactgagggcccaggttcgtaggctctgccaggaaaaccagtggttgcgtgacgagctggcaaatacgcagcaaaagttacagaaatccgagcaaagtgtggctcaactcgaggaggaaaaaaaacacctggagttcatgaaccaattaaagaaatacgatgacgacatttcccctagcgaggacaaggatacagattccacaaaggaacccctggacgatctgttccccaacgacgaagacgatcccggtcagggtatccagcagcaacacagctcagccgcagcagccgcacagcagggaggctacgagattcccgctaggttgagaaccctgcataacctggtgattcaatacgcttctcaggggagatatgaggttgctgttcccttgtgtaagcaagctctggaggatctggaaaagaccagcggacacgatcaccccgatgttgccaccatgctcaacattctagccctggtgtaccgagatcagaataagtacaaggatgccgctaatcttctgaacgacgctctggcaattagagagaaaacacttggaaaggatcatccggctgttgcagctacccttaacaatctcgccgtcctgtacggaaaaagagggaagtacaaagaggccgaacctctctgcaaacgcgctttagaaatccgggagaaggtgctgggaaaagaccacccagatgtcgccaagcagcttaataacctggctttgctctgccagaatcagggaaagtatgaggaggtagaatactactatcagcgggctctggaaatttatcagaccaagttaggacccgacgacccaaacgtggccaagacaaaaaataatctggccagctgttacctcaaacaggggaagtttaagcaggccgagacactgtataaggaaatcttgacccgagctcacgagagagaatttggcagtgtggatgacgagaacaagccaatctggatgcacgccgaggagcgggaggagtgcaaaggaaagcaaaaggatggaacttcttttggcgagtacgggggttggtacaaggcatgcaaggtcgactctccaacggtaaccaccaccttaaagaacctgggggcactgtatcgacgacaagggaagtttgaggcagcagagactctcgaggaggccgctatgcgatcacgcaaacagggccttgacaatgtacacaagcagagggtcgcggaggtgcttaatgaccccgagaatatggagaaacgtaggtctagagaatcactcaatgtggacgtggtgaagtacgagtctgggcctgacgggggagaggaagtgtcaatgtccgtggagtggaacggcgacggaaccggaagtttgaagcgctcagggtccttttctaaacttagagcctccatacgcagatcttccgaaaaattggtgcgaaagctgaaagggggtagcagtcgggagtccgaaccaaaaaatccaggtatgaaaagggcctccagtctaaatgtgctgaacgtgggaggcaaagctgccgaggatcggtttcagggtgtgtccggacgcgcttcattttgcggaaagagacagcagcagcagtggcctgggcgacgacacagatag

SEQ ID NO: 47767 - DNA, 1887 bp, Artificial Sequence
  derived and/or modified sequence
atgtacgataacatgagcaccatggtctacatcaaagaagataagttagaaaagctgacacaggatgaaataatcagtaagacaaaacaagtgattcagggtctggaagccctcaaaaatgagcataacagcattttgcagtctctgttggagaccctcaagtgtctgaagaaggacgacgagtcaaatctcgtcgaggagaaaagcaatatgatccgcaagtccctggagatgcttgagctcggtctcagtgaagcgcaggttatgatggcgctctctaaccacctgaatgcagtggaatctgagaagcagaagctacgagcccaggtgagaaggctgtgtcaagagaatcagtggctacgagatgagcttgcaaatacccagcaaaaacttcagaaaagtgaacagtcagtcgctcagctcgaagaggagaagaaacatctggagttcatgaaccagctcaagaagtacgacgacgatattagtccatcggaagataaggacaccgattctaccaaagaaccactagacgatttgttccccaacgatgaggatgaccctgggcaagggattcagcaacagcacagctctgcggctgcagctgcacagcaggggggttatgaaattcctgccaggctgagaacactgcacaatctggtcattcagtacgcctctcaaggtcggtacgaggtggcagtcccgctgtgtaagcaggcccttgaagacctggagaagacatctggtcatgaccatccggacgtcgccacaatgctgaacatcctggcattagtataccgcgaccagaacaaatacaaggacgccgcaaatttgctgaacgacgcactggcgatccgggaaaagaccctgggcaaagatcacccagccgttgcagctaccctgaacaatctagccgttctgtacggcaagcggggaaaatataaggaagctgaaccactgtgtaagcgcgcactggaaattagagagaaagttctggggaaggaccacccagatgttgccaaacaactcaacaatttggcgctgttatgccaaaatcagggaaagtacgaggaggtagagtattactaccagagagctctcgagatctatcagactaaactggggcctgatgacccgaacgtcgccaagaccaaaaacaacctcgcgagctgctacttgaagcagggcaaatttaaacaggccgaaacactgtacaaagagattctcacccgggcacacgagcgggaatttgggtccgtggacgatgagaataaaccaatctggatgcacgccgaagagcgggaagagtgtaagggaaaacagaaagacggcacctctttcggggagtacggcggttggtacaaagcctgtaaggtggactcccccactgtgacaacaacactgaagaacctgggcgctctgtataggcgccagggaaagttcgaggcagccgagactcttgaagaagcggcaatgcgctctcggaagcaaggtctggacaacgtgcacaaacagcgcgtcgcagaggttctgaacgatcccgagaacatggagaaacgacgttcccgtgagtcactgaatgtggatgtggttaagtacgaatcgggacccgatggcggagaagaggacgggaccggaagccttaagagatcaggatctttctccaagttgagagcgtccattagaaggtcctccgagaaactcgtgagaaagttaaagggcggatcgagtcgtgagtccgagcccaagaatcctggtatgaaacgcgctagcagtctgaatgtgcttaacgtggggggaaaagccgctgaggatagatttcaggaacggaataattgtcttgcggatagtcgagccctatcggccagccatacagacctcgctcattag

SEQ ID NO: 47768 - DNA, 1857 bp, Artificial Sequence
  derived and/or modified sequence
atgtacgataatatgtcaacgatggtatacattaaagaggataaactcgaaaagctgacacaagatgaaattatctctaagacaaagcaggtgatccaaggcttggaagccctgaagaacgagcacaattcaatactgcagagcctcctggaaacattaaagtgccttaagaaagatgacgaatccaatttggtagaggagaagtcaaatatgatcagaaagtcattggaaatgctcgaactgggcctttctgaggcccaggtgatgatggccctatccaaccaccttaatgcagtagaatcggaaaaacagaagttacgcgctcaggtcagacgactgtgtcaagagaatcagtggctgcgggatgaacttgccaacactcagcagaagctgcagaaaagtgagcagtccgtcgcccagttggaagaggaaaaaaaacacttggagtttatgaaccagctcaaaaagtatgatgatgatatttccccatccgaagacaaggacaccgacagcacaaaggaacccctggacgacttgtttccaaacgacgaggacgaccctgggcagggtattcagcagcagcactccagcgctgctgcagctgctcagcagggcggatacgaaatcccagcaaggctcagaactctgcacaatctcgttatccaatatgccagccaaggcagatacgaagtggccgttccactatgcaaacaggctctggaggatctcgaaaaaacttcaggacacgatcaccccgatgtggcgacgatgctcaatattttggcccttgtctacagagatcagaataagtacaaggatgcagccaacctcctcaacgacgcactggcaattcgcgagaaaactctaggaaaagatcaccctgctgtcgcagcaactctgaacaaccttgccgtgctttacggcaagcgcggtaagtacaaggaggcagagccactttgcaagcgagccctcgagatcagggaaaaggtgctgggtaaggaccaccctgacgtggctaaacagctgaacaatctagctctgttgtgccagaaccaggggaaatacgaggaagtggaatactactaccagagagccctcgaaatataccaaaccaagttgggtcctgatgacccgaatgtggccaagaccaaaaacaacctcgccagctgctatttgaaacaggggaaattcaaacaggccgaaaccctgtacaaagaaatattgacacgcgcacacgaaagagaattcggatcagtcgacgacgagaacaagccaatatggatgcacgccgaggagcgtgaggagtgtaaaggcaagcagaaggatggaacgagctttggcgagtacgggggttggtataaggcttgtaaggtcgattcccccaccgtcacgaccactctaaagaatctgggcgctctatacaggaggcagggtaaatttgaagcagcagagactcttgaagaggccgcaatgagaagccggaagcagggattagataatgtgcacaagcagcgagttgcagaggttctgaacgatcctgaaaacatggaaaaacggcgatcgcgtgaaagtctcaatgtggatgtagtgaagtacgagagcggacctgacggtggagaggaagtgtccatgagcgtggaatggaacggagacgggactggatccctcaagaggtctgggagcttctccaagctgcgtgcctcaatccggaggtcatctgagaaactggttagaaagctcaaaggagggtcaagccgggagtcagagcctaagaaccccggagcatcgctggcagaaccactcttcgtggaaaacgattcatcatcatccggtctggaagacgctaccgctaattag

SEQ ID NO: 47769 - DNA, 1893 bp, Artificial Sequence
  derived and/or modified sequence
atgtatgataatatgagcacaatggtgtacattaaggaagataagctggaaaaactgacccaagatgagatcattagcaagacaaagcaggtcatccaggggttagaggctttaaaaaacgagcataatagcattcttcagagccttctggagacccttaaatgtctgaaaaaagatgatgagagcaacctggtcgaggaaaagtcgaacatgatacggaaaagccttgaaatgctggagctgggcttatctgaagctcaggtgatgatggcactgagcaatcacttgaatgccgttgaaagcgagaaacagaagctgcgcgcacaggttagaaggctatgtcaggagaatcagtggctccgcgacgagctcgccaacacccagcagaagttacagaaatctgaacagtccgttgcacagcttgaggaagaaaaaaaacacctagagtttatgaaccagctgaagaaatatgatgatgacatctctcccagtgaggacaaagataccgattcaaccaaggaacccctggacgatctgtttcctaacgacgaagatgacccagggcagggcatccaacagcaacatagcagcgccgcagcagctgctcagcagggcggatatgagatcccagccaggcttcgaactcttcacaatctggtgatacagtatgcttcccagggcaggtacgaagtggcggtgcccctttgtaaacaggcactcgaggatctggaaaaaacgagcggacacgatcaccccgatgtggccactatgctcaatatcctggcccttgtgtaccgggaccagaataagtataaggatgccgctaatcttctgaacgatgccctcgcaattcgggagaagacactgggtaaggatcacccagccgtagccgctactctgaacaacctggccgttctttacggaaagagaggaaaatataaggaggctgaacctctgtgcaagagagcactggaaatcagggaaaaagtccttggtaaagaccatcctgacgttgccaaacagctgaacaatctggctttactgtgtcagaaccagggcaagtacgaggaggtcgagtattactaccaacgagctcttgagatatatcaaaccaagctgggccctgatgaccctaatgtagctaagaccaagaacaatcttgcaagctgttaccttaagcaaggcaagtttaagcaagccgagactttatataaggagatccttacaagagcacatgagcgggagtttgggtcagtggatgatgagaacaaaccgatttggatgcacgcagaagagagggaggagtgcaagggcaaacaaaaagacgggacaagcttcggagagtatgggggttggtacaaggcctgcaaggtcgactcacccacggtgacgaccaccctgaagaatctgggcgcattgtataggagacagggcaaatttgaggctgcagagaccctcgaagaagccgctatgcgcagcaggaagcaggggctcgataacgtgcacaaacagagagtcgccgaggtgcttaatgatccggaaaacatggaaaaaagaaggtcccgcgagagcctgaatgtcgatgtggtgaagtatgagagtggacctgatggaggtgaagaagatggcactggcagcttgaaacgttccgggtccttctcaaaacttcgggcatccattcgaagatcttcagaaaagcttgtcaggaagttaaaaggcggtagctcaagggaaagcgagccaaagaatcccggaatgaagagagcgtcatccttaaatgtcctgaacgtagggggaaaagccgcagaagatcgattccaaggtgtctcaggacgggcatctttttgtggcaaaaggcaacagcagcaatggcccggtagaagacacaggtag

SEQ ID NO: 47770 - DNA, 1914 bp, Artificial Sequence
  derived and/or modified sequence
atgtacgacaacatgagcaccatggtgtacatcaaggaggacaagctggagaagctgacccaggacgagatcatcagcaagaccaagcaggtgatccagggcctggaggccctgaagaacgagcacaacagcatcctgcagagcctgctggagaccctgaagtgcctgaagaaggacgacgagagcaacctggtggaggagaagagcaacatgatcagaaagagcctggagatgctggagctgggcctgagcgaggcccaggtgatgatggccctgagcaaccacctgaacgccgtggagagcgagaagcagaagctgagagcccaggtgagaagactgtgccaggagaaccagtggctgagagacgagctggccaacacccagcagaagctgcagaagagcgagcagagcgtggcccagctggaggaggagaagaagcacctggagttcatgaaccagctgaagaagtacgacgacgacatcagccccagcgaggacaaggacaccgacagcaccaaggagcccctggacgacctgttccccaacgacgaggacgaccccggccagggcatccagcagcagcacagcagcgccgccgccgccgcccagcagggcggctacgagatccccgccagactgagaaccctgcacaacctggtgatccagtacgccagccagggcagatacgaggtggccgtgcccctgtgcaagcaggccctggaggacctggagaagaccagcggccacgaccaccccgacgtggccaccatgctgaacatcctggccctggtgtacagagaccagaacaagtacaaggacgccgccaacctgctgaacgacgccctggccatcagagagaagaccctgggcaaggaccaccccgccgtggccgccaccctgaacaacctggccgtgctgtacggcaagagaggcaagtacaaggaggccgagcccctgtgcaagagagccctggagatcagagagaaggtgctgggcaaggaccaccccgacgtggccaagcagctgaacaacctggccctgctgtgccagaaccagggcaagtacgaggaggtggagtactactaccagagagccctggagatctaccagaccaagctgggccccgacgaccccaacgtggccaagaccaagaacaacctggccagctgctacctgaagcagggcaagttcaagcaggccgagaccctgtacaaggagatcctgaccagagcccacgagagagagttcggcagcgtggacgacgagaacaagcccatctggatgcacgccgaggagagagaggagtgcaagggcaagcagaaggacggcaccagcttcggcgagtacggcggctggtacaaggcctgcaaggtggacagccccaccgtgaccaccaccctgaagaacctgggcgccctgtacagaagacagggcaagttcgaggccgccgagaccctggaggaggccgccatgagaagcagaaagcagggcctggacaacgtgcacaagcagagagtggccgaggtgctgaacgaccccgagaacatggagaagagaagaagcagagagagcctgaacgtggacgtggtgaagtacgagagcggccccgacggcggcgaggaggtgagcatgagcgtggagtggaacggcgacggcaccggcagcctgaagagaagcggcagcttcagcaagctgagagccagcatcagaagaagcagcgagaagctggtgagaaagctgaagggcggcagcagcagagagagcgagcccaagaaccccggcatgaagagagccagcagcctgaacgtgctgaacgtgggcggcaaggccgccgaggacagattccaggagagaaacaactgcctggccgacagcagagccctgagcgccagccacaccgacctggcccactag

SEQ ID NO: 47771 - DNA, 1920 bp, Artificial Sequence
  derived and/or modified sequence
atgtacgacaacatgagcaccatggtgtacatcaaggaggacaagctggagaagctgacccaggacgagatcatcagcaagaccaagcaggtgatccagggcctggaggccctgaagaacgagcacaacagcatcctgcagagcctgctggagaccctgaagtgcctgaagaaggacgacgagagcaacctggtggaggagaagagcaacatgatcagaaagagcctggagatgctggagctgggcctgagcgaggcccaggtgatgatggccctgagcaaccacctgaacgccgtggagagcgagaagcagaagctgagagcccaggtgagaagactgtgccaggagaaccagtggctgagagacgagctggccaacacccagcagaagctgcagaagagcgagcagagcgtggcccagctggaggaggagaagaagcacctggagttcatgaaccagctgaagaagtacgacgacgacatcagccccagcgaggacaaggacaccgacagcaccaaggagcccctggacgacctgttccccaacgacgaggacgaccccggccagggcatccagcagcagcacagcagcgccgccgccgccgcccagcagggcggctacgagatccccgccagactgagaaccctgcacaacctggtgatccagtacgccagccagggcagatacgaggtggccgtgcccctgtgcaagcaggccctggaggacctggagaagaccagcggccacgaccaccccgacgtggccaccatgctgaacatcctggccctggtgtacagagaccagaacaagtacaaggacgccgccaacctgctgaacgacgccctggccatcagagagaagaccctgggcaaggaccaccccgccgtggccgccaccctgaacaacctggccgtgctgtacggcaagagaggcaagtacaaggaggccgagcccctgtgcaagagagccctggagatcagagagaaggtgctgggcaaggaccaccccgacgtggccaagcagctgaacaacctggccctgctgtgccagaaccagggcaagtacgaggaggtggagtactactaccagagagccctggagatctaccagaccaagctgggccccgacgaccccaacgtggccaagaccaagaacaacctggccagctgctacctgaagcagggcaagttcaagcaggccgagaccctgtacaaggagatcctgaccagagcccacgagagagagttcggcagcgtggacgacgagaacaagcccatctggatgcacgccgaggagagagaggagtgcaagggcaagcagaaggacggcaccagcttcggcgagtacggcggctggtacaaggcctgcaaggtggacagccccaccgtgaccaccaccctgaagaacctgggcgccctgtacagaagacagggcaagttcgaggccgccgagaccctggaggaggccgccatgagaagcagaaagcagggcctggacaacgtgcacaagcagagagtggccgaggtgctgaacgaccccgagaacatggagaagagaagaagcagagagagcctgaacgtggacgtggtgaagtacgagagcggccccgacggcggcgaggaggtgagcatgagcgtggagtggaacggcgacggcaccggcagcctgaagagaagcggcagcttcagcaagctgagagccagcatcagaagaagcagcgagaagctggtgagaaagctgaagggcggcagcagcagagagagcgagcccaagaaccccggcatgaagagagccagcagcctgaacgtgctgaacgtgggcggcaaggccgccgaggacagattccagggcgtgagcggcagagccagcttctgcggcaagagacagcagcagcagtggcccggcagaagacacagatag

SEQ ID NO: 47772 - DNA, 1887 bp, Artificial Sequence
  derived and/or modified sequence
atgtacgacaacatgagcaccatggtgtacatcaaggaggacaagctggagaagctgacccaggacgagatcatcagcaagaccaagcaggtgatccagggcctggaggccctgaagaacgagcacaacagcatcctgcagagcctgctggagaccctgaagtgcctgaagaaggacgacgagagcaacctggtggaggagaagagcaacatgatcagaaagagcctggagatgctggagctgggcctgagcgaggcccaggtgatgatggccctgagcaaccacctgaacgccgtggagagcgagaagcagaagctgagagcccaggtgagaagactgtgccaggagaaccagtggctgagagacgagctggccaacacccagcagaagctgcagaagagcgagcagagcgtggcccagctggaggaggagaagaagcacctggagttcatgaaccagctgaagaagtacgacgacgacatcagccccagcgaggacaaggacaccgacagcaccaaggagcccctggacgacctgttccccaacgacgaggacgaccccggccagggcatccagcagcagcacagcagcgccgccgccgccgcccagcagggcggctacgagatccccgccagactgagaaccctgcacaacctggtgatccagtacgccagccagggcagatacgaggtggccgtgcccctgtgcaagcaggccctggaggacctggagaagaccagcggccacgaccaccccgacgtggccaccatgctgaacatcctggccctggtgtacagagaccagaacaagtacaaggacgccgccaacctgctgaacgacgccctggccatcagagagaagaccctgggcaaggaccaccccgccgtggccgccaccctgaacaacctggccgtgctgtacggcaagagaggcaagtacaaggaggccgagcccctgtgcaagagagccctggagatcagagagaaggtgctgggcaaggaccaccccgacgtggccaagcagctgaacaacctggccctgctgtgccagaaccagggcaagtacgaggaggtggagtactactaccagagagccctggagatctaccagaccaagctgggccccgacgaccccaacgtggccaagaccaagaacaacctggccagctgctacctgaagcagggcaagttcaagcaggccgagaccctgtacaaggagatcctgaccagagcccacgagagagagttcggcagcgtggacgacgagaacaagcccatctggatgcacgccgaggagagagaggagtgcaagggcaagcagaaggacggcaccagcttcggcgagtacggcggctggtacaaggcctgcaaggtggacagccccaccgtgaccaccaccctgaagaacctgggcgccctgtacagaagacagggcaagttcgaggccgccgagaccctggaggaggccgccatgagaagcagaaagcagggcctggacaacgtgcacaagcagagagtggccgaggtgctgaacgaccccgagaacatggagaagagaagaagcagagagagcctgaacgtggacgtggtgaagtacgagagcggccccgacggcggcgaggaggacggcaccggcagcctgaagagaagcggcagcttcagcaagctgagagccagcatcagaagaagcagcgagaagctggtgagaaagctgaagggcggcagcagcagagagagcgagcccaagaaccccggcatgaagagagccagcagcctgaacgtgctgaacgtgggcggcaaggccgccgaggacagattccaggagagaaacaactgcctggccgacagcagagccctgagcgccagccacaccgacctggcccactag

SEQ ID NO: 47773 - DNA, 1857 bp, Artificial Sequence
  derived and/or modified sequence
atgtacgacaacatgagcaccatggtgtacatcaaggaggacaagctggagaagctgacccaggacgagatcatcagcaagaccaagcaggtgatccagggcctggaggccctgaagaacgagcacaacagcatcctgcagagcctgctggagaccctgaagtgcctgaagaaggacgacgagagcaacctggtggaggagaagagcaacatgatcagaaagagcctggagatgctggagctgggcctgagcgaggcccaggtgatgatggccctgagcaaccacctgaacgccgtggagagcgagaagcagaagctgagagcccaggtgagaagactgtgccaggagaaccagtggctgagagacgagctggccaacacccagcagaagctgcagaagagcgagcagagcgtggcccagctggaggaggagaagaagcacctggagttcatgaaccagctgaagaagtacgacgacgacatcagccccagcgaggacaaggacaccgacagcaccaaggagcccctggacgacctgttccccaacgacgaggacgaccccggccagggcatccagcagcagcacagcagcgccgccgccgccgcccagcagggcggctacgagatccccgccagactgagaaccctgcacaacctggtgatccagtacgccagccagggcagatacgaggtggccgtgcccctgtgcaagcaggccctggaggacctggagaagaccagcggccacgaccaccccgacgtggccaccatgctgaacatcctggccctggtgtacagagaccagaacaagtacaaggacgccgccaacctgctgaacgacgccctggccatcagagagaagaccctgggcaaggaccaccccgccgtggccgccaccctgaacaacctggccgtgctgtacggcaagagaggcaagtacaaggaggccgagcccctgtgcaagagagccctggagatcagagagaaggtgctgggcaaggaccaccccgacgtggccaagcagctgaacaacctggccctgctgtgccagaaccagggcaagtacgaggaggtggagtactactaccagagagccctggagatctaccagaccaagctgggccccgacgaccccaacgtggccaagaccaagaacaacctggccagctgctacctgaagcagggcaagttcaagcaggccgagaccctgtacaaggagatcctgaccagagcccacgagagagagttcggcagcgtggacgacgagaacaagcccatctggatgcacgccgaggagagagaggagtgcaagggcaagcagaaggacggcaccagcttcggcgagtacggcggctggtacaaggcctgcaaggtggacagccccaccgtgaccaccaccctgaagaacctgggcgccctgtacagaagacagggcaagttcgaggccgccgagaccctggaggaggccgccatgagaagcagaaagcagggcctggacaacgtgcacaagcagagagtggccgaggtgctgaacgaccccgagaacatggagaagagaagaagcagagagagcctgaacgtggacgtggtgaagtacgagagcggccccgacggcggcgaggaggtgagcatgagcgtggagtggaacggcgacggcaccggcagcctgaagagaagcggcagcttcagcaagctgagagccagcatcagaagaagcagcgagaagctggtgagaaagctgaagggcggcagcagcagagagagcgagcccaagaaccccggcgccagcctggccgagcccctgttcgtggagaacgacagcagcagcagcggcctggaggacgccaccgccaactag

SEQ ID NO: 47774 - DNA, 1893 bp, Artificial Sequence
  derived and/or modified sequence
atgtacgacaacatgagcaccatggtgtacatcaaggaggacaagctggagaagctgacccaggacgagatcatcagcaagaccaagcaggtgatccagggcctggaggccctgaagaacgagcacaacagcatcctgcagagcctgctggagaccctgaagtgcctgaagaaggacgacgagagcaacctggtggaggagaagagcaacatgatcagaaagagcctggagatgctggagctgggcctgagcgaggcccaggtgatgatggccctgagcaaccacctgaacgccgtggagagcgagaagcagaagctgagagcccaggtgagaagactgtgccaggagaaccagtggctgagagacgagctggccaacacccagcagaagctgcagaagagcgagcagagcgtggcccagctggaggaggagaagaagcacctggagttcatgaaccagctgaagaagtacgacgacgacatcagccccagcgaggacaaggacaccgacagcaccaaggagcccctggacgacctgttccccaacgacgaggacgaccccggccagggcatccagcagcagcacagcagcgccgccgccgccgcccagcagggcggctacgagatccccgccagactgagaaccctgcacaacctggtgatccagtacgccagccagggcagatacgaggtggccgtgcccctgtgcaagcaggccctggaggacctggagaagaccagcggccacgaccaccccgacgtggccaccatgctgaacatcctggccctggtgtacagagaccagaacaagtacaaggacgccgccaacctgctgaacgacgccctggccatcagagagaagaccctgggcaaggaccaccccgccgtggccgccaccctgaacaacctggccgtgctgtacggcaagagaggcaagtacaaggaggccgagcccctgtgcaagagagccctggagatcagagagaaggtgctgggcaaggaccaccccgacgtggccaagcagctgaacaacctggccctgctgtgccagaaccagggcaagtacgaggaggtggagtactactaccagagagccctggagatctaccagaccaagctgggccccgacgaccccaacgtggccaagaccaagaacaacctggccagctgctacctgaagcagggcaagttcaagcaggccgagaccctgtacaaggagatcctgaccagagcccacgagagagagttcggcagcgtggacgacgagaacaagcccatctggatgcacgccgaggagagagaggagtgcaagggcaagcagaaggacggcaccagcttcggcgagtacggcggctggtacaaggcctgcaaggtggacagccccaccgtgaccaccaccctgaagaacctgggcgccctgtacagaagacagggcaagttcgaggccgccgagaccctggaggaggccgccatgagaagcagaaagcagggcctggacaacgtgcacaagcagagagtggccgaggtgctgaacgaccccgagaacatggagaagagaagaagcagagagagcctgaacgtggacgtggtgaagtacgagagcggccccgacggcggcgaggaggacggcaccggcagcctgaagagaagcggcagcttcagcaagctgagagccagcatcagaagaagcagcgagaagctggtgagaaagctgaagggcggcagcagcagagagagcgagcccaagaaccccggcatgaagagagccagcagcctgaacgtgctgaacgtgggcggcaaggccgccgaggacagattccagggcgtgagcggcagagccagcttctgcggcaagagacagcagcagcagtggcccggcagaagacacagatag

SEQ ID NO: 47775 - protein, 242 aa, Artificial Sequence
  derived and/or modified sequence
MESRETLSSSRQRGGESDFLPVSSAKPPAAPGCAGEPLLSTPGPGKGIPVGGERMEPEEEDELGSGRDVDSNSNADSEKWVAGDGLEEQEFSIKEANFTEGSLKLKIQTTKRAKKPPKNLENYICPPEIKITIKQSGDQKVSRAGKNSKATKEEERSHSKKKLLTASDLAASDLKGFQPQIKDSSKEEVWKRRGGQGIPFKKQFLSQERAMCFSCPRNPFPAKPGSLTLPFHSEPAVWAQEV

SEQ ID NO: 47776 - DNA, 729 bp, Artificial Sequence
  derived and/or modified sequence
atggagagtagggaaactctgtcaagctcaaggcagagaggaggcgagtccgatttcctaccagtgtcttccgctaaacctccagccgctcccggctgcgcaggcgaaccgcttctgagtacaccaggccctgggaaaggcattcctgtgggcggcgaacgaatggaaccagaagaggaagatgagctgggctctgggagggatgtggattctaattccaatgcagatagtgaaaagtgggttgctggcgatggattggaggaacaagaattcagcattaaggaagcaaacttcaccgaaggttcacttaagctgaaaattcaaaccactaagagggccaagaagccgccaaaaaacctggagaattatatttgccctccagagatcaaaattacaatcaagcagagtggtgaccaaaaggtgtccagagccggcaaaaacagtaaggccaccaaggaggaagaaaggagccactccaagaagaaactcttgactgccagtgacctcgcggcttccgatctgaagggctttcagcctcagataaaggacagctccaaggaagaggtgtggaagaggcggggaggccagggaatcccgtttaaaaaacagttcttgagtcaggagcgtgcaatgtgcttctcctgtccacggaatccgttccccgcaaagcctgggtcactgaccctgccattccattccgagccagccgtatgggcacaagaagtgtag

SEQ ID NO: 47777 - DNA, 414 bp, Artificial Sequence
  derived and/or modified sequence
atggagagcagggaaaccctgtcctcttctcgccagagaggaggcgagtccgatttcctccctgtgtcaagcgcgaaacctccagcggctcctgggtgtgctggggagcccctcctcagtacgcctggccctggtaaggggattcccgtgggaggagaacgcatggaacctgaggaagaggacgaattaggctcgggccgggacgtcgactctaattcaaacgccgactccgagaaatgggtggccggagacggcttggaagaacaggaattctccatcaaggaggcgaatttcaccgaaggctcattgaagctgaagatccagactaccaaaagagctaaaaaaccccccaaaaacctggagaactacatctgccccccagagatcaaaattactattaaacagtctggatag

SEQ ID NO: 47778 - DNA, 729 bp, Artificial Sequence
  derived and/or modified sequence
atggagagccgggagaccctgagcagcagccggcagaggggcggggagagtgacttcctgcctgtgagcagcgccaagcccccagctgcccctggctgtgccggggagcccctgctgagcaccccaggccctgggaagggcatccctgtgggcggggagaggatggagcctgaggaggaggatgagctgggcagcggcagagatgtggacagcaacagcaatgctgacagcgagaagtgggtggccggagatggcctggaggagcaggagttcagcatcaaggaggccaacttcacagagggcagcctgaagctgaagatccagaccaccaagagggccaagaagccacccaagaacctggagaactacatctgccccccagagatcaagatcaccatcaagcagagcggggaccagaaggtgtcccgggccggcaagaacagcaaggccaccaaggaggaggagaggagccacagcaagaagaagctgctgacagccagtgacctggccgccagtgacctgaagggcttccagccccagatcaaggacagcagcaaggaggaggtgtggaagaggcggggcggccagggcatccccttcaagaagcagttcctgagccaggagcgggccatgtgcttcagctgccccaggaaccccttccctgccaagccaggcagcctgaccctgcccttccacagcgagcctgctgtgtgggcccaggaggtgtag

SEQ ID NO: 47779 - DNA, 414 bp, Artificial Sequence
  derived and/or modified sequence
atggagagccgggagaccctgagcagcagccggcagaggggcggggagagtgacttcctgcctgtgagcagcgccaagcccccagctgcccctggctgtgccggggagcccctgctgagcaccccaggccctgggaagggcatccctgtgggcggggagaggatggagcctgaggaggaggatgagctgggcagcggcagagatgtggacagcaacagcaatgctgacagcgagaagtgggtggccggagatggcctggaggagcaggagttcagcatcaaggaggccaacttcacagagggcagcctgaagctgaagatccagaccaccaagagggccaagaagccacccaagaacctggagaactacatctgccccccagagatcaagatcaccatcaagcagagcggctag

SEQ ID NO: 47780 - DNA, 729 bp, Artificial Sequence
  derived and/or modified sequence
atggagagccgggagaccctgagcagcagccggcagcggggcggcgagagtgattttctccccgtgtcttctgcaaagccaccagcagcccccggttgtgccggagagccgctgttatcaacaccaggtccaggtaaaggaatcccagtgggtggggagaggatggagccagaggaggaagacgaattaggaagtggcagggacgtggattcaaactccaatgccgatagtgaaaaatgggtggcaggcgacggcctcgaggaacaagaattcagcattaaggaggcaaattttaccgagggatcccttaagctgaagatccaaacaacgaagcgcgcaaaaaagccgcctaagaacctggagaactacatatgtccacccgaaatcaagattacaattaaacagagcggagatcaaaaagtgtcacgcgccggcaagaattccaaagctacaaaggaggaagagcgctcccatagcaagaagaagctgctcactgcctcagacctggccgcatctgacttgaagggatttcagcctcagatcaaggatagcagcaaagaggaggtttggaagagacgaggaggccagggcatcccattcaagaagcagttcctgagtcaggagagggccatgtgtttctcctgtcctagaaacccctttcccgcgaaaccagggtcccttaccctgcctttccacagcgagccagcggtgtgggcccaggaagtatag

SEQ ID NO: 47781 - DNA, 414 bp, Artificial Sequence
  derived and/or modified sequence
atggagagccgggagaccctgagcagcagccggcagcggggcggcgagagtgattttttacctgttagttcggcaaagccacccgccgctccaggatgtgctggggaacctcttctcagcaccccaggacctggaaaaggcataccagtaggcggcgagcggatggagccagaggaggaggatgaactgggatccggtagggatgtcgatagcaattcgaacgccgattccgagaagtgggtggcaggagatggcctcgaggagcaggaattctcaatcaaagaggccaattttacagaaggaagcttaaaattgaagattcagacgacaaagcgagccaagaagccccctaaaaatcttgaaaattacatttgccctcctgagattaaaatcactatcaagcagagtgggtag

SEQ ID NO: 47782 - DNA, 729 bp, Artificial Sequence
  derived and/or modified sequence
atggagagtcgagaaaccctatcatcaagcaggcagcgaggcggagagagcgattttctacccgtgagttccgcaaaacctcctgctgcccctggctgtgcgggagaacctctgctgagcacccctgggccaggaaagggcattccggtgggcggtgaaaggatggaacctgaggaggaggatgagctgggctccggcagggacgtcgattctaacagtaatgccgattccgaaaagtgggtggctggagacggcctggaggagcaggagtttagcataaaagaagcgaattttactgaaggctctctcaagctcaaaatccaaaccactaaacgggctaagaagccaccgaaaaacctggagaattacatctgtcccccagagataaagatcaccattaaacagtctggggaccagaaggtcagccgggcaggaaagaatagcaaggcaacgaaggaggaagaacggagccactctaagaaaaaactgctaacagccagtgatctggctgcaagcgatcttaagggcttccaaccacaaatcaaagacagttccaaagaggaggtgtggaagagacgcggaggccaaggcatcccttttaagaaacagtttctatcccaggagagggctatgtgcttttcttgtcccaggaacccttttcccgctaagcctggatcacttacattgcccttccattctgaaccagccgtctgggcccaggaagtgtag

SEQ ID NO: 47783 - DNA, 414 bp, Artificial Sequence
  derived and/or modified sequence
atggagtcccgcgagacactgtcttcaagtagacagagggggggagagtcagactttctgcccgtcagctctgctaaaccccctgccgcacctggttgtgcgggagagccactattgagcactcccggtccgggaaaaggcatccctgtcggcggagagaggatggagccggaggaggaagacgaactgggttcaggaagggacgtggactctaactctaacgcggatagcgagaaatgggtggccggagatggattggaggaacaggagtttagcataaaggaggcgaactttacagaaggctccctcaagctcaagatacagacaactaagcgggctaagaaaccacccaaaaacctcgagaactacatctgcccgccagagattaaaataacaattaagcaatcaggctag

SEQ ID NO: 47784 - DNA, 1785 bp, Artificial Sequence
  derived and/or modified sequence
aagcgcggggccggccggggcgcccgccgctcgccgccgcctccgcgcgcccgggggccccggcgccccccgagctagggcggccagctcgcggctcgccgtttgacagatgctcatcgccatggagttgccgcagcagcacctttgggggctcgggcgagcgacgggagccgggatctgagcgagcgccggggccagcggagccggagccgccgggacatggttgcagatctgatctcttctgaacacctcatcgtgtctccatccctgggaatctgaccctagcaactggaccactttgttcttggaattttgggtgtcctcttttctcacctttcccttttcccttttccccttccccctcctgagaactccggaagactgtagagattgtcatggagtccagggaaaccttaagcagctcccggcaaagagggggcgagtcagacttcctgccggtctcctcagccaagcccccagctgctcctggctgtgcaggagaacctttgctctccactccaggacctgggaaggggatcccggtgggcggagagcgcatggagccagaggaggaggatgaactaggctcagggcgggatgtggattccaactccaacgcggacagtgagaaatgggtggcaggagatggtttggaagagcaggaattttctatcaaggaggcaaacttcacagagggaagtctgaagctaaagattcagaccacaaagcgggctaagaaacccccaaagaatttggagaactatatatgtccacctgagatcaagatcaccatcaagcagtctggggaccagaaggtgtcccgtgctggaaaaaatagcaaagccacgaaggaggaagaaagaagccactccaaaaagaagctcctcacagccagtgaccttgcagccagtgacctcaaaggatttcagccacagattaaagactccagtaaggaggaagtctggaagagaagaggaggccaaggcatcccattcaaaaagcaattcctgtcccaggaacgtgccatgtgcttctcatgcccccggaacccattccccgcaaaacccggttctctcactcttccttttcacagtgaacctgcagtctgggcacaagaagtataacttcgcatggattctgcaaagcccacacctgtggtcattccctgttctttccattcaacaatggagacttgcccaagattgtaaactagtgagtgacagcatttgggcttatgatcttctctgcctgctagctagacattctctctgggtctaaaagataatccaaaaagatccagcttcacaatgctgccctgaagagataatgcattaggcggccctgatgcagcattcactgtcttccagggcaggcttgatcccatgagtttgcttgctcagacgatcacttaggaaacacatgcctttactctctaggccttttttctagcttgccttgtatcagctatgccatggatctttgctctcttaccccatgctatacagagtatgggctccaagccacagctggcctgtcaagtgtgtgtcgctggtccaccatgggatacatttagaaacttttatagcaatttgacatttttgtgatatccaagcatgtgattgttttcctacggatttgtcttatagtattttaccaaagtttccacacaaaaagtatggattaaggacaaagtatctggtccttcatcaaagatcgtttgataagctctgttctagttaaccaacactgagctttcctagttttaataaaagagtaggatttgga

SEQ ID NO: 47785 - DNA, 762 bp, Artificial Sequence
  derived and/or modified sequence
gcgtgagcctgtgcgtgtgctcacacgcgcattttggcagggctgaatcacaagaggactcgcagttgatacccagactcaccaaaaaattgagctgtgaatttggggaggcaggtacgtgctgggaaggaagctaaaggagaacaacagctttgtgtgctgatgaagtaaacagacagttgcagatctgatctcttctgaacacctcatcgtgtctccatccctgggaatctgaccctagcaactggaccactttgttcttggaattttgggtgtcctcttttctcacctttcccttttcccttttccccttccccctcctgagaactccggaagactgtagagattgtcatggagtccagggaaaccttaagcagctcccggcaaagagggggcgagtcagacttcctgccggtctcctcagccaagcccccagctgctcctggctgtgcaggagaacctttgctctccactccaggacctgggaaggggatcccggtgggcggagagcgcatggagccagaggaggaggatgaactaggctcagggcgggatgtggattccaactccaacgcggacagtgagaaatgggtggcaggagatggtttggaagagcaggaattttctatcaaggaggcaaacttcacagagggaagtctgaagctaaagattcagaccacaaagcgggctaagaaacccccaaagaatttggagaactatatatgtccacctgagatcaagatcaccatcaagcagtctggg

SEQ ID NO: 47786 - DNA, 729 bp, Artificial Sequence
  derived and/or modified sequence
atggagagcagagagaccctgagcagcagcagacagagaggcggcgagagcgacttcctgcccgtgagcagcgccaagccccccgccgcccccggctgcgccggcgagcccctgctgagcacccccggccccggcaagggcatccccgtgggcggcgagagaatggagcccgaggaggaggacgagctgggcagcggcagagacgtggacagcaacagcaacgccgacagcgagaagtgggtggccggcgacggcctggaggagcaggagttcagcatcaaggaggccaacttcaccgagggcagcctgaagctgaagatccagaccaccaagagagccaagaagccccccaagaacctggagaactacatctgcccccccgagatcaagatcaccatcaagcagagcggcgaccagaaggtgagcagagccggcaagaacagcaaggccaccaaggaggaggagagaagccacagcaagaagaagctgctgaccgccagcgacctggccgccagcgacctgaagggcttccagccccagatcaaggacagcagcaaggaggaggtgtggaagagaagaggcggccagggcatccccttcaagaagcagttcctgagccaggagagagccatgtgcttcagctgccccagaaaccccttccccgccaagcccggcagcctgaccctgcccttccacagcgagcccgccgtgtgggcccaggaggtgtag

SEQ ID NO: 47787 - DNA, 414 bp, Artificial Sequence
  derived and/or modified sequence
atggagagcagagagaccctgagcagcagcagacagagaggcggcgagagcgacttcctgcccgtgagcagcgccaagccccccgccgcccccggctgcgccggcgagcccctgctgagcacccccggccccggcaagggcatccccgtgggcggcgagagaatggagcccgaggaggaggacgagctgggcagcggcagagacgtggacagcaacagcaacgccgacagcgagaagtgggtggccggcgacggcctggaggagcaggagttcagcatcaaggaggccaacttcaccgagggcagcctgaagctgaagatccagaccaccaagagagccaagaagccccccaagaacctggagaactacatctgcccccccgagatcaagatcaccatcaagcagagcggctag

SEQ ID NO: 47788 - protein, 255 aa, Artificial Sequence
  derived and/or modified sequence
MVLELNASDDRGIDIIRGPILSFASTRTIFKKGFKLVILDEADAMTQDAQNALRRVIEKFTENTRFCLICNYLSKIIPALQSRCTRFRFGPLTPELMVPRLEHVVEEEKVDISEDGMKALVTLSSGDMRRALNILQSTNMAFGKVTEETVYTCTGHPLKSDIANILDWMLNQDFTTAYRNITELKTLKGLALHDILTEIHLFVHRVDFPSSVRIHLLTKMADIEYRLSVGTNEKIQLSSLIAAFQVTRDLIVAEA

SEQ ID NO: 47789 - DNA, 768 bp, Artificial Sequence
  derived and/or modified sequence
atggtgctggagctgaacgccagcgacgacagaggcatcgacatcatcagaggccccatcctgagcttcgccagcaccagaaccatcttcaagaagggcttcaagctggtgatcctggacgaggccgacgccatgacccaggacgcccagaacgccctgagaagagtgatcgagaagttcaccgagaacaccagattctgcctgatctgcaactacctgagcaagatcatccccgccctgcagagcagatgcaccagattcagattcggccccctgacccccgagctgatggtgcccagactggagcacgtggtggaggaggagaaggtggacatcagcgaggacggcatgaaggccctggtgaccctgagcagcggcgacatgagaagagccctgaacatcctgcagagcaccaacatggccttcggcaaggtgaccgaggagaccgtgtacacctgcaccggccaccccctgaagagcgacatcgccaacatcctggactggatgctgaaccaggacttcaccaccgcctacagaaacatcaccgagctgaagaccctgaagggcctggccctgcacgacatcctgaccgagatccacctgttcgtgcacagagtggacttccccagcagcgtgagaatccacctgctgaccaagatggccgacatcgagtacagactgagcgtgggcaccaacgagaagatccagctgagcagcctgatcgccgccttccaggtgaccagagacctgatcgtggccgaggcctag

SEQ ID NO: 47790 - DNA, 768 bp, Artificial Sequence
  derived and/or modified sequence
atggtgctcgaactgaacgcttctgatgaccggggcatcgatatcattcggggccctatactcagtttcgcatccacccgcactatctttaaaaagggcttcaagctggtaatattggacgaagctgatgctatgacacaggatgctcagaatgccttacgccgagtcattgaaaaattcacggaaaacacccgattttgtctgatctgcaattatctcagcaagatcatcccagccctacaatcacgttgcacccggttccgcttcggccctttgacccccgagctcatggtgccccgcctggaacacgtagtcgaagaggagaaagtggatatttcggaggacggcatgaaggctctggttacactgtcatccggcgatatgaggcgtgccctgaatatattgcaatccaccaatatggccttcgggaaagtgactgaagaaaccgtgtatacttgtactgggcaccccctgaaaagcgatatcgcaaatatcctcgattggatgctgaatcaggatttcactacggcttataggaacatcactgaattaaagacactcaagggcttggccctacacgatattcttaccgagatccatttgttcgtacatcgcgttgattttccatcttctgtacgaatccatctgttgaccaagatggcagatatcgaataccgcctcagcgttggaaccaacgaaaagatccagctcagttcccttatagcagctttccaggtcacgagggacctgatagtggccgaggcgtag

SEQ ID NO: 47791 - DNA, 768 bp, Artificial Sequence
  derived and/or modified sequence
atggtgctggagctgaatgccagtgatgaccggggcatcgacatcatccggggccccatcctgagctttgccagcaccaggaccatcttcaagaagggcttcaagctggtgatcctggatgaagcagatgccatgacccaggatgcccagaatgccctgcggcgggtgattgagaagttcacagagaacacccgcttctgcctgatctgcaactacctgagcaagatcatcccagccctgcagagccgctgcacccgcttccgcttcggccccctgaccccagagctgatggtgccccggctggagcacgtggtggaggaggagaaggtggacatcagtgaagatggcatgaaggccctggtgaccctgagcagcggggacatgagaagagccctgaacatcctgcagagcaccaacatggccttcggcaaggtgacagaggagaccgtgtacacctgcaccggccaccccctgaagagtgacatcgccaacatcctggactggatgctgaaccaggacttcaccacagcctacagaaacatcacagagctgaagaccctgaagggcctggccctgcatgacatcctgacagagatccacctgtttgtgcaccgggtggacttccccagctctgtgcgcatccacctgctgaccaagatggctgacatcgagtaccgcctgtctgtgggcaccaatgagaagatccagctgagcagcctgattgctgccttccaggtgacccgggacctgattgtggccgaggcctag

SEQ ID NO: 47792 - DNA, 768 bp, Artificial Sequence
  derived and/or modified sequence
atggtgctggagctgaacgccagcgacgaccggggcatcgacatcatccgcggcccaatactaagcttcgccagtacacggacaattttcaagaaggggttcaagctggtgatccttgacgaggcggacgctatgacccaggacgcacagaatgccctacgtagggtgatagaaaagttcacagagaataccagattctgtctcatttgcaactatttatcaaaaatcatccctgcacttcagtcccgctgcacccggtttcgttttggccctctcacaccggaactgatggtgcctcgcttggagcatgttgtggaagaagaaaaagtggatatttcggaagatggcatgaaagcgctggtgacactgtcatccggggacatgcgtagggccctaaacatcctgcagagtaccaacatggctttcggcaaagtaaccgaggagacggtttacacttgcacaggtcatcccctcaaaagtgacattgccaacattctggattggatgctgaatcaggactttacaacagcttatagaaacattaccgaattaaaaactttgaaaggtctggccttgcacgatatcctcaccgagattcacttgtttgtgcacagggtggacttcccatccagtgtgcgcatccatctactaacaaagatggcagacatcgagtaccgcctgagcgtggggacaaatgaaaaaatccaactgagtagcctgatagcagcattccaggtgacgcgggatcttatcgtcgccgaagcatag

SEQ ID NO: 47793 - DNA, 768 bp, Artificial Sequence
  derived and/or modified sequence
atggtgcttgaactgaacgccagcgatgacagagggatcgatattattcggggaccaatcctttccttcgcctcaacccgcacaattttcaaaaagggcttcaagctcgtgattttggatgaagccgacgcaatgacccaggacgcccaaaacgctttgcgcagggtgatagagaaattcaccgaaaatacaaggttctgcttgatttgcaattatctctccaagattatcccggctctgcagtctagatgtacccggtttagatttggacccctcacgcccgaactgatggtgccacgcctggagcacgttgtcgaagaagaaaaggtggatattagcgaagacggcatgaaggctctggtgacacttagcagtggggatatgcggagagcactcaatattctgcagtccacgaacatggcatttggaaaggttacagaggaaactgtatatacatgcaccggccatcccctgaagtctgatattgccaatattttggactggatgttgaaccaggacttcaccaccgcttaccgcaacattactgagctcaaaaccctgaaaggactagccctgcacgacatcctgacagaaattcacttattcgttcaccgagttgactttccatctagtgtcaggatccacctcctcacaaaaatggccgacatagaataccgcctgagcgtgggtactaatgagaagattcagctatcaagcctgatcgcggcatttcaagttactagagatctgatagtggccgaagcctag

SEQ ID NO: 47794 - protein, 915 aa, Artificial Sequence
  derived and/or modified sequence
MFHSSAMVNSHRKPMFNIHRGFYCLTAILPQICICSQFSVPSSYHFTEDPGAFPVATNGERFPWQELRLPSVVIPLHYDLFVHPNLTSLDFVASEKIEVLVSNATQFIILHSKDLEITNATLQSEEDSRYMKPGKELKVLSYPAHEQIALLVPEKLTPHLKYYVAMDFQAKLGDGFEGFYKSTYRTLGGETRILAVTDFEPTQARMAFPCFDEPLFKANFSIKIRRESRHIALSNMPKVSIYASPDKRNQTHYALQASLKLLDFYEKYFDIYYPLSKLDLIAIPDFAPGAMENWGLITYRETSLLFDPKTSSASDKLWVTRVIAHELAHQWFGNLVTMEWWNDIWLKEGFAKYMELIAVNATYPELQFDDYFLNVCFEVITKDSLNSSRPISKPAETPTQIQEMFDEVSYNKGACILNMLKDFLGEEKFQKGIIQYLKKFSYRNAKNDDLWSSLSNSCLESDFTSGGVCHSDPKMTSNMLAFLGENAEVKEMMTTWTLQKGIPLLVVKQDGCSLRLQQERFLQGVFQEDPEWRALQERYLWHIPLTYSTSSSNVIHRHILKSKTDTLDLPEKTSWVKFNVDSNGYYIVHYEGHGWDQLITQLNQNHTLLRPKDRVGLIHDVFQLVGAGRLTLDKALDMTYYLQHETSSPALLEGLSYLESFYHMMDRRNISDISENLKRYLLQYFKPVIDRQSWSDKGSVWDRMLRSALLKLACDLNHAPCIQKAAELFSQWMESSGKLNIPTDVLKIVYSVGAQTTAGWNYLLEQYELSMSSAEQNKILYALSTSKHQEKLLKLIELGMEGKVIKTQNLAALLHAIARRPKGQQLAWDFVRENWTHLLKKFDLGSYDIRMIISGTTAHFSSKDKLQEVKLFFESLEAQGSHLDIFQTVLETITKNIKWLEKNLPTLRTWLMVNT

SEQ ID NO: 47795 - protein, 960 aa, Artificial Sequence
  derived and/or modified sequence
MFHSSAMVNSHRKPMFNIHRGFYCLTAILPQICICSQFSVPSSYHFTEDPGAFPVATNGERFPWQELRLPSVVIPLHYDLFVHPNLTSLDFVASEKIEVLVSNATQFIILHSKDLEITNATLQSEEDSRYMKPGKELKVLSYPAHEQIALLVPEKLTPHLKYYVAMDFQAKLGDGFEGFYKSTYRTLGGETRILAVTDFEPTQARMAFPCFDEPLFKANFSIKIRRESRHIALSNMPKVKTIELEGGLLEDHFETTVKMSTYLVAYIVCDFHSLSGFTSSGVKVSIYASPDKRNQTHYALQASLKLLDFYEKYFDIYYPLSKLDLIAIPDFAPGAMENWGLITYRETSLLFDPKTSSASDKLWVTRVIAHELAHQWFGNLVTMEWWNDIWLKEGFAKYMELIAVNATYPELQFDDYFLNVCFEVITKDSLNSSRPISKPAETPTQIQEMFDEVSYNKGACILNMLKDFLGEEKFQKGIIQYLKKFSYRNAKNDDLWSSLSNSCLESDFTSGGVCHSDPKMTSNMLAFLGENAEVKEMMTTWTLQKGIPLLVVKQDGCSLRLQQERFLQGVFQEDPEWRALQERYLWHIPLTYSTSSSNVIHRHILKSKTDTLDLPEKTSWVKFNVDSNGYYIVHYEGHGWDQLITQLNQNHTLLRPKDRVGLIHDVFQLVGAGRLTLDKALDMTYYLQHETSSPALLEGLSYLESFYHMMDRRNISDISENLKRYLLQYFKPVIDRQSWSDKGSVWDRMLRSALLKLACDLNHAPCIQKAAELFSQWMESSGKLNIPTDVLKIVYSVGAQTTAGWNYLLEQYELSMSSAEQNKILYALSTSKHQEKLLKLIELGMEGKVIKTQNLAALLHAIARRPKGQQLAWDFVRENWTHLLKKFDLGSYDIRMIISGTTAHFSSKDKLQEVKLFFESLEAQGSHLDIFQTVLETITKNIKWLEKNLPTLRTWLMVNT

SEQ ID NO: 47796 - protein, 694 aa, Artificial Sequence
  derived and/or modified sequence
MFHSSAMVNSHRKPMFNIHRGFYCLTAILPQICICSQFSVPSSYHFTEDPGAFPVATNGERFPWQELRLPSVVIPLHYDLFVHPNLTSLDFVASEKIEVLVSNATQFIILHSKDLEITNATLQSEEDSRYMKPGKELKVLSYPAHEQIALLVPEKLTPHLKYYVAMDFQAKLGDGFEGFYKSTYRTLGGETRILAVTDFEPTQARMAFPCFDEPLFKANFSIKIRRESRHIALSNMPKVKTIELEGGLLEDHFETTVKMSTYLVAYIVCDFHSLSGFTSSGVKVSIYASPDKRNQTHYALQASLKLLDFYEKYFDIYYPLSKLDLIAIPDFAPGAMENWGLITYRETSLLFDPKTSSASDKLWVTRVIAHELAHQWFGNLVTMEWWNDIWLKEGFAKYMELIAVNATYPELQFDDYFLNVCFEVITKDSLNSSRPISKPAETPTQIQEMFDEVSYNKGACILNMLKDFLGEEKFQKGIIQYLKKFSYRNAKNDDLWSSLSNSCLESDFTSGGVCHSDPKMTSNMLAFLGENAEVKEMMTTWTLQKGIPLLVVKQDGCSLRLQQERFLQGVFQEDPEWRALQERYLWHIPLTYSTSSSNVIHRHILKSKTDTLDLPEKTSWVKFNVDSNGYYIVHYEGHGWDQLITQLNQNHTLLRPKDRVGLIHDVFQLVGAGRLTLDKALDMTYYLQHETSSP

SEQ ID NO: 47797 - DNA, 2748 bp, Artificial Sequence
  derived and/or modified sequence
atgtttcacagctcagccatggttaattcacaccgaaagcccatgttcaacattcaccgagggttttactgtctgactgccattttaccacagatctgcatttgctctcagttttctgttccttctagctatcatttcactgaagacccaggagcatttcccgtcgcaacaaacggagaacggtttccttggcaggaactacgcctcccctccgtcgtcatcccactgcactacgacctgtttgtccatcccaatctcacaagtttagatttcgttgcctcagaaaaaatcgaggttctggtttcaaacgctacccaattcatcattttgcactcgaaggacctggagatcactaatgccacacttcaaagcgaagaggactcaaggtatatgaaaccaggaaaggaattaaaggtgctttcataccctgctcatgaacagattgcactactggttcctgaaaaactgacaccacatctgaagtactatgtggccatggattttcaagcaaagctaggcgatggcttcgaaggattttacaagtccacatatcgcaccctggggggagaaacccggatcttggccgtgactgacttcgagccgacgcaggccaggatggcctttccttgcttcgacgagcccctgttcaaggcgaactttagtattaagatcaggcgcgaaagtagacatattgctctgtcaaacatgcctaaggtctccatttacgccagtccagataagcggaaccaaacgcattacgccctgcaggcttcactcaaactgttggacttctatgaaaagtactttgacatctactatcctctatcaaaactcgatctcatcgcgattccagatttcgcacctggtgccatggaaaattgggggctcatcacatatcgggagacatcactgctctttgatccaaagaccagctccgcctccgataaattatgggtgactcgcgtcattgctcatgaactggctcaccaatggttcggtaacctcgtgaccatggagtggtggaatgacatctggcttaaggagggctttgcaaagtacatggagttgattgctgtgaacgcgacctatccggagctccagtttgatgattattttcttaacgtatgtttcgaggtgatcaccaaagatagcctgaacagctcccgaccgatttctaaacccgccgagactccgacacagatccaagagatgttcgatgaggtctcttataataaaggagcttgtatcttgaacatgcttaaggactttctgggagaagagaaatttcagaaaggcatcatccaatatcttaaaaaatttagctatagaaacgccaagaatgacgatctgtggagttcgctcagcaactcttgccttgagagcgactttacgtctggtggcgtctgccactccgaccctaaaatgacatcaaacatgctggccttcctcggtgagaatgcagaagttaaagagatgatgacaacttggactctgcagaaggggattcccctgctcgtggtgaaacaggacggatgtagcctgagattgcaacaggagcggttcctgcagggagtgtttcaggaagatcccgagtggcgtgcactgcaggagaggtacttgtggcacattccacttacatattctacaagcagtagtaatgtaatccatcggcacatcctcaagtctaagacagataccctagatctccctgagaaaacatcatgggtcaagttcaacgtggactccaatggttactatatcgtacactacgaaggccacggttgggatcaactgatcacgcagctgaatcagaatcatactctgcttcggccaaaagatagggtgggcctgatccacgacgtgtttcagctggtcggcgccggtcgcttaaccttggacaaggcgctggatatgacatactacttacaacacgagacctcatcgcctgcgctcctcgaaggcttgagctatctcgaaagcttttatcacatgatggataggcggaatatctccgatatctctgagaacttaaagagatatttgcttcagtacttcaaacctgtgattgatcgccaatcatggagcgacaaggggagcgtatgggaccgtatgctgagaagcgctctcctgaaacttgcatgtgacctcaaccatgcgccttgcatacagaaagcggccgaactctttagtcagtggatggaatcaagcgggaaactgaatatccccaccgatgtgctcaagattgtgtattctgtcggagcacaaactacagcaggatggaattatttgctagaacagtacgagctgtcgatgagtagcgctgaacagaataaaatcttgtacgccctgtcaacatcaaagcatcaggagaaactcttgaagctgattgagctcgggatggaggggaaggtaatcaagacacagaacctggccgcgctgctgcatgctattgcacgtagacccaaaggacagcagctagcctgggacttcgtgagggagaattggactcaccttttgaaaaagtttgatcttggctcctacgatatacgcatgatcatctctggaactacagcccacttctcctctaaggataaactgcaagaggtgaaacttttttttgaatcgctggaggcccagggcagccacctggatatattccagacggtcctggaaacaatcacgaaaaacatcaagtggctggagaagaacttgccaaccctacgaacatggcttatggtaaacacctag

SEQ ID NO: 47798 - DNA, 2883 bp, Artificial Sequence
  derived and/or modified sequence
atgttccacagcagcgcaatggtgaacagtcatcgcaaaccaatgtttaacatacatcgggggttttactgcctcacagctatcctcccgcagatttgcatatgctcgcagttctcagtgccatcttcttaccacttcacagaggatccaggtgctttccctgtggcaaccaatggcgaacggttcccctggcaggaattacgcctgccctcagttgtgatacccctgcactacgacctgttcgtacaccccaaccttacctccttggacttcgtggcctcagagaaaatagaagtgttggtgagcaacgccactcagtttatcattctgcacagtaaggacctggagataactaacgccacgctccagagcgaggaagatagcaggtacatgaagcccggcaaagagttaaaagtgttgagctatcccgcccatgaacagatagccctgcttgtgcccgagaagttaacacctcacctgaagtactacgtggcgatggattttcaggcgaagctgggcgatgggtttgaggggttctataaaagcacctatcgcactctgggcggggaaactagaatattggcagtaacggacttcgagccaacccaggctcgaatggcctttccgtgttttgacgagccactgtttaaggcaaacttcagtataaagatccgccgggagtcacgccatatcgccctttctaatatgcctaaagttaagacaattgaactggagggcggattgcttgaagaccactttgagaccacggttaaaatgagcacttatcttgtggcatacattgtctgtgacttccattccttatccggttttacatcctcaggcgtgaaagtgtccatctacgcgtctcctgacaagcggaaccagacgcactacgcacttcaggcgtccctgaaactcctggatttctatgagaaatacttcgatatttattatcccttgagcaaattagatcttatcgctatccctgatttcgctccgggcgctatggaaaattggggtcttatcacctatcgcgagacatccctgctgttcgaccctaagacatcatcagcatccgataaactctgggtaacccgcgtaatcgcacatgaattggcccatcagtggtttggcaacctcgtcaccatggaatggtggaatgatatatggctgaaagagggattcgctaagtacatggaactgattgccgtcaatgctacttaccccgagctacagttcgacgattactttctgaatgtatgctttgaagtgattacaaaagattctctgaactctagccgtccaattagcaaacccgcagaaacacccacacagatccaggaaatgttcgacgaggttagctacaataagggagcctgcattctgaatatgctaaaggacttcttaggggaagaaaagttccagaaaggcattatccagtacctgaagaagtttagttacagaaacgctaaaaatgatgatttgtggtccagtctgagtaattcctgcttagagtccgatttcacttctggcggagtatgccatagtgaccccaaaatgaccagtaatatgctagcttttcttggggagaacgccgaggtcaaagaaatgatgactacctggacactccaaaagggaattccactgctggtcgtgaagcaggacggatgtagtctccgcctccagcaggaaagattcctacagggggtattccaagaggatcccgagtggcgggctctgcaagagcggtatctgtggcatataccactgacctatagtacatcatcgagcaatgtgattcaccgacatatcctcaaatctaaaactgatacgctggatctgccagagaaaacatcctgggtgaagtttaacgtggattccaacggttactatatcgttcattacgaaggccatggctgggatcagctgattacccagctcaatcaaaaccacacactgctccggcctaaagaccgcgttggccttatccacgatgttttccagctggtaggcgccgggagactgactcttgacaaagctttggacatgacgtactatctccagcatgaaactagcagccccgcactgttggaagggctgtcgtatctggaatccttctatcacatgatggatcgccggaacatttccgacatttccgaaaaccttaaacggtacctgttacagtacttcaaacctgttattgatcgtcagtcctggtccgacaagggctccgtctgggatagaatgctgagatctgccctcttaaagctggcatgtgacctgaatcacgcaccatgcatccagaaagctgcagagttgttttcgcagtggatggagagcagtggcaaactcaacatccccacagacgtacttaaaattgtgtacagcgttggcgcgcaaacgactgccggctggaactacctgctggagcaatacgagttgagcatgtcctccgctgagcagaataaaatcctttacgccctatctaccagtaaacaccaggagaaattattaaagcttatagaacttggaatggagggaaaagtaatcaaaacgcaaaacctggctgccctactgcatgctattgcccggcgtcccaagggacagcagcttgcctgggactttgtccgcgagaactggacacaccttcttaaaaaattcgatctggggagctacgatattagaatgatcatcagtggcacaacggctcatttctctagcaaggacaaactacaggaggtcaaattgttttttgagagtcttgaggcccagggatcccacctcgatatatttcagacagtactggagacaattacgaagaacatcaaatggctggagaaaaatctccctacattacgcacctggctcatggtgaacacttag

SEQ ID NO: 47799 - DNA, 2085 bp, Artificial Sequence
  derived and/or modified sequence
atgtttcactccagcgccatggtgaattcgcatcgcaagcccatgtttaatatccacaggggtttctattgtctgaccgccattctcccacaaatttgcatctgttcccagttctcagtcccctcctcctaccatttcaccgaggatcccggtgcttttcctgtcgcgaccaatggcgagagattcccctggcaggaattaagattgcccagtgtggtaatccctctccactacgacctgttcgttcacccaaatctgacatctctcgactttgtcgcttccgagaaaatcgaggtgctagtgagcaatgcaacgcagttcattatcctccacagcaaggacctggaaattacaaacgcaacccttcagtccgaggaagatagcaggtatatgaaacctggaaaggagctcaaagtgctttcttatcctgcacatgaacaaatcgccctcctggtccccgagaaactcactccacacctgaaatactacgtggcgatggattttcaagccaagctcggagatggctttgagggattctataaatccacgtatcgcactttgggaggcgagacccggatcctggccgttacggattttgaacctactcaggctcggatggctttcccatgtttcgatgaaccactttttaaggctaattttagcataaagattcggagggaaagcaggcatattgccctttcaaatatgcccaaggtgaaaactatcgagctggagggcggtctactggaggaccattttgagaccacagttaagatgagtacttatctggtcgcatatatcgtttgcgacttccatagcctgagcggattcacgagtagcggcgtgaaggtcagcatatatgcttccccggataagagaaatcaaacccattatgcactgcaggcctccctgaagctactcgatttttatgagaagtacttcgatatttactatcccctttctaagctggatctgatagctatccctgacttcgctccaggggccatggagaactgggggctgatcacatatcgggagacttcgctgctgttcgaccctaaaacaagttccgccagcgacaaactgtgggtcaccagagtcatcgcccatgaactcgcacaccagtggttcggtaacctcgtgacgatggagtggtggaatgatatatggttaaaggaagggttcgctaaatacatggaacttatagccgtcaatgctacataccctgagctgcagttcgacgactacttccttaatgtgtgcttcgaagtaatcacaaaggatagtctcaattcgtcccgacctatcagcaagcccgccgagacccctacacagatccaggagatgttcgacgaagtgtcgtataacaagggtgcgtgtattctgaatatgcttaaagacttcttgggcgaagaaaagtttcaaaaggggattatacagtacctaaaaaaattcagctatagaaatgcaaaaaatgatgatctttggtctagcttgagtaacagttgtctggagtctgacttcacctccgggggtgtgtgccattcggatccgaagatgacgtctaatatgctggctttcttgggagaaaatgccgaggtgaaagaaatgatgaccacctggacactccagaaaggcatcccacttctggtggtgaagcaagacggctgcagtctccggctccagcaagagaggttcctgcaaggagtgtttcaggaagatcctgagtggagggcactgcaggaacgctacttatggcatatcccactaacatattctacttctagttcgaacgttattcacagacacattctcaagtccaagactgacacattggacctgcctgagaagaccagttgggttaaattcaatgtggattctaatggttactacattgtccattatgaggggcacggatgggatcaattaatcacacagctgaaccagaaccacacacttctgcgcccaaaagatagggtaggcctgattcatgatgtgttccaactggtgggagcaggtcgactcacattagataaagcattggatatgacttactatctgcagcatgaaacctcctccccctag

SEQ ID NO: 47800 - DNA, 2748 bp, Artificial Sequence
  derived and/or modified sequence
atgttccacagcagcgccatggtgaacagccacaggaagcccatgttcaacatccaccggggcttctactgcctgacagccatcctgccccagatctgcatctgcagccagttctctgtgcccagcagctaccacttcacagaggaccccggggccttccctgtggccaccaacggggagcgcttcccctggcaggagctgcggctgcccagcgtggtgatccccctgcactatgacctgtttgtgcaccccaacctgaccagcctggactttgtggccagcgagaagattgaggtgctggtgtccaatgccacccagttcatcatcctgcacagcaaggacctggagatcaccaatgccaccctgcagagcgaggaggacagccgctacatgaagccaggcaaggagctgaaggtgctgagctacccagcccacgagcagatcgccctgctggtgcctgagaagctgaccccccacctgaagtactacgtggccatggacttccaggccaagctgggagatggctttgagggcttctacaagagcacctaccgcaccctgggcggggagacccgcatcctggccgtgacagactttgagcccacccaggccaggatggccttcccctgctttgatgagcccctcttcaaggccaacttcagcatcaagatcagaagagagagccgccacatcgccctgagcaacatgcccaaggtgtccatctatgccagcccagacaagaggaaccagacccactacgccctgcaggccagcctgaagctgctggacttctatgagaagtactttgacatctactaccccctgagcaagctggacctgattgccatcccagactttgcccctggggccatggagaactggggcctcatcacctaccgggagaccagcctgctgtttgaccccaagaccagcagcgccagtgacaagctgtgggtgaccagggtgattgcccacgagctggcccaccagtggtttggaaacctggtgaccatggagtggtggaatgacatctggctgaaggagggctttgccaagtacatggagctgattgctgtgaatgccacctacccagagctgcagtttgatgactacttcctgaatgtgtgctttgaagtcatcaccaaggacagcctgaacagcagccggcccatcagcaagccagctgagacccccacccagatccaggagatgtttgatgaggtgtcctacaacaagggggcctgcatcctgaacatgctgaaggacttcctgggggaggagaagttccagaagggcatcatccagtacctgaagaagttctcctacagaaatgccaagaatgatgacctgtggagcagcctgagcaacagctgcctggagagtgacttcaccagcggaggagtgtgccacagcgaccccaagatgaccagcaacatgctggccttcctgggagaaaatgctgaggtgaaggagatgatgaccacctggaccctgcagaagggcatccccctgctggtggtgaagcaggacggctgcagcctgcggctgcagcaggagcgcttcctgcagggcgtcttccaggaggaccctgagtggagggccctgcaggagcgctacctgtggcacatccccctgacctacagcaccagcagcagcaatgtcatccaccgccacatcctgaagagcaagacagacaccctggacctgcctgagaagacctcctgggtgaagttcaacgtggacagcaatggctactacatcgtgcactatgagggccacggctgggaccagctgatcacccagctgaaccagaaccacaccctgctgcggcccaaggacagagtgggcctcatccatgatgtgttccagctggtgggcgccggccgcctgaccctggacaaggccctggacatgacctactacctgcagcacgagaccagcagccctgccctgctggagggcctgagctacctggagagcttctaccacatgatggacagaagaaacatcagtgacatcagcgagaacctgaagcgctacctgctgcagtacttcaagcctgtgattgaccggcagagctggagcgacaagggctctgtgtgggacaggatgctgcggagcgccctgctgaagctggcctgtgacctgaaccacgccccctgcatccagaaggctgctgagctgttcagccagtggatggagagcagcggcaagctgaacatccccacagatgtgctgaagatcgtgtacagcgtgggcgcccagaccacagctggctggaactacctgctggagcagtatgagctgtccatgagcagcgctgagcagaacaagatcctgtatgccctgagcaccagcaagcaccaggagaagctgctgaagctgattgagctgggcatggagggcaaggtgatcaagacccagaacctggccgccctgctgcacgccatcgcccggcggcccaagggccagcagctggcctgggactttgtgcgggagaactggacccacctgctgaagaagtttgacctgggcagctatgacatccgcatgatcatcagcggcaccacagcccacttcagcagcaaggacaagctgcaggaggtgaagctgttctttgagagcctggaggcccagggcagccacctggacatcttccagacagtgctggagaccatcaccaagaacatcaagtggctggagaagaacctgcccaccctgcggacctggctgatggtgaacacctag

SEQ ID NO: 47801 - DNA, 2883 bp, Artificial Sequence
  derived and/or modified sequence
atgttccacagcagcgccatggtgaacagccacaggaagcccatgttcaacatccaccggggcttctactgcctgacagccatcctgccccagatctgcatctgcagccagttctctgtgcccagcagctaccacttcacagaggaccccggggccttccctgtggccaccaacggggagcgcttcccctggcaggagctgcggctgcccagcgtggtgatccccctgcactatgacctgtttgtgcaccccaacctgaccagcctggactttgtggccagcgagaagattgaggtgctggtgtccaatgccacccagttcatcatcctgcacagcaaggacctggagatcaccaatgccaccctgcagagcgaggaggacagccgctacatgaagccaggcaaggagctgaaggtgctgagctacccagcccacgagcagatcgccctgctggtgcctgagaagctgaccccccacctgaagtactacgtggccatggacttccaggccaagctgggagatggctttgagggcttctacaagagcacctaccgcaccctgggcggggagacccgcatcctggccgtgacagactttgagcccacccaggccaggatggccttcccctgctttgatgagcccctcttcaaggccaacttcagcatcaagatcagaagagagagccgccacatcgccctgagcaacatgcccaaggtgaagaccatcgagctggagggcggcctgctggaggaccactttgagaccaccgtgaagatgagcacctacctggtggcctacatcgtgtgtgacttccacagcctgagcggcttcaccagcagcggcgtgaaggtgtccatctatgccagcccagacaagaggaaccagacccactacgccctgcaggccagcctgaagctgctggacttctatgagaagtactttgacatctactaccccctgagcaagctggacctgattgccatcccagactttgcccctggggccatggagaactggggcctcatcacctaccgggagaccagcctgctgtttgaccccaagaccagcagcgccagtgacaagctgtgggtgaccagggtcatcgcccacgagctggcccaccagtggtttggaaacctggtgaccatggagtggtggaatgacatctggctgaaggagggctttgccaagtacatggagctgattgctgtgaatgccacctacccagagctgcagtttgatgactacttcctgaatgtgtgctttgaggtgatcaccaaggacagcctgaacagcagccggcccatcagcaagccagctgagacccccacccagatccaggagatgtttgatgaggtgtcctacaacaagggggcctgcatcctgaacatgctgaaggacttcctgggggaggagaagttccagaagggcatcatccagtacctgaagaagttctcctacagaaatgccaagaatgatgacctgtggagcagcctgagcaacagctgcctggagagtgacttcaccagcggcggcgtgtgccacagcgaccccaagatgaccagcaacatgctggccttcctgggggagaatgctgaggtgaaggagatgatgaccacctggaccctgcagaagggcatccccctgctggtggtgaagcaggacggctgcagcctgcggctgcagcaggagcgcttcctgcagggcgtcttccaggaggaccctgagtggagggccctgcaggagcgctacctgtggcacatccccctgacctacagcaccagcagcagcaatgtcatccaccgccacatcctgaagagcaagacagacaccctggacctgcctgagaagacctcctgggtgaagttcaacgtggacagcaatggctactacatcgtgcactatgagggccacggctgggaccagctgatcacccagctgaaccagaaccacaccctgctgcggcccaaggacagagtgggcctcatccatgatgtgttccagctggtgggcgccggccgcctgaccctggacaaggccctggacatgacctactacctgcagcacgagaccagcagccctgccctgctggagggcctgagctacctggagagcttctaccacatgatggacagaagaaacatcagtgacatcagcgagaacctgaagcgctacctgctgcagtacttcaagcctgtgattgaccggcagagctggagcgacaagggctctgtgtgggacaggatgctgcggagcgccctgctgaagctggcctgtgacctgaaccacgccccctgcatccagaaggctgctgagctgttcagccagtggatggagagcagcggcaagctgaacatccccacagatgtgctgaagatcgtgtacagcgtgggcgcccagaccacagctggctggaactacctgctggagcagtatgagctgtccatgagcagcgctgagcagaacaagatcctgtatgccctgagcaccagcaagcaccaggagaagctgctgaagctgattgagctgggcatggagggcaaggtgatcaagacccagaacctggccgccctgctgcacgccatcgcccggcggcccaagggccagcagctggcctgggactttgtgcgggagaactggacccacctgctgaagaagtttgacctgggcagctatgacatccgcatgatcatcagcggcaccacagcccacttcagcagcaaggacaagctgcaggaggtgaagctgttctttgagagcctggaggcccagggcagccacctggacatcttccagacagtgctggagaccatcaccaagaacatcaagtggctggagaagaacctgcccaccctgcggacctggctgatggtgaacacctag

SEQ ID NO: 47802 - DNA, 2085 bp, Artificial Sequence
  derived and/or modified sequence
atgttccacagcagcgccatggtgaacagccacaggaagcccatgttcaacatccaccggggcttctactgcctgacagccatcctgccccagatctgcatctgcagccagttctctgtgcccagcagctaccacttcacagaggaccccggggccttccctgtggccaccaacggggagcgcttcccctggcaggagctgcggctgcccagcgtggtgatccccctgcactatgacctgtttgtgcaccccaacctgaccagcctggactttgtggccagcgagaagattgaggtgctggtgtccaatgccacccagttcatcatcctgcacagcaaggacctggagatcaccaatgccaccctgcagagcgaggaggacagccgctacatgaagccaggcaaggagctgaaggtgctgagctacccagcccacgagcagatcgccctgctggtgcctgagaagctgaccccccacctgaagtactacgtggccatggacttccaggccaagctgggagatggctttgagggcttctacaagagcacctaccgcaccctgggcggggagacccgcatcctggccgtgacagactttgagcccacccaggccaggatggccttcccctgctttgatgagcccctcttcaaggccaacttcagcatcaagatcagaagagagagccgccacatcgccctgagcaacatgcccaaggtgaagaccatcgagctggagggcggcctgctggaggaccactttgagaccaccgtgaagatgagcacctacctggtggcctacatcgtgtgtgacttccacagcctgagcggcttcaccagcagcggcgtgaaggtgtccatctatgccagcccagacaagaggaaccagacccactacgccctgcaggccagcctgaagctgctggacttctatgagaagtactttgacatctactaccccctgagcaagctggacctgattgccatcccagactttgcccctggggccatggagaactggggcctcatcacctaccgggagaccagcctgctgtttgaccccaagaccagcagcgccagtgacaagctgtgggtgaccagggtcatcgcccacgagctggcccaccagtggtttggaaacctggtgaccatggagtggtggaatgacatctggctgaaggagggctttgccaagtacatggagctgattgctgtgaatgccacctacccagagctgcagtttgatgactacttcctgaatgtgtgctttgaggtgatcaccaaggacagcctgaacagcagccggcccatcagcaagccagctgagacccccacccagatccaggagatgtttgatgaggtgtcctacaacaagggggcctgcatcctgaacatgctgaaggacttcctgggggaggagaagttccagaagggcatcatccagtacctgaagaagttctcctacagaaatgccaagaatgatgacctgtggagcagcctgagcaacagctgcctggagagtgacttcaccagcggcggcgtgtgccacagcgaccccaagatgaccagcaacatgctggccttcctgggggagaatgctgaggtgaaggagatgatgaccacctggaccctgcagaagggcatccccctgctggtggtgaagcaggacggctgcagcctgcggctgcagcaggagcgcttcctgcagggcgtcttccaggaggaccctgagtggagggccctgcaggagcgctacctgtggcacatccccctgacctacagcaccagcagcagcaatgtcatccaccgccacatcctgaagagcaagacagacaccctggacctgcctgagaagacctcctgggtgaagttcaacgtggacagcaatggctactacatcgtgcactatgagggccacggctgggaccagctgatcacccagctgaaccagaaccacaccctgctgcggcccaaggacagagtgggcctcatccatgatgtgttccagctggtgggcgccggccgcctgaccctggacaaggccctggacatgacctactacctgcagcacgagaccagcagcccctag

SEQ ID NO: 47803 - DNA, 2748 bp, Artificial Sequence
  derived and/or modified sequence
atgttccacagcagcgccatggtgaacagccaccggaagcccatgttcaacatccaccgcggcttttactgtctcaccgccatcttacctcaaatttgcatttgtagccagttttccgtcccctcttcttaccattttaccgaagaccccggggccttccctgtcgcaactaacggtgagcgatttccttggcaggaactcagactgccttccgtcgtaatcccccttcactatgatctgtttgtgcaccccaacctcacatcattggatttcgttgccagtgagaaaatagaagtgctagtctcaaatgcaacgcagtttatcatccttcatagcaaggacctcgagatcaccaacgctactctgcaatcagaggaagattccagatatatgaaacctggcaaagagctgaaagtgctgagttaccccgctcacgagcaaattgccctgttagtccccgaaaaactcactcctcacttgaagtattatgtggccatggacttccaggccaaactcggggacggctttgagggtttttacaaaagcacatacagaacacttgggggtgagaccagaattcttgctgttacagactttgaacccacccaagctcgaatggcattcccatgcttcgacgagcctctgttcaaggccaacttcagtattaaaattaggagggagagcagacatatcgccttatctaacatgcctaaagttagcatatacgcctctcccgacaaaagaaaccagacccactatgcccttcaggcaagcttaaaactcttagacttttatgagaaatactttgatatttactatcccctgtcaaaactagatttgatcgccattcctgacttcgcccccggcgctatggagaattggggactgataacttatagggagacaagcctgttatttgaccctaagacaagctcagcgtcagacaaactgtgggtaactagagtgatcgctcatgaactggcccaccagtggttcgggaatctcgtcaccatggagtggtggaacgatatttggttgaaagaaggctttgcaaaatatatggagttaattgcagtgaacgctacataccccgagctgcagtttgacgactattttctgaatgtttgttttgaggtaattacaaaggacagtctgaatagctcaaggcccatctctaagccagctgagactcccacacaaatccaggagatgttcgatgaggtcagttacaataagggcgcctgcattctcaacatgctgaaggattttcttggagaggagaaatttcaaaagggcattatacagtatctgaagaagtttagctacaggaacgcgaagaacgacgatctgtggtcatccctgagtaatagctgcctggaatctgacttcacctccggcggggtctgtcacagtgatccaaagatgaccagtaatatgctggcattcttaggcgagaacgccgaggtcaaggaaatgatgaccacgtggacgctgcagaaggggatccctctattagttgttaaacaggatggctgcagcttaaggcttcagcaagagagattcctgcagggcgtttttcaggaggatcctgagtggcgcgcccttcaggagcggtacctttggcatatcccattgacctattccacgagttcgtctaacgtcattcaccgtcacattcttaaatctaagaccgacacccttgatttgcccgaaaaaaccagttgggtaaaatttaacgtggatagcaacggatactatatcgtgcattacgagggacatggatgggatcagctgatcactcaacttaaccagaaccacaccctgttgcgtccgaaggacagggtgggcctaatacacgacgtgttccagttagtgggggcaggacgattgactctggataaggccttggatatgacttactatctgcaacatgagacatcttcccctgccctgctggaaggcctgtcttatcttgaatcattttaccacatgatggataggaggaacatttcagacatttccgaaaaccttaaacgctacctgctccaatactttaagcccgtcatcgatagacaatcttggtcagacaagggcagcgtatgggataggatgctcaggtccgctctgttaaagctggcatgcgatctgaaccacgccccctgtattcaaaaagccgccgagctgttttcccaatggatggaatcatccggtaaactcaacatacctacggacgtactgaaaatagtgtatagcgtgggcgcgcagacaacggcggggtggaactacttgctggagcagtacgagctgagtatgtcgtctgccgaacagaacaaaatcctctacgcattgagcacatcaaaacaccaggagaaactccttaaacttatagagctgggcatggagggcaaggtgataaagacacagaaccttgcagcactcctgcacgctatcgccagaagacctaaaggccagcagctggcatgggattttgtgcgcgagaattggactcatctcctgaaaaagtttgacctagggtcgtacgacatacgtatgatcatcagcggtacaactgcccatttctcctccaaagataaactccaggaggtgaaactcttcttcgagagcctagaggcccagggtagccatctggacatttttcagacagtcttggagaccataactaagaacataaagtggctcgagaagaacctgcccaccctccgcacgtggttgatggtaaacacatag

SEQ ID NO: 47804 - DNA, 2883 bp, Artificial Sequence
  derived and/or modified sequence
atgttccacagcagcgccatggtgaacagccaccggaagcccatgttcaacatccatcgggggttttactgtctgactgccatcctgcctcagatatgtatttgcagtcagttttccgtccccagctcataccactttaccgaggacccaggagcattcccagttgccactaatggagaacgcttcccatggcaggaactaagactgcctagtgtggtgattcccttacactatgatttattcgttcaccccaatttaacctcgctcgactttgtcgcttcagaaaaaattgaagtgctggtgtccaatgcaacccaatttatcatcctgcattccaaagatttggaaataactaacgcaacactccagtctgaagaagattccagatacatgaaacccggcaaggaactgaaggtcctctcttacccagcgcatgagcagatcgctctcctggtgcccgagaaactcaccccccatttaaagtattacgttgctatggacttccaggccaagttgggtgacggcttcgaagggttctataaatccacctataggaccctggggggtgagactcgcattttggctgttaccgacttcgagcctacgcaagctcggatggcattcccgtgcttcgacgagccattgtttaaagctaacttttcgataaaaattcgcagggagtctcggcatattgccttaagcaatatgcccaaagttaagaccattgagctcgagggaggcctgctagaggatcatttcgagaccaccgttaagatgtccacatatcttgtggcctacattgtttgcgattttcatagcctgtctggatttactagtagcggagtcaaagtatcaatttacgcgtcccctgataagagaaaccaaacccactatgccctccaggcttctctgaaattactggatttctatgaaaaatactttgacatctactatcccttaagtaagctagatcttatcgccatcccagactttgcccctggagctatggagaattggggcttgattacatatcgcgaaacttcgctgctctttgacccaaaaacctcatctgcttcagataagctctgggttaccagagtgattgcccacgaactcgcccaccagtggttcggcaatctggttaccatggaatggtggaacgacatctggctgaaggagggttttgcaaagtatatggagttgattgcggtgaacgctacttatccagagctgcagtttgatgactactttttaaatgtgtgttttgaagtcataacaaaagacagtttaaattcatccagacctatctcgaaacccgccgagaccccaacacagatccaagagatgttcgatgaggtatcatataataaaggcgcctgcattctgaacatgctgaaggattttctgggcgaggaaaaattccagaagggaattattcagtacctgaagaaattcagctaccgcaacgccaagaatgatgacctctggtcaagtctctccaattcttgcctggaatctgatttcacatccggaggcgtttgtcattcagatcctaaaatgaccagcaacatgctcgcctttttgggagagaacgccgaggtcaaggagatgatgacaacctggaccttgcagaagggcattcccctgctggttgtgaaacaggatggctgctcgttgagactgcagcaggagaggttcttgcagggtgtgttccaagaagaccccgagtggcgggctctgcaggaacgctacctttggcacattcctctgacttactcaaccagcagctccaatgtgatccatagacatattctcaagtctaagaccgatactctggaccttccggagaaaacgagctgggtgaaatttaatgtggactccaatggttactacatagtccattacgaggggcatggatgggatcagttgatcactcagctgaaccagaatcacaccctgttgcggccgaaggatagagtcggtttgattcacgatgtcttccaactcgttggcgctgggaggctcacactcgacaaggccttggatatgacctattatctgcagcatgagacctccagccctgctctgctggaagggctgtcatatctggagagcttctaccacatgatggataggcggaacatctctgacatctcagaaaatcttaagcggtacttactgcaatactttaaaccagtgattgacaggcagtcctggagtgacaaaggctccgtgtgggatcgtatgctccggtcggcccttttgaagttagcttgtgacttgaaccatgccccctgcatccagaaggccgctgaactattttctcaatggatggaatcttctgggaaattgaatattccgacagatgtgctgaagatagtatactctgttggcgcccagaccactgccggatggaattacttgctggagcagtatgagttgagtatgtccagtgccgagcagaacaagatcttatacgcactcagcaccagcaagcaccaggagaagctgctcaagctcattgagctgggcatggagggcaaagtgattaagacgcagaatctagccgctctgctccacgcaatagcccgacggccaaaggggcagcagctggcatgggattttgttagggagaactggactcatttgctcaaaaaatttgatcttggctcgtacgacattaggatgattattagtggaaccacggcccacttttcttccaaggataagctacaagaggttaaactattttttgagtcccttgaggcccaagggtcccacctggacatttttcagactgtcctggagactattaccaagaatataaaatggctggaaaaaaatctgccgactctgcgtacctggctgatggtgaacacctag

SEQ ID NO: 47805 - DNA, 2085 bp, Artificial Sequence
  derived and/or modified sequence
atgttccacagcagcgccatggtgaacagccaccggaagcccatgttcaatatccacaggggcttttattgcctgaccgctatcctgccgcagatttgcatctgtagtcagttttccgtgccttctagctaccacttcactgaagatcccggagcgttccccgtcgcaacaaacggagagagattcccttggcaggagctgaggttaccaagcgttgtcattcccttgcactacgacctctttgttcatcccaatctaactagtttagacttcgttgcctctgaaaagatcgaggtgcttgtcagtaatgcgacccaattcatcatcttacattccaaggacctggaaatcaccaatgccactcttcagagcgaggaggattccaggtacatgaagccaggtaaagaacttaaggttttgtcgtaccctgcccacgagcagatcgccttgctggtaccagaaaaactcacaccgcacttaaaatattacgtggccatggactttcaggctaaattgggcgatggctttgaggggttctacaagagtacttacaggacactcggcggggagacacgaatcttagctgtgacagatttcgagcctactcaagcaaggatggcctttccttgtttcgatgaacccctgtttaaggccaacttttcaatcaagattcgacgtgaatccagacatatagcattgagtaacatgcccaaggtgaagacaatcgaattagaggggggtctgttggaagatcatttcgagaccaccgtgaagatgagcacatacctggttgcttacatcgtatgcgactttcacagcttaagtgggtttacatctagcggcgttaaagtctcgatttatgccagccctgataaaaggaaccaaacccattacgccctgcaagcatcccttaagttgctcgacttctatgagaaatattttgatatttattaccccctgagcaagttagatttaatcgctattccagacttcgctccaggtgctatggaaaattgggggcttattacctaccgtgagactagtctgcttttcgatcccaagacctcctcagcctctgataaattatgggtgacaagagtaatcgcacacgagttggcacaccagtggttcggcaatctcgtcaccatggagtggtggaatgatatctggctgaaagaagggtttgccaaatatatggaactgatcgccgtgaatgccacttaccctgagcttcagttcgacgactacttcctgaatgtgtgctttgaagtcatcacgaaggactcactcaactcctcaagaccaattagtaagcccgccgagacaccgacccaaattcaggagatgtttgacgaggtgtcctataataaaggcgcctgtatactcaatatgctgaaagattttcttggtgaggagaaattccagaaagggattatccaatatcttaagaaattttcctatcgcaacgcaaagaacgacgacctgtggagctctcttagcaactcctgtttggagagtgactttacaagtggaggggtgtgtcatagcgacccaaagatgaccagcaacatgctcgccttccttggtgagaatgcagaggttaaagaaatgatgactacgtggacgctccaaaagggaatcccactgctggtcgtaaagcaggatgggtgtagtctgcgcctccagcaggaacgcttccttcagggcgtgtttcaggaggaccctgagtggcgggctctgcaggagcgctacctatggcacattcccctgacttactcaactagttcatcgaacgtaatccataggcacattctcaagagcaaaaccgacacccttgatctccccgaaaagacttcatgggttaagttcaacgttgacagcaatggctactatatagtccattatgagggccacggttgggatcaactgatcacccagctaaatcagaaccatactttgctgcgacccaaggatcgggtcggcctgatacatgatgtgtttcaattagtgggcgcaggccggctcacactggacaaagccctggatatgacgtattacctgcagcacgaaacctccagcccttag

SEQ ID NO: 47806 - DNA, 2748 bp, Artificial Sequence
  derived and/or modified sequence
atgttccattcctctgccatggtgaactcacatagaaagccgatgttcaacatacatcggggtttctattgtctgactgccattttgccccaaatttgtatttgcagccaattttctgttccatcgtcctatcattttaccgaggaccctggcgcattccctgtcgccacaaacggcgagagatttccatggcaggaactcaggctgccgtctgtcgtgataccactccactacgatttgtttgtgcatccaaacctgaccagtctcgattttgtagcatcagaaaagatcgaagttctggtgtcaaatgccacacagttcataattttgcattccaaggatctggagattactaacgcgacactgcagtcagaggaagactccagatacatgaagcccggaaaggaactcaaagtgctcagttaccctgctcacgaacagattgcattactggtcccagagaaactgactccacacctcaaatactacgtagctatggacttccaggcaaaactcggagacggcttcgagggtttttacaagagtacctatagaacactggggggtgagacaagaattctcgcggttaccgacttcgagcccacgcaggccaggatggcgttcccttgctttgacgagcctctcttcaaagctaatttcagcatcaagatcaggcgtgagagtcggcacatagccctgtctaatatgcccaaggtcagtatttacgcctctccagacaaacggaaccagacgcattatgccttacaggccagtctgaagctgctggacttttacgaaaagtacttcgatatatactaccctctgagcaaactcgatctgatcgctattcctgacttcgccccaggtgcaatggaaaactgggggttaattacatatagagaaacctctctactttttgaccctaagacctcttctgctagtgataaactttgggtgacgcgggttatcgcacacgaacttgcacaccaatggtttggcaatctggtcactatggagtggtggaatgatatttggcttaaggaggggttcgcgaaatatatggagctaatagcagtcaacgctacataccctgagctccagtttgatgattactttcttaacgtgtgcttcgaggtaatcacaaaagacagccttaacagcagcagacccatttccaaaccagccgagacccccacccagattcaggaaatgtttgatgaggtgtcctacaacaaaggcgcatgcatcctgaacatgctaaaagactttctgggcgaagaaaagtttcagaaaggcatcatacagtacttaaaaaaattttcctacagaaacgccaagaatgacgacctgtggagctccctgtctaacagttgcctggaatctgattttacgtccggtggcgtgtgccactccgatccgaagatgaccagcaacatgctagccttcctgggagagaacgccgaggttaaagaaatgatgactacgtggaccttacagaaggggatccccctccttgtcgtgaaacaggatggttgctcgttgcgcctgcagcaggaacggttcttacagggggtcttccaggaggaccctgagtggcgagctctgcaggaacggtacttatggcacattccactcacttatagcacatcctcctcgaatgtgatacaccgacacatcctgaaatcgaaaacggacactctggatctacccgagaaaacctcgtgggtcaaatttaacgtggactctaacgggtattacatagtacactatgaaggccatgggtgggatcaactgatcacccagctcaatcaaaaccatactttactgcgtccaaaagaccgcgtagggctgattcatgacgttttccagctcgtaggggctggcagactgaccctggacaaggctctcgacatgacctattacctccagcacgagacatcctcacctgcccttctggagggactgtcatatctggagagcttctaccatatgatggacaggcgcaacatctccgacatttccgaaaacctcaagcgctacctgcttcagtactttaaacctgttattgatcgtcagagttggtcggacaaaggaagcgtgtgggacagaatgctgagatctgccctgctcaagctcgcctgtgatttgaatcatgcgccttgtattcagaaagccgcagagctgttctcccagtggatggagtcctccggcaagctgaacataccaacagacgtccttaagatagtttactctgtgggtgcacagacgacggccggatggaactatctgcttgagcagtacgaactcagcatgagctctgcggagcagaataagatcctgtacgctctctcaacttccaaacaccaggagaaactgttaaaacttatcgagctggggatggaagggaaagtcataaagacgcagaatctggcagctttgctgcatgccattgccagacgcccaaaaggacaacagctggcttgggattttgtgcgcgaaaactggacccatctgctgaaaaaatttgacttaggctcttatgacattagaatgataatctccggcacaactgcacattttagcagcaaggacaaactccaggaggtgaaactgttctttgaaagccttgaggctcagggttcccatctcgacattttccagacagtgttagagacaatcaccaaaaatataaaatggctggagaaaaacctgcctacactgcgcacttggctcatggtgaacacctag

SEQ ID NO: 47807 - DNA, 2883 bp, Artificial Sequence
  derived and/or modified sequence
atgtttcattcgagtgccatggtgaactcgcacagaaaacccatgtttaacatccacagaggattttattgtctcacggccattcttccacaaatctgtatttgttcccaattttctgtgccctcttcgtaccacttcactgaggacccaggcgctttccctgtcgccactaacggtgagaggtttccgtggcaggagcttcgcctgccttcagtcgtgattcccctccactatgacctgttcgtgcaccctaatctgacttccctggacttcgtcgcctccgagaagatagaggtgctggtgtcaaacgccacgcagttcattatcttgcactcaaaggacctggaaatcaccaatgccacattacaaagcgaagaggactctagatacatgaaacctggaaaggagctaaaagtgctgtcttacccggctcatgagcaaattgcgcttctagtcccagaaaagttaaccccacatctgaaatattatgtggctatggatttccaggccaaactaggcgacggatttgagggcttttataagagtacttaccgcaccttaggtggagaaactcgcattttagcggtcaccgatttcgagcccacccaggccaggatggcatttccatgttttgacgagcccttatttaaagctaatttctcaatcaagatccgaagggagtccagacacattgccctttccaacatgcctaaagttaaaaccatagagttggaaggtggcctcctagaagaccatttcgagaccacagtaaaaatgagtacttaccttgtggcctacattgtgtgcgatttccactcactgagcggctttacttccagtggagtcaaggtgtccatttacgcttctccagataaacggaatcagacccattacgcactgcaagctagcctgaagctgctggatttctacgaaaagtacttcgacatatactaccctctaagcaagctagatctcattgccataccagatttcgccccaggtgccatggaaaactggggcctgattacctatagggagacctcactgctcttcgatcctaaaacctcctccgcctcagataagctatgggtgactcgagtgattgcccacgagttagcccaccagtggttcggcaacctggtgaccatggagtggtggaatgatatatggttaaaggagggtttcgccaagtacatggagctgatcgcagtcaatgcgacttaccccgagctgcagtttgatgactatttcctgaatgtttgcttcgaggtgattaccaaagactcccttaattccagcagaccaatctctaaacctgctgaaactccaactcagatacaggaaatgtttgatgaagtgagttataacaaaggtgcatgcatccttaacatgttgaaggattttttgggggaagagaagtttcagaaggggattattcagtacctgaagaagttttcttatagaaatgccaagaacgatgatctgtggtcaagcctgagcaatagctgccttgaaagcgacttcacttctggcggagtttgtcacagcgacccgaagatgacttcaaacatgttggcattcttgggggaaaacgccgaggttaaagaaatgatgactacctggacccttcagaaaggaatcccgttactagtagtgaaacaggatggttgtagtctccgcctgcagcaggagagatttctgcagggcgtgttccaggaggaccctgaatggagggcactacaggaacggtacctgtggcacatccccctaacctacagcacttcgtcgtccaacgtcattcacagacacatcctgaaatccaaaactgacacactcgatctgccggagaagacaagctgggttaaattcaatgtggactctaatgggtattatatcgttcactacgaaggacacggctgggaccagctgattactcaacttaaccaaaaccacacgttgctgaggccaaaggaccgcgtgggtttgatccacgatgtgttccaactggtgggcgctggacgcctcacccttgacaaggctttagatatgacatactacttgcagcatgagacatcaagtccagccctcttggaggggctctcatatctggaatctttttaccatatgatggaccgccgtaatatttccgacatctcggaaaatctgaagaggtatttactgcagtattttaagcccgtgatagataggcagagctggtctgataaaggttcagtatgggaccggatgttacgcagcgccctactcaagttagcatgcgatctgaatcatgcgccttgcattcaaaaagctgccgagttgttttctcagtggatggagtcctccggaaagttgaatatcccaactgacgttctgaagattgtgtattctgtgggcgctcagacgaccgctgggtggaactatctgctggagcagtacgagctcagtatgtcaagtgcagaacagaacaagatcttgtacgctctgtcaacctcgaaacatcaagagaagctgttaaagctgatcgaattgggaatggaggggaaagtgatcaaaacccagaacctggccgcactgctgcacgccattgctagaaggccaaaaggacaacaactggcctgggattttgttagagagaactggacccaccttttgaagaagttcgatctcgggagctatgatatccggatgatcataagtgggacaaccgctcacttttcttccaaagataaacttcaggaggtgaagctcttttttgagagtctggaagctcagggaagccatctcgacatattccaaactgtgcttgaaactattactaagaacatcaagtggctcgaaaaaaatctgcccacgctaaggacttggctgatggtgaatacgtag

SEQ ID NO: 47808 - DNA, 2085 bp, Artificial Sequence
  derived and/or modified sequence
atgtttcactcctcagctatggttaacagccacaggaaacccatgttcaacatccaccggggtttttattgcctgaccgccatccttccgcagatttgtatctgcagccaattctctgttccaagctcctatcattttaccgaagatccaggcgctttccccgtggctacaaacggggagagattcccttggcaggaactgaggctgccatcagtggtgattccactgcattacgacctgtttgtacatccaaacctgaccagcttagacttcgtcgctagcgagaagattgaagtactggtaagcaatgccactcaatttatcatcctgcacagtaaagacctggagatcaccaatgcaactctgcagagtgaagaagactctcgttatatgaagcctggcaaagaactcaaggttctgtcatatcccgcacatgagcagattgcacttttggtaccagagaaattgacaccacatctaaaatattatgtcgccatggattttcaggcaaaactgggcgatggatttgaggggttttataagtccacatatcggacactgggaggcgagacacggattctggccgttacagacttcgagccaactcaggcacggatggcgttcccatgcttcgatgaacctctgttcaaggcgaatttctcaataaaaatacgacgagagagccgacatatagcattgagtaacatgcccaaggtgaaaacgatcgagctggaggggggacttcttgaggaccatttcgaaaccactgtaaagatgtctacctatctcgtcgcatacattgtttgcgactttcatagcctctctggctttacaagttccggagttaaagtctcaatatatgcatcaccagataagagaaaccagacccactatgccctccaggcttcactgaaactgcttgacttttacgagaaatacttcgatatctactaccccctgtccaagttagaccttatcgcaatccctgattttgcacccggagctatggagaactggggactcatcacttaccgtgaaacgagtctgctctttgaccccaaaacctccagtgccagcgataaactgtgggtcaccagagtgatcgcccacgagctcgcccaccagtggtttgggaacctggtgacaatggagtggtggaatgatatctggctcaaggaaggctttgctaaatatatggagcttattgccgtgaacgccacatacccggagctgcagttcgacgactattttctgaacgtttgcttcgaggttataaccaaggacagccttaactcttccaggccaattagcaagccagccgagaccccaactcagatccaggaaatgttcgacgaagtatcatataacaagggcgcttgtatactcaacatgctgaaggatttcctgggtgaagagaagttccagaaaggaatcattcagtacctgaagaagtttagctataggaacgcaaagaacgatgacctgtggtccagtctctcaaattcctgcctggagtcagatttcactagcgggggagtgtgccactcagatccgaagatgaccagtaatatgttggccttcctaggggagaatgccgaagtgaaggagatgatgacaacatggaccctccagaaaggcattcccctgttggtggtgaaacaggacggctgttctctaaggctgcaacaggaaagattccttcagggagtgttccaggaggaccccgaatggagggctctgcaggaaagatatctttggcacattcccctgacttactccacgagcagttcaaacgtgattcaccggcacatactcaagtccaagacggataccttagatctacctgaaaagacctcctgggtcaaatttaacgttgatagtaacggctattacatcgtgcactatgaaggtcatgggtgggatcagcttatcacacagctgaaccagaatcacaccttgctgaggcccaaggatcgagttgggctgattcatgacgttttccagcttgtgggggctggacgcctgacactggataaagccctggacatgacctattatctccagcatgaaacctcttctccctag

SEQ ID NO: 47809 - DNA, 2748 bp, Artificial Sequence
  derived and/or modified sequence
atgttccacagcagcgccatggtgaacagccacagaaagcccatgttcaacatccacagaggcttctactgcctgaccgccatcctgccccagatctgcatctgcagccagttcagcgtgcccagcagctaccacttcaccgaggaccccggcgccttccccgtggccaccaacggcgagagattcccctggcaggagctgagactgcccagcgtggtgatccccctgcactacgacctgttcgtgcaccccaacctgaccagcctggacttcgtggccagcgagaagatcgaggtgctggtgagcaacgccacccagttcatcatcctgcacagcaaggacctggagatcaccaacgccaccctgcagagcgaggaggacagcagatacatgaagcccggcaaggagctgaaggtgctgagctaccccgcccacgagcagatcgccctgctggtgcccgagaagctgaccccccacctgaagtactacgtggccatggacttccaggccaagctgggcgacggcttcgagggcttctacaagagcacctacagaaccctgggcggcgagaccagaatcctggccgtgaccgacttcgagcccacccaggccagaatggccttcccctgcttcgacgagcccctgttcaaggccaacttcagcatcaagatcagaagagagagcagacacatcgccctgagcaacatgcccaaggtgagcatctacgccagccccgacaagagaaaccagacccactacgccctgcaggccagcctgaagctgctggacttctacgagaagtacttcgacatctactaccccctgagcaagctggacctgatcgccatccccgacttcgcccccggcgccatggagaactggggcctgatcacctacagagagaccagcctgctgttcgaccccaagaccagcagcgccagcgacaagctgtgggtgaccagagtgatcgcccacgagctggcccaccagtggttcggcaacctggtgaccatggagtggtggaacgacatctggctgaaggagggcttcgccaagtacatggagctgatcgccgtgaacgccacctaccccgagctgcagttcgacgactacttcctgaacgtgtgcttcgaggtgatcaccaaggacagcctgaacagcagcagacccatcagcaagcccgccgagacccccacccagatccaggagatgttcgacgaggtgagctacaacaagggcgcctgcatcctgaacatgctgaaggacttcctgggcgaggagaagttccagaagggcatcatccagtacctgaagaagttcagctacagaaacgccaagaacgacgacctgtggagcagcctgagcaacagctgcctggagagcgacttcaccagcggcggcgtgtgccacagcgaccccaagatgaccagcaacatgctggccttcctgggcgagaacgccgaggtgaaggagatgatgaccacctggaccctgcagaagggcatccccctgctggtggtgaagcaggacggctgcagcctgagactgcagcaggagagattcctgcagggcgtgttccaggaggaccccgagtggagagccctgcaggagagatacctgtggcacatccccctgacctacagcaccagcagcagcaacgtgatccacagacacatcctgaagagcaagaccgacaccctggacctgcccgagaagaccagctgggtgaagttcaacgtggacagcaacggctactacatcgtgcactacgagggccacggctgggaccagctgatcacccagctgaaccagaaccacaccctgctgagacccaaggacagagtgggcctgatccacgacgtgttccagctggtgggcgccggcagactgaccctggacaaggccctggacatgacctactacctgcagcacgagaccagcagccccgccctgctggagggcctgagctacctggagagcttctaccacatgatggacagaagaaacatcagcgacatcagcgagaacctgaagagatacctgctgcagtacttcaagcccgtgatcgacagacagagctggagcgacaagggcagcgtgtgggacagaatgctgagaagcgccctgctgaagctggcctgcgacctgaaccacgccccctgcatccagaaggccgccgagctgttcagccagtggatggagagcagcggcaagctgaacatccccaccgacgtgctgaagatcgtgtacagcgtgggcgcccagaccaccgccggctggaactacctgctggagcagtacgagctgagcatgagcagcgccgagcagaacaagatcctgtacgccctgagcaccagcaagcaccaggagaagctgctgaagctgatcgagctgggcatggagggcaaggtgatcaagacccagaacctggccgccctgctgcacgccatcgccagaagacccaagggccagcagctggcctgggacttcgtgagagagaactggacccacctgctgaagaagttcgacctgggcagctacgacatcagaatgatcatcagcggcaccaccgcccacttcagcagcaaggacaagctgcaggaggtgaagctgttcttcgagagcctggaggcccagggcagccacctggacatcttccagaccgtgctggagaccatcaccaagaacatcaagtggctggagaagaacctgcccaccctgagaacctggctgatggtgaacacctag

SEQ ID NO: 47810 - DNA, 2883 bp, Artificial Sequence
  derived and/or modified sequence
atgttccacagcagcgccatggtgaacagccacagaaagcccatgttcaacatccacagaggcttctactgcctgaccgccatcctgccccagatctgcatctgcagccagttcagcgtgcccagcagctaccacttcaccgaggaccccggcgccttccccgtggccaccaacggcgagagattcccctggcaggagctgagactgcccagcgtggtgatccccctgcactacgacctgttcgtgcaccccaacctgaccagcctggacttcgtggccagcgagaagatcgaggtgctggtgagcaacgccacccagttcatcatcctgcacagcaaggacctggagatcaccaacgccaccctgcagagcgaggaggacagcagatacatgaagcccggcaaggagctgaaggtgctgagctaccccgcccacgagcagatcgccctgctggtgcccgagaagctgaccccccacctgaagtactacgtggccatggacttccaggccaagctgggcgacggcttcgagggcttctacaagagcacctacagaaccctgggcggcgagaccagaatcctggccgtgaccgacttcgagcccacccaggccagaatggccttcccctgcttcgacgagcccctgttcaaggccaacttcagcatcaagatcagaagagagagcagacacatcgccctgagcaacatgcccaaggtgaagaccatcgagctggagggcggcctgctggaggaccacttcgagaccaccgtgaagatgagcacctacctggtggcctacatcgtgtgcgacttccacagcctgagcggcttcaccagcagcggcgtgaaggtgagcatctacgccagccccgacaagagaaaccagacccactacgccctgcaggccagcctgaagctgctggacttctacgagaagtacttcgacatctactaccccctgagcaagctggacctgatcgccatccccgacttcgcccccggcgccatggagaactggggcctgatcacctacagagagaccagcctgctgttcgaccccaagaccagcagcgccagcgacaagctgtgggtgaccagagtgatcgcccacgagctggcccaccagtggttcggcaacctggtgaccatggagtggtggaacgacatctggctgaaggagggcttcgccaagtacatggagctgatcgccgtgaacgccacctaccccgagctgcagttcgacgactacttcctgaacgtgtgcttcgaggtgatcaccaaggacagcctgaacagcagcagacccatcagcaagcccgccgagacccccacccagatccaggagatgttcgacgaggtgagctacaacaagggcgcctgcatcctgaacatgctgaaggacttcctgggcgaggagaagttccagaagggcatcatccagtacctgaagaagttcagctacagaaacgccaagaacgacgacctgtggagcagcctgagcaacagctgcctggagagcgacttcaccagcggcggcgtgtgccacagcgaccccaagatgaccagcaacatgctggccttcctgggcgagaacgccgaggtgaaggagatgatgaccacctggaccctgcagaagggcatccccctgctggtggtgaagcaggacggctgcagcctgagactgcagcaggagagattcctgcagggcgtgttccaggaggaccccgagtggagagccctgcaggagagatacctgtggcacatccccctgacctacagcaccagcagcagcaacgtgatccacagacacatcctgaagagcaagaccgacaccctggacctgcccgagaagaccagctgggtgaagttcaacgtggacagcaacggctactacatcgtgcactacgagggccacggctgggaccagctgatcacccagctgaaccagaaccacaccctgctgagacccaaggacagagtgggcctgatccacgacgtgttccagctggtgggcgccggcagactgaccctggacaaggccctggacatgacctactacctgcagcacgagaccagcagccccgccctgctggagggcctgagctacctggagagcttctaccacatgatggacagaagaaacatcagcgacatcagcgagaacctgaagagatacctgctgcagtacttcaagcccgtgatcgacagacagagctggagcgacaagggcagcgtgtgggacagaatgctgagaagcgccctgctgaagctggcctgcgacctgaaccacgccccctgcatccagaaggccgccgagctgttcagccagtggatggagagcagcggcaagctgaacatccccaccgacgtgctgaagatcgtgtacagcgtgggcgcccagaccaccgccggctggaactacctgctggagcagtacgagctgagcatgagcagcgccgagcagaacaagatcctgtacgccctgagcaccagcaagcaccaggagaagctgctgaagctgatcgagctgggcatggagggcaaggtgatcaagacccagaacctggccgccctgctgcacgccatcgccagaagacccaagggccagcagctggcctgggacttcgtgagagagaactggacccacctgctgaagaagttcgacctgggcagctacgacatcagaatgatcatcagcggcaccaccgcccacttcagcagcaaggacaagctgcaggaggtgaagctgttcttcgagagcctggaggcccagggcagccacctggacatcttccagaccgtgctggagaccatcaccaagaacatcaagtggctggagaagaacctgcccaccctgagaacctggctgatggtgaacacctag

SEQ ID NO: 47811 - DNA, 2085 bp, Artificial Sequence
  derived and/or modified sequence
atgttccacagcagcgccatggtgaacagccacagaaagcccatgttcaacatccacagaggcttctactgcctgaccgccatcctgccccagatctgcatctgcagccagttcagcgtgcccagcagctaccacttcaccgaggaccccggcgccttccccgtggccaccaacggcgagagattcccctggcaggagctgagactgcccagcgtggtgatccccctgcactacgacctgttcgtgcaccccaacctgaccagcctggacttcgtggccagcgagaagatcgaggtgctggtgagcaacgccacccagttcatcatcctgcacagcaaggacctggagatcaccaacgccaccctgcagagcgaggaggacagcagatacatgaagcccggcaaggagctgaaggtgctgagctaccccgcccacgagcagatcgccctgctggtgcccgagaagctgaccccccacctgaagtactacgtggccatggacttccaggccaagctgggcgacggcttcgagggcttctacaagagcacctacagaaccctgggcggcgagaccagaatcctggccgtgaccgacttcgagcccacccaggccagaatggccttcccctgcttcgacgagcccctgttcaaggccaacttcagcatcaagatcagaagagagagcagacacatcgccctgagcaacatgcccaaggtgaagaccatcgagctggagggcggcctgctggaggaccacttcgagaccaccgtgaagatgagcacctacctggtggcctacatcgtgtgcgacttccacagcctgagcggcttcaccagcagcggcgtgaaggtgagcatctacgccagccccgacaagagaaaccagacccactacgccctgcaggccagcctgaagctgctggacttctacgagaagtacttcgacatctactaccccctgagcaagctggacctgatcgccatccccgacttcgcccccggcgccatggagaactggggcctgatcacctacagagagaccagcctgctgttcgaccccaagaccagcagcgccagcgacaagctgtgggtgaccagagtgatcgcccacgagctggcccaccagtggttcggcaacctggtgaccatggagtggtggaacgacatctggctgaaggagggcttcgccaagtacatggagctgatcgccgtgaacgccacctaccccgagctgcagttcgacgactacttcctgaacgtgtgcttcgaggtgatcaccaaggacagcctgaacagcagcagacccatcagcaagcccgccgagacccccacccagatccaggagatgttcgacgaggtgagctacaacaagggcgcctgcatcctgaacatgctgaaggacttcctgggcgaggagaagttccagaagggcatcatccagtacctgaagaagttcagctacagaaacgccaagaacgacgacctgtggagcagcctgagcaacagctgcctggagagcgacttcaccagcggcggcgtgtgccacagcgaccccaagatgaccagcaacatgctggccttcctgggcgagaacgccgaggtgaaggagatgatgaccacctggaccctgcagaagggcatccccctgctggtggtgaagcaggacggctgcagcctgagactgcagcaggagagattcctgcagggcgtgttccaggaggaccccgagtggagagccctgcaggagagatacctgtggcacatccccctgacctacagcaccagcagcagcaacgtgatccacagacacatcctgaagagcaagaccgacaccctggacctgcccgagaagaccagctgggtgaagttcaacgtggacagcaacggctactacatcgtgcactacgagggccacggctgggaccagctgatcacccagctgaaccagaaccacaccctgctgagacccaaggacagagtgggcctgatccacgacgtgttccagctggtgggcgccggcagactgaccctggacaaggccctggacatgacctactacctgcagcacgagaccagcagcccctag

SEQ ID NO: 47812 - DNA, 3219 bp, Artificial Sequence
  derived and/or modified sequence
atctgcagcagcatgatttaagattaaattcatgtattgaaaatattgttcagaccccatgtgacataactggagccagtgcagtgccatgaagaactacgagattagcctggatattaacttgtcttctagagaatagatttcatgttccattcttctgcaatggttaattcacacagaaaaccaatgtttaacattcacagaggattttactgcttaacagccatcttgccccaaatatgcatttgttctcagttctcagtgccatctagttatcacttcactgaggatcctggggctttcccagtagccactaatggggaacgatttccttggcaggagctaaggctccccagtgtggtcattcctctccattatgacctctttgtccaccccaatctcacctctctggactttgttgcatctgagaagatcgaagtcttggtcagcaatgctacccagtttatcatcttgcacagcaaagatcttgaaatcacgaatgccacccttcagtcagaggaagattcaagatacatgaaaccaggaaaagaactgaaagttttgagttaccctgctcatgaacaaattgcactgctggttccagagaaacttacgcctcacctgaaatactatgtggctatggacttccaagccaagttaggtgatggctttgaagggttttataaaagcacatacagaactcttggtggtgaaacaagaattcttgcagtaacagattttgagccaacccaggcacgcatggctttcccttgctttgatgaaccgttgttcaaagccaacttttcaatcaagatacgaagagagagcaggcatattgcactatccaacatgccaaaggtgtccatctatgcatccccagacaaacggaatcaaacacattatgctttgcaggcatcactgaagctacttgatttttatgaaaagtactttgatatctactatccactctccaaactggatttaattgctattcctgactttgcacctggagccatggaaaattggggcctcattacatatagggagacgtcactgctttttgaccccaagacctcttctgcttccgataaactgtgggtcaccagagtcatagcccatgaactggcgcaccagtggtttggcaacctggtcacaatggaatggtggaatgatatttggcttaaggagggttttgcaaaatacatggaacttatcgctgttaatgctacatatccagagctgcaatttgatgactattttttgaatgtgtgttttgaagtaattacaaaagattcattgaattcatcccgccctatctccaaaccagcggaaaccccgactcaaatacaggaaatgtttgatgaagtttcctataacaagggagcttgtattttgaatatgctcaaggattttctgggtgaggagaaattccagaaaggaataattcagtacttaaagaagttcagctatagaaatgctaagaatgatgacttgtggagcagtctgtcaaatagttgtttagaaagtgattttacatctggtggagtttgtcattcggatcccaagatgacaagtaacatgctcgcctttctgggggaaaatgcagaggtcaaagagatgatgactacatggactctccagaaaggaatccccctgctggtggttaaacaagacgggtgttcactccgactgcaacaggagcgcttcctccagggggttttccaggaagaccctgaatggagggccctgcaggagaggtacctgtggcatatcccattgacctactccacgagttcttctaatgtgatccacagacacattctaaaatcaaagacagatactctggatctacctgaaaagaccagttgggtgaaatttaatgtggactcaaatggttactacatcgttcactatgagggtcatggatgggaccaactcattacacagctgaatcagaaccacacacttctcagacctaaggacagagtaggtctgattcatgatgtgtttcagctagttggtgcagggagactgaccctagacaaagctcttgacatgacttactacctccaacatgaaacaagcagccccgcacttctcgaaggtctgagttacttggaatcgttttaccacatgatggacagaaggaatatttcagatatctctgaaaacctcaagcgttaccttcttcagtattttaagccagtgattgacaggcaaagctggagtgacaagggctcagtctgggacaggatgctccgctcggctctcttgaagctggcctgtgacctgaaccatgctccttgcatccagaaagctgctgaactcttctcccagtggatggaatccagtggaaaattaaatataccaacagatgttttaaagattgtgtattctgtgggtgctcagacaacagcaggatggaattaccttttagagcaatatgaactgtcaatgtcaagtgctgaacaaaacaaaattctgtatgctttgtcaacgagcaagcatcaggaaaagttactgaagttaattgaactaggaatggaaggaaaggttatcaagacacagaacttggcagctctccttcatgcgattgccagacgtccaaaggggcagcaactagcatgggattttgtaagagaaaattggacccatcttctgaaaaaatttgacttgggctcatatgacataaggatgatcatctctggcacaacagctcacttttcttccaaggataagttgcaagaggtgaaactattttttgaatctcttgaggctcaaggatcacatctggatatttttcaaactgttctggaaacgataaccaaaaatataaaatggctggagaagaatcttccgactctgaggacttggctaatggttaatacttaaatggtcaatagaaaaagtaggctgggcgcggtggctcacgcctgtaatcccagcactttgggaggctgagaagggcggatcacgaggtcaggagatggagaccatcctggctaacacggtgagaccccgtctccgctaaaaatacaaaaaattagccgggcatggtggcaggtgcctgtagtcccagctactcggcaggctgcagcaggaaaatggcataaacccgggaggtggagcttgcagtgagccgagattgcaccactgcattccagcctgggtgactgagcgagactctgtctcaaaaaaaaaaaaaaaaaaaaaaagaaa

SEQ ID NO: 47813 - DNA, 5705 bp, Artificial Sequence
  derived and/or modified sequence
cccaactcaaacaggcagataaagagagatcaaagagatgagcatgagatacagtcccctcgtgcccaaggagacagggtggttacagacatggaaaatctgagaataatcacctctgataaagatcacagaagctgcccgggaggtgtttggtaagcttggagttacgtttgtggggtggatgggcagaagtcagatttcatagcactgaggatgcagcacaaggagaagttcaagatcaattcctaagacaacaacttggcactaaaaaacataaactatgttctgaaggctttaccctggggacaagggaagggaggtgataacagcagaagtggcagccactggcgatcctttctttccatggtttggcttctactccaaagccacttatttgtgcattctacaaaaagtttcttgtcctttttgaaataaagctcttatcctaagctccattcacacctgcgtgataatgaaccagctagtacttactgtactcaggaagcatgcaaagttctgaatcttagaacagaaagtgaaagcaaaagtaaattccccttcagtcaaatctgcagcagcatgatttaagattaaattcatgtattgaaaatattgttcagaccccatgtgacataactggagccagtgcagtgccatgaagaactacgagattagcctggatattaacttgtcttctagagaatagatttcatgttccattcttctgcaatggttaattcacacagaaaaccaatgtttaacattcacagaggattttactgcttaacagccatcttgccccaaatatgcatttgttctcagttctcagtgccatctagttatcacttcactgaggatcctggggctttcccagtagccactaatggggaacgatttccttggcaggagctaaggctccccagtgtggtcattcctctccattatgacctctttgtccaccccaatctcacctctctggactttgttgcatctgagaagatcgaagtcttggtcagcaatgctacccagtttatcatcttgcacagcaaagatcttgaaatcacgaatgccacccttcagtcagaggaagattcaagatacatgaaaccaggaaaagaactgaaagttttgagttaccctgctcatgaacaaattgcactgctggttccagagaaacttacgcctcacctgaaatactatgtggctatggacttccaagccaagttaggtgatggctttgaagggttttataaaagcacatacagaactcttggtggtgaaacaagaattcttgcagtaacagattttgagccaacccaggcacgcatggctttcccttgctttgatgaaccgttgttcaaagccaacttttcaatcaagatacgaagagagagcaggcatattgcactatccaacatgccaaaggttaagacaattgaacttgaaggaggtcttttggaagatcactttgaaactactgtaaaaatgagtacataccttgtagcctacatagtttgtgatttccactctctgagtggcttcacttcatcaggggtcaaggtgtccatctatgcatccccagacaaacggaatcaaacacattatgctttgcaggcatcactgaagctacttgatttttatgaaaagtactttgatatctactatccactctccaaactggatttaattgctattcctgactttgcacctggagccatggaaaattggggcctcattacatatagggagacgtcactgctttttgaccccaagacctcttctgcttccgataaactgtgggtcaccagagtcatagcccatgaactggcgcaccagtggtttggcaacctggtcacaatggaatggtggaatgatatttggcttaaggagggttttgcaaaatacatggaacttatcgctgttaatgctacatatccagagctgcaatttgatgactattttttgaatgtgtgttttgaagtaattacaaaagattcattgaattcatcccgccctatctccaaaccagcggaaaccccgactcaaatacaggaaatgtttgatgaagtttcctataacaagggagcttgtattttgaatatgctcaaggattttctgggtgaggagaaattccagaaaggaataattcagtacttaaagaagttcagctatagaaatgctaagaatgatgacttgtggagcagtctgtcaaatagttgtttagaaagtgattttacatctggtggagtttgtcattcggatcccaagatgacaagtaacatgctcgcctttctgggggaaaatgcagaggtcaaagagatgatgactacatggactctccagaaaggaatccccctgctggtggttaaacaagacgggtgttcactccgactgcaacaggagcgcttcctccagggggttttccaggaagaccctgaatggagggccctgcaggagaggtacctgtggcatatcccattgacctactccacgagttcttctaatgtgatccacagacacattctaaaatcaaagacagatactctggatctacctgaaaagaccagttgggtgaaatttaatgtggactcaaatggttactacatcgttcactatgagggtcatggatgggaccaactcattacacagctgaatcagaaccacacacttctcagacctaaggacagagtaggtctgattcatgatgtgtttcagctagttggtgcagggagactgaccctagacaaagctcttgacatgacttactacctccaacatgaaacaagcagccccgcacttctcgaaggtctgagttacttggaatcgttttaccacatgatggacagaaggaatatttcagatatctctgaaaacctcaagcgttaccttcttcagtattttaagccagtgattgacaggcaaagctggagtgacaagggctcagtctgggacaggatgctccgctcggctctcttgaagctggcctgtgacctgaaccatgctccttgcatccagaaagctgctgaactcttctcccagtggatggaatccagtggaaaattaaatataccaacagatgttttaaagattgtgtattctgtgggtgctcagacaacagcaggatggaattaccttttagagcaatatgaactgtcaatgtcaagtgctgaacaaaacaaaattctgtatgctttgtcaacgagcaagcatcaggaaaagttactgaagttaattgaactaggaatggaaggaaaggttatcaagacacagaacttggcagctctccttcatgcgattgccagacgtccaaaggggcagcaactagcatgggattttgtaagagaaaattggacccatcttctgaaaaaatttgacttgggctcatatgacataaggatgatcatctctggcacaacagctcacttttcttccaaggataagttgcaagaggtgaaactattttttgaatctcttgaggctcaaggatcacatctggatatttttcaaactgttctggaaacgataaccaaaaatataaaatggctggagaagaatcttccgactctgaggacttggctaatggttaatacttaaatggtcaatagaaaaagtaggctgggcgcggtggctcacgcctgtaatcccagcactttgggaggctgagaagggcggatcacgaggtcaggagatggagaccatcctggctaacacggtgagaccccgtctccgctaaaaatacaaaaaattagccgggcatggtggcaggtgcctgtagtcccagctactcggcaggctgcagcaggaaaatggcataaacccgggaggtggagcttgcagtgagccgagattgcaccactgcattccagcctgggtgactgagcgagactctgtctcaaaaaaaaaaaaaaaaaaaaaaagaaaaagaaaaagaaaagaaaagaaaaggtacatcagacatgactgcctgcatgaagtcaaacagggtaacaccagtgaagctcaagtcaagagctgtggatattttgtctaaccaacaagaagtctcaagaaatcaggcagtgcagctgcctgctctcagctatcgtatccagccaaaagatgcatgatgatggagtggtgggggaaggccagttcagtatcctatttaaaagtaaacttcctgaataatggatatatgtggagatacagacatagatatatagatacagctgtaattatttagcctcaagtgactttctccattgcttcacgctatgccactattttgcttctttaatttttttaaccttgcttagtattctatagtttgcccaaccagttttacgtccaaggaaaattagccaatgcataaaatatacaaactatgaaaggcaaggatcaggaaaccagagactttgccaccaaatctcagattattagaaactaggtgtcagggtttatcaagaaggccaggaaggccttttgggttaagccttacattcatgaagaacctcaagggtagatttttgagagcattccaaatgaatggtctctggtcaaatgaatgaatggtcaaatgaataaatctgccctcacagagatacaaaaggaaaaggaatataattcataccatttggtttaagccttacattcatgaagtacctcaagggtagatttttgagatcattccaaatgaagtcgaatctgccctcacagagacacaagaaaggaatataattcatacactattgcatttttaataaatcttttgaaatttgcagaattagattgtattgtgtattttcggttaaatgataattgaatgtaaatatttagatgcagcaccatattttataacccagctttagcatttcttcatattttaaggaaaccccccacctccttcttttaagggcgcttcttgctctctgaaatgccctgctaaatgcttctcttaattatttgaataaggtagtttggaataaagaaagaaaagatcactctacatacagatagtaaacttaatttgtgatcctatatatgagacagtataaaaatacagataagttttagaaagactcaaaacaatatgtaaatgactgatgtttgcattattaaggaagacttgggatgttgggtcaagaggggaaagtgttagtcaatccactttggagcaatatcatgaaggtcaattataattccatatacctttctttgatgccacagtcagagatagaatacagtttgggtggccatggatgtgccccaatacagtacacattttttggttaaatttgttttcagatcatttcatggaatctttgaagtatctttgactctaactttgacttggtggtggaccttccttggtttttataacacctaagagatatcctttagaattacatgtattttagcataaggaaattgaaaaagtaaaacatactggtttttttcaacaagaccatatgtaaattaaatagtgaaatgtgtatgagtttcagtagaactgtaccatcaacaatgtttccataaatatgcagagttctttcttttgtattgttatttacaatattgttaaattgaatgcatttgcaatttctaggattctaaagaattgagtacagaaagtagcaattttattatttgatgataatatgagaattactgtgccaatactgttttgataaataaatagatttttaaaaataaatgtattgtactta

SEQ ID NO: 47814 - DNA, 2309 bp, Artificial Sequence
  derived and/or modified sequence
gatacagtcccctcgtgcccaaggagacagggtggttacagacatggaaaatctgagaataatcacctctgataaagatcacagaagctgcccgggaggtgtttgattaaattcatgtattgaaaatattgttcagaccccatgtgacataactggagccagtgcagtgccatgaagaactacgagattagcctggatattaacttgtcttctagagaatagatttcatgttccattcttctgcaatggttaattcacacagaaaaccaatgtttaacattcacagaggattttactgcttaacagccatcttgccccaaatatgcatttgttctcagttctcagtgccatctagttatcacttcactgaggatcctggggctttcccagtagccactaatggggaacgatttccttggcaggagctaaggctccccagtgtggtcattcctctccattatgacctctttgtccaccccaatctcacctctctggactttgttgcatctgagaagatcgaagtcttggtcagcaatgctacccagtttatcatcttgcacagcaaagatcttgaaatcacgaatgccacccttcagtcagaggaagattcaagatacatgaaaccaggaaaagaactgaaagttttgagttaccctgctcatgaacaaattgcactgctggttccagagaaacttacgcctcacctgaaatactatgtggctatggacttccaagccaagttaggtgatggctttgaagggttttataaaagcacatacagaactcttggtggtgaaacaagaattcttgcagtaacagattttgagccaacccaggcacgcatggctttcccttgctttgatgaaccgttgttcaaagccaacttttcaatcaagatacgaagagagagcaggcatattgcactatccaacatgccaaaggttaagacaattgaacttgaaggaggtcttttggaagatcactttgaaactactgtaaaaatgagtacataccttgtagcctacatagtttgtgatttccactctctgagtggcttcacttcatcaggggtcaaggtgtccatctatgcatccccagacaaacggaatcaaacacattatgctttgcaggcatcactgaagctacttgatttttatgaaaagtactttgatatctactatccactctccaaactggatttaattgctattcctgactttgcacctggagccatggaaaattggggcctcattacatatagggagacgtcactgctttttgaccccaagacctcttctgcttccgataaactgtgggtcaccagagtcatagcccatgaactggcgcaccagtggtttggcaacctggtcacaatggaatggtggaatgatatttggcttaaggagggttttgcaaaatacatggaacttatcgctgttaatgctacatatccagagctgcaatttgatgactattttttgaatgtgtgttttgaagtaattacaaaagattcattgaattcatcccgccctatctccaaaccagcggaaaccccgactcaaatacaggaaatgtttgatgaagtttcctataacaagggagcttgtattttgaatatgctcaaggattttctgggtgaggagaaattccagaaaggaataattcagtacttaaagaagttcagctatagaaatgctaagaatgatgacttgtggagcagtctgtcaaatagttgtttagaaagtgattttacatctggtggagtttgtcattcggatcccaagatgacaagtaacatgctcgcctttctgggggaaaatgcagaggtcaaagagatgatgactacatggactctccagaaaggaatccccctgctggtggttaaacaagacgggtgttcactccgactgcaacaggagcgcttcctccagggggttttccaggaagaccctgaatggagggccctgcaggagaggtacctgtggcatatcccattgacctactccacgagttcttctaatgtgatccacagacacattctaaaatcaaagacagatactctggatctacctgaaaagaccagttgggtgaaatttaatgtggactcaaatggttactacatcgttcactatgagggtcatggatgggaccaactcattacacagctgaatcagaaccacacacttctcagacctaaggacagagtaggtctgattcatgatgtgtttcagctagttggtgcagggagactgaccctagacaaagctcttgacatgacttactacctccaacatgaaacaagcagcccc

SEQ ID NO: 47815 - protein, 322 aa, Artificial Sequence
  derived and/or modified sequence
PQPQFGRRMESKVSEGGLNVTLTIRLLMHGKEVGSIIGKKGETVKKMREESGARINISEGNCPERIVTITGPTDAIFKAFAMIAYKFEEDIINSMSNSPATSKPPVTLRLVVPASQCGSLIGKGGSKIKEIRESTGAQVQVAGDMLPNSTERAVTISGTPDAIIQCVKQICVVMLEAYTIQGQYAIPHPDQLTKLHQLAMQQTPFPPLGQTNPAFPGEKLPLHSSEEAQNLMGQSSGLDASPPASTHELTIPNDLIGCIIGRQGTKINEIRQMSGAQIKIANATEGSSERQITITGTPANISLAQYLINARLTSEVTGMGTL

SEQ ID NO: 47816 - protein, 345 aa, Artificial Sequence
  derived and/or modified sequence
MGEGDAFWAPSVLPHSTLSTLSHHPQPQFGRRMESKVSEGGLNVTLTIRLLMHGKEVGSIIGKKGETVKKMREESGARINISEGNCPERIVTITGPTDAIFKAFAMIAYKFEEDIINSMSNSPATSKPPVTLRLVVPASQCGSLIGKGGSKIKEIRESTGAQVQVAGDMLPNSTERAVTISGTPDAIIQCVKQICVVMLEAYTIQGQYAIPHPDLTKLHQLAMQQTPFPPLGQTNPAFPGEKLPLHSSEEAQNLMGQSSGLDASPPASTHELTIPNDLIGCIIGRQGTKINEIRQMSGAQIKIANATEGSSERQITITGTPANISLAQYLINARLTSEVTGMGTL

SEQ ID NO: 47817 - DNA, 969 bp, Artificial Sequence
  derived and/or modified sequence
ccacagcctcagtttggtcgccgaatggagtctaaggtgagcgagggggggctcaacgtgacgctcacgatccggctccttatgcacgggaaggaggtgggcagtatcattggcaagaaaggcgagactgttaaaaaaatgagagaagaaagtggagcacgaatcaacatatctgaggggaactgcccagagcgcatcgtgaccataactggcccaacagacgctattttcaaagctttcgccatgatcgcctataaattcgaggaagacattataaacagcatgagtaactcacctgcgacttcaaagcctccagtcacactgagactggtggtgcctgccagccagtgtggctccctcatcggcaagggcggctccaagatcaaagaaatacgcgaatccacaggtgctcaagtccaagttgctggcgatatgcttcctaatagcacagagcgtgccgttacaatctcaggaactcctgacgcaattatacaatgtgttaagcaaatttgcgtggtgatgctcgaagcttataccattcaagggcagtatgctatcccccatcccgaccagctgacaaagctccaccagctcgccatgcagcagactccatttcctcccctggggcagacgaaccccgctttccccggtgagaaactgcccctacacagctctgaagaagcacagaatcttatgggccagtcatctggtctcgatgcctcaccccccgcctcgacccacgagttgacaattccaaatgacctcatagggtgcataattgggcggcagggtactaagatcaacgagattagacagatgagcggggctcagatcaagatcgcgaatgccactgagggatccagcgagcggcagatcactatcacgggaacgcccgccaatatatcccttgcccagtacttgatcaatgcaagacttacctcagaagtgaccggcatgggcaccttgtag

SEQ ID NO: 47818 - DNA, 1038 bp, Artificial Sequence
  derived and/or modified sequence
atgggcgaaggcgacgccttctgggccccctcagtgctgccccattccaccctctctacattgtctcaccacccgcaaccccagttcggtcgccgaatggaaagcaaggtgtcagaaggcggacttaacgtgaccctgacgattcgtctactcatgcacggtaaggaggtcggctccatcattgggaagaagggtgaaacggtgaagaaaatgagggaggagtccggggctaggataaatatttctgagggcaactgccccgagcggattgtgaccatcactggacccactgatgccatattcaaggcattcgccatgatcgcttataagtttgaagaggatataatcaactccatgagcaactctcccgccacatcgaaaccccccgtaaccctgcgactggtagtgcctgcaagtcagtgcggcagtctgattgggaaaggcggatcaaagatcaaggagataagagaatccaccggggcgcaggtgcaagtagccggagatatgctgcccaatagtacagaacgggcagtcacaatctccgggacacctgatgcaattatccagtgcgtgaagcagatctgcgtcgtaatgctggaggcctatactattcaggggcaatacgcgatccctcaccccgaccttactaaactccatcagctcgctatgcagcagacccccttccctccacttggccagaccaatcctgcgtttcctggagaaaagctccctctgcactcttcagaagaagcccagaacctcatggggcagtcgtccggtctagatgcctcccctcctgcttctacacacgaactgacaattcccaacgatctgattggctgcattattggaagacagggcactaaaatcaacgagattagacaaatgagcggtgctcagatcaaaattgcaaatgccactgaaggatcaagcgagaggcagatcaccatcacaggaacaccggccaacatcagtctcgcacagtacttgatcaacgccagactcacatcagaagtgaccgggatggggaccctgtag

SEQ ID NO: 47819 - DNA, 969 bp, Artificial Sequence
  derived and/or modified sequence
ccccagccccagtttggaagaaggatggagagcaaggtgtctgagggcggcctgaatgtgaccctgaccatccggctgctgatgcacggcaaggaggtgggcagcatcatcggcaagaagggggagaccgtgaagaagatgagggaggagagcggggcccgcatcaacatcagcgagggcaactgcccagagcgcatcgtgaccatcaccggccccacagatgccatcttcaaggcctttgccatgattgcctacaagtttgaggaggacatcatcaacagcatgagcaacagccctgccaccagcaagccccctgtgaccctgcggctggtggtgcctgccagccagtgtggcagcctgattggaaaaggaggcagcaagatcaaggagatccgggagagcactggagcccaggtgcaggtggccggggacatgctgcccaacagcacagaaagagctgtgaccatcagcggcaccccagatgccatcatccagtgtgtgaagcagatctgtgtggtgatgctggaggcctacaccatccagggccagtatgccatcccccacccagaccagctgaccaagctgcaccagctggccatgcagcagacccccttcccccccctgggccagaccaacccagccttccctggagagaagctgcccctgcacagcagcgaggaggcccagaacctgatgggccagagcagcggcctggatgccagccccccagccagcacccatgagctgaccatccccaatgacctgattggctgcatcatcggccggcagggcaccaagatcaatgagatccggcagatgtctggggcccagatcaagatcgccaatgccacagagggcagcagcgagcggcagatcaccatcaccggcaccccagccaacatcagcctggcccagtacctgatcaatgcccggctgaccagcgaggtgacaggcatgggcaccctgtag

SEQ ID NO: 47820 - DNA, 1038 bp, Artificial Sequence
  derived and/or modified sequence
atgggagaaggagatgccttctgggcccccagcgtgctgccccacagcaccctgagcaccctgagccaccacccccagccccagtttggaagaaggatggagagcaaggtgtctgagggcggcctgaatgtgaccctgaccatccggctgctgatgcacggcaaggaggtgggcagcatcatcggcaagaagggggagaccgtgaagaagatgagggaggagagcggggcccgcatcaacatcagcgagggcaactgcccagagcgcatcgtgaccatcaccggccccacagatgccatcttcaaggcctttgccatgattgcctacaagtttgaggaggacatcatcaacagcatgagcaacagccctgccaccagcaagccccctgtgaccctgcggctggtggtgcctgccagccagtgtggcagcctgattggaaaaggaggcagcaagatcaaggagatccgggagagcactggagcccaggtgcaggtggccggggacatgctgcccaacagcacagaaagagctgtgaccatcagcggcaccccagatgccatcatccagtgtgtgaagcagatctgtgtggtgatgctggaggcctacaccatccagggccagtatgccatcccccacccagacctgaccaagctgcaccagctggccatgcagcagacccccttcccccccctgggccagaccaacccagccttccctggagagaagctgcccctgcacagcagcgaggaggcccagaacctgatgggccagagcagcggcctggatgccagccccccagccagcacccatgagctgaccatccccaatgacctgattggctgcatcatcggccggcagggcaccaagatcaatgagatccggcagatgtctggggcccagatcaagatcgccaatgccacagagggcagcagcgagcggcagatcaccatcaccggcaccccagccaacatcagcctggcccagtacctgatcaatgcccggctgaccagcgaggtgacaggcatgggcaccctgtag

SEQ ID NO: 47821 - DNA, 969 bp, Artificial Sequence
  derived and/or modified sequence
ccccagccccagttcggccggcggatggagagcaaggtgagcgagggcgggttgaacgtgacccttactatccgattattaatgcacggaaaggaggttggttcaatcatcggtaagaagggcgagaccgtgaaaaagatgagggaagagagtggagcgcgaattaatatttctgaagggaattgtcctgaacgaattgtgacgatcaccggtccaacagatgccattttcaaggcctttgcgatgatcgcctataagttcgaggaggacattataaacagcatgtctaattcacccgcgacatccaagcctcccgtgacactgcgcctggtcgtgccagcatctcaatgcgggtctttgatcggcaaaggaggttctaagattaaggagatcagggaatctactggggcacaggtgcaggtagcgggggacatgctgccaaactccacagagagggccgtgaccatcagcggcacgcccgatgcaatcattcaatgcgtgaaacagatctgtgttgttatgctcgaagcttacactattcagggacagtacgccatccctcaccccgaccagctgaccaagttgcaccagctggccatgcagcaaaccccctttcctccgctgggccaaaccaaccccgcgtttcccggggagaaactcccccttcattccagcgaagaagcacagaacttaatgggtcaatcgagcggattggatgcgtcccctcccgctagtacacacgaactgactatccccaatgacttgattgggtgcatcattggcaggcaggggacgaaaatcaacgagattaggcagatgagtggcgctcagatcaagatcgcaaacgccactgaaggaagcagcgaacggcagatcaccataacaggcactccggcaaacatctctctggcccagtacctaataaatgctagacttacaagtgaggtgactggcatggggaccctgtag

SEQ ID NO: 47822 - DNA, 1038 bp, Artificial Sequence
  derived and/or modified sequence
atgggcgagggcgacgccttctgggcccccagcgtgctgccccacagtaccctatccacactgagtcaccacccacagcctcaattcggacggaggatggaatcaaaggttagcgaagggggactaaatgttaccctgacaattagactactgatgcatggcaaagaggtaggaagtattatcggtaagaaaggagagactgtgaaaaagatgagggaggagtcaggggctcgcatcaacatttctgaaggtaattgcccagagcgcattgttaccataaccggccctacagacgctatattcaaagctttcgccatgatcgcatataaatttgaggaagatattatcaactcgatgtcaaactcccccgctacgtctaaaccacccgtgacactgagactcgtggttccagcttcccaatgcggttcactgattggtaaaggtgggtcaaaaatcaaagaaattcgtgagtcaacaggggctcaagtacaggtagccggggatatgctcccaaatagcaccgagagggccgtgactatttccggtacacccgatgcgattatccagtgcgtcaagcaaatttgtgtggtaatgcttgaagcctatacaatccagggacaatatgccattccgcatcctgatttgactaagctccaccagctggccatgcagcagacgccttttccgcctctggggcaaacaaatcctgcgtttcctggcgagaaactacccctacactcgtcagaggaggctcagaaccttatgggtcagtcatctggccttgacgccagcccacccgcctctacacatgaactcaccatccccaatgatctgatcgggtgtatcattgggcgacaagggacaaagataaacgaaatcagacagatgtctggggcacagattaaaattgccaacgccaccgaggggagttccgaaaggcagatcacgataacaggcacaccagccaacatctccctggcccagtacttaatcaatgccagactgaccagcgaggtgacagggatgggtacactctag

SEQ ID NO: 47823 - DNA, 1717 bp, Artificial Sequence
  derived and/or modified sequence
cctcagccacaatttggcagaaggatggagtccaaggtctcagaaggtggcctgaatgtgaccctcaccatccgcctgctgatgcatggaaaggaagttggaagcatcatcgggaagaaaggagaaactgtgaagaagatgcgtgaggagagtggtgcaaggatcaacatctcagagggaaactgcccagagaggattgtgaccatcacaggccccacagacgccatcttcaaggcctttgccatgatcgcatacaagtttgaggaggatatcatcaactccatgagcaacagccctgccaccagcaagcccccagtgacgctgaggctggtggtgcctgccagccagtgtgggtccctgatcggcaaaggaggctccaagatcaaggagatcagggagtccacaggtgcccaggtgcaggtggctggggacatgctgcccaactccacggagcgagcggtgaccatctcggggaccccagatgccatcatccagtgcgtcaagcagatctgtgtggtcatgctggaggcctacacaatccagggacagtatgccatccctcacccggatcagttgaccaagctccaccagttggccatgcagcaaaccccctttcctcccctcggacagaccaaccccgctttccccggagaaaagctgcctttacactcctccgaagaagctcaaaatctgatgggccagtcatcaggtctggacgccagcccaccggccagcactcatgagctcaccattcccaatgatctaataggctgcataattggacgccaagggaccaaaatcaatgaaattcgacagatgtctggagctcagatcaaaatcgccaacgccacggaagggtcctcagagcgtcagatcaccatcacggggaccccggccaacatcagccttgcccagtatctcatcaacgccaggctgacgtccgaggtcaccgggatgggcacgctgtaatcctacccagcacccttcccccgcgtcacccacctgccagagcctaaggcccccggctctcgcactctgtacagcccaccttccctgcctcacagataccaatagagaggttttcttaattaacaaaaggacgtatgccatggagaaacacacccgcgcacacagctgctctctacagaggctgcaggctccgccgagtcccccctcagtgttattttatttatgacttacgctcccgtctgcccatgcaccggcatgcagtggtaattattttagaaatattgttccttggtgtcagcgtagctgtctgtcttaggagctgggtcggcgttccgacagcacttcctgtccgcccttctcctctgccatccagaaccgtccagaactgttgcctgagacccctcctctctcacacagccctgccatgctgactcggtttcccctcagagccattgttgtctgggctcgagtttctgccccaggttgtgtgctggaatcggggggtggctctcctgccacccatggggagcgccaggagaggagggtcatggaggatgttggggctctgaccccaggagtggggtggagggcggagcctgctgggggccctgccttcacagagatgccgcgtgctgggaaggctcttggggtcccctgagcgtcttccagggtggctggagagcacagacgcgccagggagccccctctgtgctcctcagagttcaataaatgtcgtggcccctcctca

SEQ ID NO: 47824 - DNA, 1911 bp, Artificial Sequence
  derived and/or modified sequence
gtcggtaggctccacgacaaaagtcaacccttctgtaaatcacctgctgtggttatgatgctctgagttcaatacgtctgaacctttgctgtctatggatctgctctaaaccttatagcctgcttatgggggaaggtgacgccttctgggccccatctgtccttcctcacagcaccctcagcaccttaagccaccaccctcagccacaatttggcagaaggatggagtccaaggtctcagaaggtggcctgaatgtgaccctcaccatccgcctgctgatgcatggaaaggaagttggaagcatcatcgggaagaaaggagaaactgtgaagaagatgcgtgaggagagtggtgcaaggatcaacatctcagagggaaactgcccagagaggattgtgaccatcacaggccccacagacgccatcttcaaggcctttgccatgatcgcatacaagtttgaggaggatatcatcaactccatgagcaacagccctgccaccagcaagcccccagtgacgctgaggctggtggtgcctgccagccagtgtgggtccctgatcggcaaaggaggctccaagatcaaggagatcagggagtccacaggtgcccaggtgcaggtggctggggacatgctgcccaactccacggagcgagcggtgaccatctcggggaccccagatgccatcatccagtgcgtcaagcagatctgtgtggtcatgctggaggcctacacaatccagggacagtatgccatccctcacccggatttgaccaagctccaccagttggccatgcagcaaaccccctttcctcccctcggacagaccaaccccgctttccccggagaaaagctgcctttacactcctccgaagaagctcaaaatctgatgggccagtcatcaggtctggacgccagcccaccggccagcactcatgagctcaccattcccaatgatctaataggctgcataattggacgccaagggaccaaaatcaatgaaattcgacagatgtctggagctcagatcaaaatcgccaacgccacggaagggtcctcagagcgtcagatcaccatcacggggaccccggccaacatcagccttgcccagtatctcatcaacgccaggctgacgtccgaggtcaccgggatgggcacgctgtaatcctacccagcacccttcccccgcgtcacccacctgccagagcctaaggcccccggctctcgcactctgtacagcccaccttccctgcctcacagataccaatagagaggttttcttaattaacaaaaggacgtatgccatggagaaacacacccgcgcacacagctgctctctacagaggctgcaggctccgccgagtcccccctcagtgttattttatttatgacttacgctcccgtctgcccatgcaccggcatgcagtggtaattattttagaaatattgttccttggtgtcagcgtagctgtctgtcttaggagctgggtcggcgttccgacagcacttcctgtccgcccttctcctctgccatccagaaccgtccagaactgttgcctgagacccctcctctctcacacagccctgccatgctgactcggtttcccctcagagccattgttgtctgggctcgagtttctgccccaggttgtgtgctggaatcggggggtggctctcctgccacccatggggagcgccaggagaggagggtcatggaggatgttggggctctgaccccaggagtggggtggagggcggagcctgctgggggccctgccttcacagagatgccgcgtgctgggaaggctcttggggtcccctgagcgtcttccagggtggctggagagcacagacgcgccagggagccccctctgtgctcctcagagttcaataaatgtcgtggcccctcctca

SEQ ID NO: 47825 - DNA, 243 bp, Artificial Sequence
  derived and/or modified sequence
ctctacttcagcccttcatttcctggtagccactgagctgccccatggacactgggcagatggccagtgttagctgggaaggacagcagcagccgcagaggtggcagcaaggccagggcactttgcagacggcatggacgggtgacgccttctgggccccatctgtccttcctcacagcaccctcagcaccttaagccaccaccctcagccacaatttggcagaaggatggagtccaaggtct

SEQ ID NO: 47826 - DNA, 969 bp, Artificial Sequence
  derived and/or modified sequence
ccacaaccacagttcggccgaaggatggaatccaaggtgtcagagggaggactcaacgtgaccctgactattaggttacttatgcatggcaaagaagttgggtctattatcggaaagaaaggcgagacagtgaagaagatgcgggaagaaagtggagctaggattaacatttcggaaggaaattgtcctgagagaatcgtgacaatcaccgggccaactgacgctatttttaaagccttcgcgatgattgcgtacaaattcgaagaggacatcattaattctatgagtaactctccagccacaagcaagccacccgtgacgctcaggctggtcgtcccagcctcccagtgtggctcgctgatcggcaagggagggagtaagatcaaggagatccgcgagtcaaccggagcgcaggtgcaagtggctggagatatgctgcccaactctacagagcgcgcagtgaccatctctggcactccagatgctataatccagtgtgtgaaacaaatctgtgtggtgatgctggaggcttacacaatccaggggcagtacgctatcccacacccagaccagctgaccaaattgcaccaactcgcaatgcagcagactccgtttcctcccctcggacagactaaccccgcattccccggagagaagctgcctctacactcatctgaggaggcccaaaatctgatgggccagtcctccggcctggatgccagcccccctgcctccactcatgagctgacaattccaaatgaccttattggctgcataattgggaggcaggggaccaaaattaacgaaattagacagatgtctggagcacagattaagattgctaacgcaaccgaaggtagctcagagagacagattactattaccgggacgcccgcaaacatttccctggcgcagtacctgatcaatgcacggttaactagcgaagtcacagggatggggacgctctag

SEQ ID NO: 47827 - DNA, 1038 bp, Artificial Sequence
  derived and/or modified sequence
atgggcgaaggggacgctttttgggctccctctgtgctcccacacagcacactcagcaccctttctcatcacccccagccccagtttggccgacggatggagagcaaagtatcggagggcggtctcaatgttacgctgactatcagacttctcatgcacggtaaggaagtcggatccatcatagggaaaaagggagaaaccgtcaagaaaatgcgtgaggaatcgggagcaaggattaatataagcgaaggcaactgccccgaaaggatagtgacgattaccgggccaaccgacgctattttcaaagcctttgccatgatcgcgtacaaattcgaggaggatatcatcaactcgatgtctaacagtccagcgacatctaagccacccgtgacattgcggctggtggtgccggcttctcagtgtgggtcattgatcggcaaagggggatcgaagatcaaagagattagagaatctaccggcgctcaggtgcaggttgcaggcgatatgttgccgaactcaacagaaagggccgtaaccatctccggaacccccgatgccattattcagtgcgtgaagcagatttgcgtggtgatgttggaagcatacaccatccagggtcagtatgctattccacatccagacttgactaaactgcaccaacttgccatgcagcagacccccttccccccacttggccagactaatccagctttccctggtgagaagttgcccctgcactcatccgaagaggctcagaatcttatggggcagtccagtgggctggatgcatcgcctcctgctagtactcacgagctcactatacccaatgatctgatcggctgcatcatcgggcgacaggggactaaaattaacgagattcgccaaatgagcggcgctcaaatcaaaatcgcaaacgctaccgagggctctagcgagcgccaaatcacaattaccggcacacctgccaatatttctctggcacaatatctaatcaacgcaaggctgacgtccgaggtgacaggtatggggacactgtag

SEQ ID NO: 47828 - DNA, 969 bp, Artificial Sequence
  derived and/or modified sequence
ccccagccccagttcggcagaagaatggagagcaaggtgagcgagggcggcctgaacgtgaccctgaccatcagactgctgatgcacggcaaggaggtgggcagcatcatcggcaagaagggcgagaccgtgaagaagatgagagaggagagcggcgccagaatcaacatcagcgagggcaactgccccgagagaatcgtgaccatcaccggccccaccgacgccatcttcaaggccttcgccatgatcgcctacaagttcgaggaggacatcatcaacagcatgagcaacagccccgccaccagcaagccccccgtgaccctgagactggtggtgcccgccagccagtgcggcagcctgatcggcaagggcggcagcaagatcaaggagatcagagagagcaccggcgcccaggtgcaggtggccggcgacatgctgcccaacagcaccgagagagccgtgaccatcagcggcacccccgacgccatcatccagtgcgtgaagcagatctgcgtggtgatgctggaggcctacaccatccagggccagtacgccatcccccaccccgaccagctgaccaagctgcaccagctggccatgcagcagacccccttcccccccctgggccagaccaaccccgccttccccggcgagaagctgcccctgcacagcagcgaggaggcccagaacctgatgggccagagcagcggcctggacgccagcccccccgccagcacccacgagctgaccatccccaacgacctgatcggctgcatcatcggcagacagggcaccaagatcaacgagatcagacagatgagcggcgcccagatcaagatcgccaacgccaccgagggcagcagcgagagacagatcaccatcaccggcacccccgccaacatcagcctggcccagtacctgatcaacgccagactgaccagcgaggtgaccggcatgggcaccctgtag

SEQ ID NO: 47829 - DNA, 1038 bp, Artificial Sequence
  derived and/or modified sequence
atgggcgagggcgacgccttctgggcccccagcgtgctgccccacagcaccctgagcaccctgagccaccacccccagccccagttcggcagaagaatggagagcaaggtgagcgagggcggcctgaacgtgaccctgaccatcagactgctgatgcacggcaaggaggtgggcagcatcatcggcaagaagggcgagaccgtgaagaagatgagagaggagagcggcgccagaatcaacatcagcgagggcaactgccccgagagaatcgtgaccatcaccggccccaccgacgccatcttcaaggccttcgccatgatcgcctacaagttcgaggaggacatcatcaacagcatgagcaacagccccgccaccagcaagccccccgtgaccctgagactggtggtgcccgccagccagtgcggcagcctgatcggcaagggcggcagcaagatcaaggagatcagagagagcaccggcgcccaggtgcaggtggccggcgacatgctgcccaacagcaccgagagagccgtgaccatcagcggcacccccgacgccatcatccagtgcgtgaagcagatctgcgtggtgatgctggaggcctacaccatccagggccagtacgccatcccccaccccgacctgaccaagctgcaccagctggccatgcagcagacccccttcccccccctgggccagaccaaccccgccttccccggcgagaagctgcccctgcacagcagcgaggaggcccagaacctgatgggccagagcagcggcctggacgccagcccccccgccagcacccacgagctgaccatccccaacgacctgatcggctgcatcatcggcagacagggcaccaagatcaacgagatcagacagatgagcggcgcccagatcaagatcgccaacgccaccgagggcagcagcgagagacagatcaccatcaccggcacccccgccaacatcagcctggcccagtacctgatcaacgccagactgaccagcgaggtgaccggcatgggcaccctgtag

SEQ ID NO: 47830 - protein, 1303 aa, Artificial Sequence
  derived and/or modified sequence
MPGPRGAAGGLAPEMRGAGAAGLLALLLLLLLLLLGLGGRVEGGPAGERGAGGGGALARERFKVVFAPVICKRTCLKGQCRDSCQQGSNMTLIGENGHSTDTLTGSGFRVVVCPLPCMNGGQCSSRNQCLCPPDFTGRFCQVPAGGAGGGTGGSGPGLSRTGALSTGALPPLAPEGDSVASKHAIYAVQVIADPPGPGEGPPAQHAAFLVPLGPGQISAEVQAPPPVVNVRVHHPPEASVQVHRIESSNAESAAPSQHLLPHPKPSHPRPPTQKPLGRCFQDTLPKQPCGSNPLPGLTKQEDCCGSIGTAWGQSKCHKCPQLQYTGVQKPGPVRGEVGADCPQGYKRLNSTHCQDINECAMPGVCRHGDCLNNPGSYRCVCPPGHSLGPSRTQCIADKPEEKSLCFRLVSPEHQCQHPLTTRLTRQLCCCSVGKAWGARCQRCPTDGTAAFKEICPAGKGYHILTSHQTLTIQGESDFSLFLHPDGPPKPQQLPESPSQAPPPEDTEEERGVTTDSPVSEERSVQQSHPTATTTPARPYPELISRPSPPTMRWFLPDLPPSRSAVEIAPTQVTETDECRLNQNICGHGECVPGPPDYSCHCNPGYRSHPQHRYCVDVNECEAEPCGPGRGICMNTGGSYNCHCNRGYRLHVGAGGRSCVDLNECAKPHLCGDGGFCINFPGHYKCNCYPGYRLKASRPPVCEDIDECRDPSSCPDGKCENKPGSFKCIACQPGYRSQGGGACRDVNECAEGSPCSPGWCENLPGSFRCTCAQGYAPAPDGRSCLDVDECEAGDVCDNGICSNTPGSFQCQCLSGYHLSRDRSHCEDIDECDFPAACIGGDCINTNGSYRCLCPQGHRLVGGRKCQDIDECSQDPSLCLPHGACKNLQGSYVCVCDEGFTPTQDQHGCEEVEQPHHKKECYLNFDDTVFCDSVLATNVTQQECCCSLGAGWGDHCEIYPCPVYSSAEFHSLCPDGKGYTQDNNIVNYGIPAHRDIDECMLFGSEICKEGKCVNTQPGYECYCKQGFYYDGNLLECVDVDECLDESNCRNGVCENTRGGYRCACTPPAEYSPAQRQCLSPEEMDVDECQDPAACRPGRCVNLPGSYRCECRPPWVPGPSGRDCQLPESPAERAPERRDVCWSQRGEDGMCAGPLAGPALTFDDCCCRQGRGWGAQCRPCPPRGAGSHCPTSQSESNSFWDTSPLLLGKPPRDEDSSEEDSDECRCVSGRCVPRPGGAVCECPGGFQLDASRARCVDIDECRELNQRGLLCKSERCVNTSGSFRCVCKAGFARSRPHGACVPQRRR

SEQ ID NO: 47831 - protein, 306 aa, Artificial Sequence
  derived and/or modified sequence
MLFGSEICKEGKCVNTQPGYECYCKQGFYYDGNLLECVDVDECLDESNCRNGVCENTRGGYRCACTPPAEYSPAQRQCLSPEEMDVDECQDPAACRPGRCVNLPGSYRCECRPPWVPGPSGRDCQLPESPAERAPERRDVCWSQRGEDGMCAGPLAGPALTFDDCCCRQGRGWGAQCRPCPPRGAGSHCPTSQSESNSFWDTSPLLLGKPPRDEDSSEEDSDECRCVSGRCVPRPGGAVCECPGGFQLDASRARCVDIDECRELNQRGLLCKSERCVNTSGSFRCVCKAGFARSRPHGACVPQRRR

SEQ ID NO: 47832 - protein, 1137 aa, Artificial Sequence
  derived and/or modified sequence
MTLIGENGHSTDTLTGSGFRVVVCPLPCMNGGQCSSRNQCLCPPDFTGRFCQVPAGGAGGGTGGSGPGLSRTGALSTGALPPLAPEGDSVASKHAIYAVQVIADPPGPGEGPPAQHAAFLVPLGPGQISAEVQAPPPVVNVRVHHPPEASVQVHRIESSNAESAAPSQHLLPHPKPSHPRPPTQKPLGRCFQDTLPKQPCGSNPLPGLTKQEDCCGSIGTAWGQSKCHKCPQLQYTGVQKPGPVRGEVGADCPQGYKRLNSTHCQDINECAMPGVCRHGDCLNNPGSYRCVCPPGHSLGPSRTQCIADKPEEKSLCFRLVSPEHQCQHPLTTRLTRQLCCCSVGKAWGARCQRCPTDGTAAFKEICPAGKGYHILTSHQTLTIQGESDFSLFLHPDGPPKPQQLPESPSQAPPPEDTEEERGVTTDSPVSEERSVQQSHPTATTTPARPYPELISRPSPPTMRWFLPDLPPSRSAVEIAPTQVTETDECRLNQNICGHGECVPGPPDYSCHCNPGYRSHPQHRYCVDVNECEAEPCGPGRGICMNTGGSYNCHCNRGYRLHVGAGGRSCVDLNECAKPHLCGDGGFCINFPGHYKCNCYPGYRLKASRPPVCEDIDECRDPSSCPDGKCENKPGSFKCIACQPGYRSQGGGACRDVNECAEGSPCSPGWCENLPGSFRCTCAQGYAPAPDGRSCLDVDECEAGDVCDNGICSNTPGSFQCQCLSGYHLSRDRSHCEDIDECDFPAACIGGDCINTNGSYRCLCPQGHRLVGGRKCQDIDECSQDPSLCLPHGACKNLQGSYVCVCDEGFTPTQDQHGCEEVEQPHHKKECYLNFDDTVFCDSVLATNVTQQECCCSLGAGWGDHCEIYPCPVYSSAEFHSLCPDGKGYTQDNNIVNYGIPAHRDIDECMLFGSEICKEGKCVNTQPGYECYCKQGFYYDGNLLECVDVDECLDESNCRNGVCENTRGGYRCACTPPAEYSPAQRQCLSPEEMDVDECQDPAACRPGRCVNLPGSYRCECRPPWVPGPSGRDCQLPESPAERAPERRDVCWSQRGEDGMCAGPLAGPALTFDDCCCRQGRGWGAQCRPCPPRGAGSHCPTSQSESNSFWDTSPLLLGKPPRDEDSSEEDSDECRCVSG

SEQ ID NO: 47833 - DNA, 3912 bp, Artificial Sequence
  derived and/or modified sequence
atgccaggaccccggggcgccgccgggggtctcgcgccagaaatgaggggggccggggccgcagggcttcttgcccttttactgctcttactcctgctgcttctcggtctcggtggcagagttgaaggtggccccgcaggcgagcgcggcgctggtggaggtggagcactggcccgggaacgctttaaggttgtttttgccccagttatctgcaagcggacttgtcttaaggggcagtgtagggatagctgccagcagggctcaaatatgacgctcatcggagaaaatggacactctacagacacactcactggtagcggcttcagggtggtggtctgccctctgccctgcatgaacgggggccaatgcagctcaaggaaccaatgtctttgcccccccgattttaccgggcggttctgtcaggttcccgccggaggcgctggtggaggtactggggggagtggccccggtctatcgaggacaggggccttgtcgaccggcgcccttccaccactggcgccggagggtgattcagtggccagcaagcacgccatttatgccgtgcaggtcatagctgacccccctggcccgggcgaggggccacctgcccagcatgctgctttcctcgtgcccctgggacctggtcaaatctcagcagaggtccaggcacccccacctgtcgtcaatgtaagggtgcatcacccccctgaggcgtctgtgcaggtacaccgaattgagagctctaacgctgagagcgcagctccaagccagcatctcctgccccaccctaaaccaagccaccctcgcccccctacgcagaaaccactgggacgttgttttcaggacacactccccaagcaaccttgtgggtcgaaccctctgcctgggctaaccaagcaagaagactgttgcggttccattggaaccgcttggggtcaatcaaaatgtcacaaatgtccgcaactgcaatacactggcgtccagaaacccgggcctgtccggggtgaggtgggggccgactgccctcagggatacaagcggctcaattccacccactgccaggacattaatgaatgtgccatgccaggggtgtgtaggcacggagattgcctaaataatccgggatcctacaggtgcgtttgtcccccaggccactcccttggccccagcaggacccagtgtattgcagacaagcctgaggagaagagcctttgttttaggctcgtaagcccagagcatcagtgtcagcacccactgacaacccgtttaacccgacaactatgctgttgttcggtgggaaaggcctggggtgcccgttgtcagcgctgtccgacggatggtacagcagcctttaaagagatatgcccagccggcaaaggctaccacattctcaccagtcaccagaccctgaccattcagggcgaatcagactttagcttgttccttcacccagacggtcccccgaagcctcagcagcttccagagtctcccagccaggccccacctccagaagacacggaagaggagcgcggagtgacgactgactcccctgtaagcgaggagcgtagtgtgcagcaaagccaccccacagctactacaacccctgcacgaccctatcccgagctcatttcccgcccctcaccgcccacaatgcggtggttcctgccagatctcccgccttctcgctccgcagtagagattgctccaacacaggtcactgaaaccgacgagtgccggttgaatcagaacatatgcggtcacggagagtgtgtccctggcccccccgattacagctgccactgcaatcccgggtatcggagccatccccaacaccggtactgtgtagacgtaaacgagtgcgaagctgaaccatgtgggcccggacgcggcatctgtatgaacacaggcggatcatataactgtcattgcaaccgcggttaccgcctgcatgtgggcgctggaggccggagttgtgtagacttgaacgagtgcgccaagccccacctgtgtggtgatgggggcttctgtatcaatttccctgggcactacaagtgtaattgttaccccgggtatcggctaaaggcttcccggccacccgtttgcgaggacatcgatgaatgcagagatccctcatcctgtcccgacggaaagtgcgaaaataagcccggaagctttaaatgcattgcctgccaaccgggctataggagtcagggcggcggagcttgccgcgacgtcaatgagtgtgcggaaggttcaccttgctctcccggctggtgtgagaatctgccaggatcatttcggtgtacgtgcgcccaaggttacgcccctgcccctgacggtaggagctgcctcgatgtggacgaatgtgaagctggtgacgtctgtgataacggcatctgctcaaacactcccggaagcttccaatgccagtgcctctctggctatcacctgtctcgagatagaagtcactgtgaagatatagacgagtgcgattttcccgcagcttgtattggaggggactgcatcaacaccaacggatcgtatcgctgcctgtgtcctcagggtcatcggctggtgggaggcaggaagtgccaggatattgacgagtgctcacaggacccctcactgtgtttaccacatggtgcatgtaaaaatctacagggtagttacgtctgtgtgtgcgacgagggcttcacacctacccaggatcagcacggatgtgaagaggtcgagcaacctcatcacaagaaggaatgctatctgaatttcgatgacaccgtcttctgtgattcagtgctggccacaaatgtgacccagcaggagtgttgctgctccttgggagcagggtggggagatcactgcgagatatacccctgccccgtctacagttccgccgagtttcactctctgtgtccggatggcaaggggtatacacaggacaacaacattgtgaactacggcattcccgcccatagggacatcgatgagtgtatgctgtttgggtctgaaatctgtaaagagggtaaatgtgtcaatacacagccaggctatgagtgctactgcaaacaaggattctactacgacggcaatctccttgagtgtgtagatgtcgacgagtgcttagacgagtcgaattgtcgaaacggcgtgtgcgaaaatacgcggggaggctatcggtgtgcatgtactccgcccgccgagtattctcctgcccagcggcaatgtttatctcccgaggagatggatgtggatgagtgtcaagatccggccgcttgtcggcccggacggtgcgtcaaccttccgggaagctacagatgtgagtgtaggccaccctgggtcccgggtccgtctggccgggattgtcaactgcccgaatcacctgctgagagagccccagaacgtcgcgacgtatgttggtctcagaggggcgaagatggcatgtgcgcaggtcctctagccggaccagctcttacgttcgacgactgctgttgccgtcagggtagagggtggggcgcccagtgtcggccgtgcccaccgagaggcgcaggctctcattgccctacttcccagtcagaatcaaactctttctgggatactagccctcttctgctgggaaagcctcctcgagatgaagattcatctgaagaggattctgatgagtgcagatgtgtatccggccggtgcgtccccagaccaggtggagccgtgtgcgagtgccctggaggctttcagctggatgcaagcagagcccgctgcgtggacattgatgaatgcagagagttgaaccagcgaggtctgctttgcaaatcagaaaggtgcgtcaacacttccggatcatttagatgcgtctgtaaagctgggtttgctaggtctcggccccacggggcatgcgtgcctcaacgcaggagatag

SEQ ID NO: 47834 - DNA, 792 bp, Artificial Sequence
  derived and/or modified sequence
atgctcttcggcagcgagatttgtaaagaaggaaaatgtgttaacacccagcctgggtatgaatgctactgcaagcagggattctattacgacggtaatttgttggaatgtgtggatgtagatgagtgtttggacgagtctaattgtaggaacggtgtctgcgagaacactcggggtggataccggtgtgcttgcacacctccagctgagtactcgccggcccagcggcagtgcctcagtccggaagagatggatgtggacgaatgccaggatccagcagcctgtagacccggccggtgtgtgaacctgcccgggagttaccggtgtgaatgtaggcccccgtgggtgcccggccccagtggaagggactgtcagcttcccgaaagccccgcagagagagctccagagcggagggacgtgtgttggagccaacggggagaggatgggatgtgcgcgggaccactagcagggcccgctctcactttcgatgactgctgctgcagacagggaagaggctggggcgctcagtgccggccatgtccccctcgcggggcaggcagccactgtcccacaagtcagagtgagtcaaattcattttgggatacaagccccctactgctgggtaaaccgcccagggatgaagatagctcagaggaggacagcgatgaatgtcgctgcgtgtcggctgccgcctgccggggtagagctgccccatgtgcttcagtcccagctgccagctctagtaccccgcctgccccggcagcgtggataagcacttcggctgagtcatag

SEQ ID NO: 47835 - DNA, 921 bp, Artificial Sequence
  derived and/or modified sequence
atgctctttggatcagaaatctgcaaggagggcaaatgtgtcaacactcagcccggctatgagtgttactgtaaacagggattttactacgacggcaacctgctcgagtgtgtggatgttgatgagtgcttggatgagtctaattgtagaaatggggtctgcgagaacacaaggggcggatacagatgcgcatgcacccctcctgccgagtattccccggctcagagacagtgtctcagccccgaagagatggatgtggatgagtgccaggaccctgccgcctgccgccctggccgatgtgtcaatttgccaggttcatatagatgcgagtgcaggcccccctgggtccccggtccttctggacgggactgtcagctcccggagagtccagccgagcgcgcccctgagaggcgggacgtgtgttggagccagcgcggcgaagacggtatgtgtgccgggccactcgcgggcccagccctgaccttcgacgactgctgctgccgacaaggccggggctggggcgctcagtgtcggccatgccctccccggggagccgggagtcactgccctacttctcagagtgaatctaattcattctgggatacatcccctcttttgctaggaaagccaccacgcgacgaagattcatccgaggaggactccgatgagtgcagatgtgtctctggacggtgtgtgccacgaccaggcggcgcggtctgtgaatgtcccggtggattccagctggatgcctctcgcgctcgatgtgtggacattgatgagtgtagggaactcaatcagagagggttgctatgcaagtctgagcgctgcgtcaacaccagcggctcctttagatgtgtatgcaaagccggtttcgcacgatccaggccacacggggcctgtgtcccacagagacggcggtag

SEQ ID NO: 47836 - DNA, 3414 bp, Artificial Sequence
  derived and/or modified sequence
atgaccctaatcggtgagaatggacactccacggacactctcacgggatccggttttcgtgtcgtagtttgtcctctgccatgcatgaacggggggcagtgctcttctcggaaccagtgcctgtgcccccccgacttcacggggaggttttgtcaagtgcccgccgggggagctggtggaggaaccggcggcagcggtcctggactgtccaggacaggcgcactgtctacaggcgctctgcccccacttgcccccgagggcgactccgtggcctccaagcacgctatctacgccgtgcaagtaattgcagacccccctggacccggagaaggcccccccgcccagcacgccgcttttctggtaccactgggcccggggcagatttccgccgaagtacaggctccgcctccagtggtgaatgtgcgtgtgcaccatccaccggaagcgagtgtacaggttcataggatagagtcatccaacgccgagtcagcggccccctctcaacacctactgccacaccccaagccatctcatcccagaccacccacacagaagccactgggcaggtgttttcaggacaccttgccgaaacagccttgcgggagtaaccctctaccaggcttgactaagcaagaagattgctgtgggagtatcgggaccgcttggggacagagcaaatgccacaaatgcccccaactgcagtataccggcgtccagaagcccggacctgtgagaggcgaggtgggggccgattgtccccagggatacaagcgcttaaattccactcattgtcaggacatcaatgaatgtgctatgccaggagtctgtaggcacggagattgcctgaacaacccgggcagctacaggtgcgtttgcccgccaggccacagtttaggaccctcaaggactcaatgtatcgccgacaagcctgaggagaaaagcttgtgctttcggcttgtatctcccgagcaccagtgtcagcatccgctgaccactaggctcacccggcagctgtgctgttgctctgtggggaaggcatggggtgctcgttgccagcgatgtcccaccgatgggacagccgcctttaaagaaatctgtcccgctgggaaggggtaccatatactgacctctcaccagacactcaccatccagggagagtcagatttctccctgttcctgcatccagatgggccaccaaagccccagcagctgccagaatctccttcccaggcgcccccacctgaggacacagaagaggagcggggcgttacaaccgattcacccgtaagcgaggagcggtctgtgcagcaatctcatccaaccgctactaccacgccagctaggccatacccagaactcatctcccggcccagtcccccaaccatgcgctggtttttgcctgatctgccgccctcacggtcagctgttgaaatagctcctacccaggtgaccgaaactgacgagtgtcggctgaaccaaaacatctgcgggcatggtgagtgtgtgcccggtccccctgactattcttgccattgcaatcctgggtacagatctcacccacagcacaggtactgtgtggacgtgaatgagtgcgaggctgaaccatgtggcccaggcaggggcatctgtatgaatactgggggatcttacaattgtcactgtaacaggggatatcgattgcacgtcggggccggagggagatcatgtgttgacttaaatgaatgtgccaaaccgcatctctgtggtgacgggggtttctgtattaatttccctgggcactataagtgcaactgctatcctggttataggttgaaagcctcgcggcctcccgtctgtgaagatatagacgagtgcagggatccctcaagttgtccagatggcaagtgcgaaaacaagccaggcagcttcaagtgtatcgcatgccagcctggttacagaagtcaggggggcggtgcctgccgcgacgtgaacgagtgcgctgagggctcaccatgctcccctgggtggtgcgagaacctgccaggatcattccggtgtacatgtgcgcaggggtacgcacctgcacctgacggtagatcatgccttgacgtcgacgagtgtgaagcgggagacgtctgtgataacggcatatgcagcaacacaccaggctcgtttcagtgccagtgtttatctggataccacctgagcagagaccgctctcactgcgaagatatcgatgagtgtgacttcccagccgcctgcatagggggggattgcatcaataccaatggttcctatagatgtttgtgcccgcaaggacacagattggtgggcggtaggaaatgtcaggatatagacgagtgctctcaggaccctagcctgtgtcttccacacggggcttgcaaaaacctacagggttcatacgtatgtgtgtgcgacgagggattcactcctacccaagaccagcacgggtgcgaggaagtggagcagccccaccacaagaaggaatgctacctcaactttgatgatacagtcttttgtgactctgtgctcgccaccaacgtgacccagcaagagtgttgctgttctctgggtgcaggctggggcgaccactgtgagatctacccatgtcctgtctatagcagcgcagagtttcactccctgtgtcctgacggcaagggatacacacaggacaataatattgtcaattacggtatacctgcccacagagacatagacgaatgcatgcttttcgggtctgaaatctgtaaggagggcaagtgcgtgaatacacagccaggatatgaatgttactgcaagcagggcttttactatgatggcaatctcctagaatgtgtggacgtggatgagtgcctggacgagtcaaactgcagaaacggggtctgtgaaaacactagaggaggatacagatgtgcttgcacacctccagccgaatattctcccgcacagaggcagtgcctgtctccagaagaaatggatgttgatgaatgccaagatccagccgcttgtcgtccggggagatgcgtgaacttacccggctcttaccgctgcgaatgcagacctccctgggtgccagggccatcaggaagggattgtcagctgccagaatctcctgcagagagggccccggagcggcgggatgtttgttggtcacagagaggagaagacggtatgtgtgcggggccacttgcagggccagcattgacattcgacgattgttgctgccggcagggtagaggctggggtgcacagtgccggccctgtcccccccgcggcgctggttcacactgcccaacatcccagtctgaatctaatagcttttgggacacatcacccctgttacttggtaaaccccctagagacgaggactcctccgaggaagattctgatgaatgtagatgcgtgtcaggttag

SEQ ID NO: 47837 - DNA, 2202 bp, Artificial Sequence
  derived and/or modified sequence
atgcccgccgagacggatgagtgccggcttaatcagaatatttgcggtcatggagaatgtgtacctggtcctcccgattactcatgtcactgcaaccccggctacagatcacacccccaacaccggtattgcgtggacgtcaacgaatgcgaggccgagccctgcggcccgggtaggggcatctgcatgaatactggtggctcatataattgccattgcaatagagggtatcggctgcatgtgggtgctggcggtcgatcctgcgttgacttaaacgagtgcgccaaaccccacctttgcggcgacggtggattctgtattaactttcccgggcactataagtgtaattgttaccccggttaccgcctgaaagcctcccgacctcctgtatgcgaggatattgacgagtgccgagacccctccagctgccctgatggaaaatgtgaaaacaaaccaggcagtttcaagtgtatagcctgccaacccggctatcgttcacagggcgggggagcttgccgagatgtcaatgaatgcgcagaaggatctccttgcagtcctgggtggtgcgagaatcttcccggttcctttaggtgtacatgcgctcaaggctacgcgccagctccagatggccgttcttgcctggacgtggatgagtgtgaagctggagacgtctgtgataatgggatttgctcgaatacaccgggcagtttccaatgccagtgcctcagtgggtaccatctgtcccgggatcgctctcactgcgaggatatcgacgaatgcgacttccctgctgcctgtatcgggggagactgtattaataccaacggcagctaccggtgcctgtgtccccaaggtcacagacttgtcggcggaaggaagtgtcaggacattgatgaatgctcccaagatcccagcctctgtctccctcacggcgcatgtaagaaccttcaaggctcatacgtctgcgtttgtgatgagggcttcacacctactcaagaccagcatgggtgcgaggaggtagagcagccacatcacaagaaggaatgttacctcaactttgacgacacagtcttttgtgacagcgttctggctactaacgtgacacagcaagagtgctgttgcagtctcggcgccggctggggcgatcattgcgagatctatccatgtcctgtgtattcctcagcagaattccactcattatgtcctgatggtaaagggtatactcaggacaataatatagtgaactatggaatccctgcacacagagatattgacgagtgcatgttattcggaagcgagatttgcaaggaaggcaaatgcgtgaatactcagccggggtacgaatgttactgcaaacaagggttctattacgacggaaatctgctggagtgcgtggatgtggatgagtgccttgatgaatccaactgtagaaatggtgtgtgcgagaacacccgcggtggctaccggtgtgcttgtacccctcccgcagagtatagtccagctcaacgccagtgtctgtcccccgaggagatggatgtggacgagtgccaagaccccgccgcttgtcggccaggccgttgcgtaaacctcccaggcagctacagatgtgagtgtcggcccccgtgggttcccgggccatcaggacgggattgccagttgccggagagcccagccgaaagggccccggagcgacgggatgtgtgctggagccagcgtggcgaagacgggatgtgcgcaggtcccctggccggacctgctctgacgtttgacgattgttgctgtagacagggccggggctggggagcccagtgtcgaccatgcccgccaaggggcgccggaagtcactgtcctacttcccagagcgaatctaactcattttgggacacatcccccctgttattaggaaagcccccacgcgatgaggatagctcggaagaagacagtgatgagtgtcggtgtgtgtctggtcgatgtgttccaaggccgggcggggcagtgtgcgagtgccccggcgggtttcagctggatgcgagtagagcgcggtgcgtggacatcgacgagtgtagggagctgaatcagagaggtcttctgtgcaaaagtgagagatgtgtgaacactagtggttctttcagatgcgtatgcaaggctggcttcgcccgatcccgcccccatggtgcctgcgttccacagcgaagaaggtag

SEQ ID NO: 47838 - DNA, 4443 bp, Artificial Sequence
  derived and/or modified sequence
cttgctccggcctcctcgctcctgcctgagttcggggcctggtctgggcttcgtcctggggctgggaagtttctgcgctccccgctgtccagtctgcatctccgcgcctcccgccgggcccccgcggtcccctcccgcccgcttcccccgctgccctccctcgctgccccctaccctctcccggggctcccggccctctactcccttcgggcgcgggcccctcgccccgcccgggcgcgccccccctcccccgggtcctgcggccccggatgcccgggccccgaggggctgctggcggcctggcccctgagatgcgcggggcgggggcggcggggctgctggcgctgctgctgctgctgctgctgctgctgctgggcctgggcggcagggtcgagggggggccggccggcgagcggggcgcaggcgggggcggggcgctggcccgcgagcgcttcaaggtggtctttgcgccggtgatctgcaagcggacctgtctcaagggccagtgtcgggacagttgtcagcagggctccaacatgacgctcatcggagagaacggccacagcacagacacgctcacgggctccggcttccgcgtggtggtgtgccctctcccctgcatgaatggcggccagtgctcctcgcgaaaccagtgcctgtgtcccccggacttcactgggcgcttctgccaggtgcccgcaggaggagccggtgggggtaccggcggctcaggccccggcctgagcaggacaggggccctgtccacaggggcgctgccgcccctggctccggagggcgactctgtggccagcaagcacgccatctacgccgtccaggtgatcgctgaccctcctgggcccggggaggggcctcctgcccagcacgcagccttcctggtgcccctaggcccgggacagatctcagcagaagtgcaggccccgccccccgtggtgaatgtgcgcgtccatcacccgcccgaggcctcagtccaggtgcaccgcattgagagctcgaacgccgagagcgcagccccctcccagcacctgctgccgcaccccaagccctcgcacccccggccgcccacccagaagcccctgggccgctgctttcaggacactctgcccaagcagccgtgtggcagcaaccccctccccggcctcaccaagcaggaagactgctgcggtagcatcggcactgcctggggccagagcaagtgccacaagtgtccccagctgcagtacacaggagtgcagaagccagggcctgtacgtggggaagtgggcgctgactgtccccagggctacaagaggcttaacagcacccactgccaggacatcaacgagtgcgcaatgccgggcgtgtgtcgccatggtgactgcctcaacaaccctggctcctatcgctgtgtctgcccacctggccatagtttaggcccctcccgtacacagtgcattgcagacaaaccggaggagaagagcctgtgtttccgcctggtgagccctgagcaccagtgccagcacccactgaccacccgcctgacccgccagctctgctgctgcagtgtcggcaaggcctggggcgcgcggtgtcagcgctgcccaacagatggcaccgctgcgttcaaggagatctgcccagctgggaagggataccacattctcacctcccaccagacgctcaccattcagggcgagagtgacttttcccttttcctgcaccctgacgggccacccaagccccagcagcttccggagagccctagccaggctccaccacctgaggacacagaggaagagagaggggtgaccacggactcaccggtgagtgaggagaggtcagtgcagcagagccacccaactgccaccacgactcctgcccggccctaccccgagctgatctcccgtccctcgcccccgaccatgcgctggttcctgccggacttgcctccttcccgcagcgccgtagagatcgctcccactcaggtcacagagactgatgagtgccgactgaaccagaacatctgtggccacggagagtgcgtgccgggcccccctgactactcctgccactgcaaccccggctaccggtcacatccccagcaccgctactgcgtggatgtgaacgagtgcgaggcagagccctgtggcccggggaggggcatctgcatgaacaccggcggctcctacaattgccactgcaaccgcggctaccgcctgcacgtgggcgccggggggcgctcgtgcgtggacctgaacgaatgcgccaagccccacctgtgcggcgacggcggcttctgcatcaactttcccggtcactacaagtgcaactgctaccccggctaccggctcaaagcctcccggcctcctgtgtgcgaagacatcgacgagtgccgggacccaagctcttgcccggatggcaaatgcgagaacaagcccgggagcttcaagtgcatcgcctgtcagcctggctaccgcagccaggggggcggggcctgtcgcgacgtgaacgagtgcgccgagggcagcccctgctcgcctggctggtgcgagaacctcccgggctccttccgctgcacctgtgcccagggctacgcgcccgcgcccgacggccgcagttgcttggatgtggacgagtgtgaggctggggacgtgtgtgacaatggcatctgcagcaacacgccaggatctttccagtgtcagtgcctctctggctaccatctgtccagggaccggagccactgcgaggacattgatgagtgtgacttccctgcagcctgcattgggggtgactgcatcaataccaatggctcctacagatgtctttgcccccaggggcatcggctggtgggtggcaggaaatgccaagacatagatgagtgcagccaggacccgagcctgtgccttccccatggggcctgcaagaaccttcagggctcctatgtgtgtgtctgcgatgagggcttcactcccacccaggaccagcacggttgtgaggaggtggagcagccccaccacaagaaggagtgctacctgaacttcgatgacacagtgttctgcgacagcgtattggccaccaacgtgacccagcaggagtgctgctgctctctgggggccggctggggcgaccactgcgaaatctacccctgcccagtctacagctcagccgagttccacagcctctgcccagacggaaagggctacacccaggacaacaacatcgtcaactacggcatcccagcccaccgtgacatcgacgagtgcatgttgttcgggtcggagatttgcaaggagggcaagtgcgtgaacacgcagcctggctacgagtgctactgcaagcagggcttctactacgacgggaacctgctggaatgcgtggacgtggacgagtgcctggacgagtccaactgccggaacggagtgtgtgagaacacgcgcggcggctaccgctgtgcctgcacgccccctgccgagtacagtcccgcgcagcgccagtgcctgagcccggaagagatggacgtggacgagtgccaggacccggcagcctgccgccctggccgctgcgtcaacctgccgggctcctaccgctgcgagtgtcgcccgccctgggtgcccgggccctccggccgcgattgccagctccccgagagcccggccgagcgtgccccggagcggcgcgacgtgtgctggagccagcgcggagaggacggcatgtgcgctggccccctggccgggcctgccctcaccttcgacgactgctgctgccgccagggccgcggctggggcgcccaatgccgaccgtgcccgccgcgcggcgcggggtcccattgcccgacatcgcagagcgagagcaattccttctgggacacaagccccctgctgttggggaagcccccaagagatgaggacagttcagaggaggattcagacgagtgtcgctgcgtgagtggccgctgcgtgccgcggccgggcggcgccgtgtgcgagtgtcccggcggcttccagctcgacgcctcccgcgcccgctgcgtggatatcgacgagtgccgagagctgaaccagcgcgggctgctgtgcaagagcgagcgctgcgtgaacaccagcggctccttccgctgcgtctgcaaagccggcttcgcgcgcagccgcccgcacggggcctgcgttccccagcgccgccgctgacgccgccgacgccgccctcggcccagacctcggtgatcactgagggatttccgcgagctcggcctcacttctgccccgacttgtggctcggacccagggaccttcagggcccgcagaccctcccggcgccttgagacccgaggcgcccctaccggcccccctccccggttagcgggcggttgtaaggtctccggcgggcgctgcctgccttcctcccagagggtgtttcctagaaactgataaatcagatcgtgcctcttta

SEQ ID NO: 47839 - DNA, 3730 bp, Artificial Sequence
  derived and/or modified sequence
cccgcccgaggcctcagtccaggtgcaccgcattgagagctcgaacgccgagagcgcagccccctcccagcacctgctgccgcaccccaagccctcgcacccccggccgcccacccagaagcccctgggccgctgctttcaggacactctgcccaagcagccgtgtggcagcaaccccctccccggcctcaccaagcaggaagactgctgcggtagcatcggcactgcctggggccagagcaagtgccacaagtgtccccagctgcagtacacaggagtgcagaagccagggcctgtacgtggggaagtgggcgctgactgtccccagggctacaagaggcttaacagcacccactgccaggacatcaacgagtgcgcaatgccgggcgtgtgtcgccatggtgactgcctcaacaaccctggctcctatcgctgtgtctgcccacctggccatagtttaggcccctcccgtacacagtgcattgcagacaaaccggaggagaagagcctgtgtttccgcctggtgagccctgagcaccagtgccagcacccactgaccacccgcctgacccgccagctctgctgctgcagtgtcggcaaggcctggggcgcgcggtgtcagcgctgcccaacagatggcaccgctgcgttcaaggagatctgcccagctgggaagggataccacattctcacctcccaccagacgctcaccattcagggcgagagtgacttttcccttttcctgcaccctgacgggccacccaagccccagcagcttccggagagccctagccaggctccaccacctgaggacacagaggaagagagaggggtgaccacggactcaccggtgagtgaggagaggtcagtgcagcagagccacccaactgccaccacgactcctgcccggccctaccccgagctgatctcccgtccctcgcccccgaccatgcgctggttcctgccggacttgcctccttcccgcagcgccgtagagatcgctcccactcaggtcacagagactgatgagtgccgactgaaccagaacatctgtggccacggagagtgcgtgccgggcccccctgactactcctgccactgcaaccccggctaccggtcacatccccagcaccgctactgcgtggatgtgaacgagtgcgaggcagagccctgtggcccggggaggggcatctgcatgaacaccggcggctcctacaattgccactgcaaccgcggctaccgcctgcacgtgggcgccggggggcgctcgtgcgtggacctgaacgaatgcgccaagccccacctgtgcggcgacggcggcttctgcatcaactttcccggtcactacaagtgcaactgctaccccggctaccggctcaaagcctcccggcctcctgtgtgcgaagacatcgacgagtgccgggacccaagctcttgcccggatggcaaatgcgagaacaagcccgggagcttcaagtgcatcgcctgtcagcctggctaccgcagccaggggggcggggcctgtcgcgacgtgaacgagtgcgccgagggcagcccctgctcgcctggctggtgcgagaacctcccgggctccttccgctgcacctgtgcccagggctacgcgcccgcgcccgacggccgcagttgcttggatgtggacgagtgtgaggctggggacgtgtgtgacaatggcatctgcagcaacacgccaggatctttccagtgtcagtgcctctctggctaccatctgtccagggaccggagccactgcgaggacattgatgagtgtgacttccctgcagcctgcattgggggtgactgcatcaataccaatggctcctacagatgtctttgcccccaggggcatcggctggtgggtggcaggaaatgccaagacatagatgagtgcagccaggacccgagcctgtgccttccccatggggcctgcaagaaccttcagggctcctatgtgtgtgtctgcgatgagggcttcactcccacccaggaccagcacggttgtgaggaggtggagcagccccaccacaagaaggagtgctacctgaacttcgatgacacagtgttctgcgacagcgtattggccaccaacgtgacccagcaggagtgctgctgctctctgggggccggctggggcgaccactgcgaaatctacccctgcccagtctacagctcagccgagttccacagcctctgcccagacggaaagggctacacccaggacaacaacatcgtcaactacggcatcccagcccaccgtgacatcgacgagtgcatgttgttcgggtcggagatttgcaaggagggcaagtgcgtgaacacgcagcctggctacgagtgctactgcaagcagggcttctactacgacgggaacctgctggaatgcgtggacgtggacgagtgcctggacgagtccaactgccggaacggagtgtgtgagaacacgcgcggcggctaccgctgtgcctgcacgccccctgccgagtacagtcccgcgcagcgccagtgcctgagcccggaagagatggacgtggacgagtgccaggacccggcagcctgccgccctggccgctgcgtcaacctgccgggctcctaccgctgcgagtgtcgcccgccctgggtgcccgggccctccggccgcgattgccagctccccgagagcccggccgagcgtgccccggagcggcgcgacgtgtgctggagccagcgcggagaggacggcatgtgcgctggccccctggccgggcctgccctcaccttcgacgactgctgctgccgccagggccgcggctggggcgcccaatgccgaccgtgcccgccgcgcggcgcggggtcccattgcccgacatcgcagagcgagagcaattccttctgggacacaagccccctgctgttggggaagcccccaagagatgaggacagttcagaggaggattcagacgagtgtcgctgcgtgagtgccgctgcgtgccgcggccgggcggcgccgtgtgcgagtgtcccggcggcttccagctcgacgcctcccgcgcccgctgcgtggatatcgacgagtgccgagagctgaaccagcgcgggctgctgtgcaagagcgagcgctgcgtgaacaccagcggctccttccgctgcgtctgcaaagccggcttcgcgcgcagccgcccgcacggggcctgcgttccccagcgccgccgctgacgccgccgacgccgccctcggcccagacctcggtgatcactgagggatttccgcgagctcggcctcacttctgccccgacttgtggctcggacccagggaccttcagggcccgcagaccctcccggcgccttgagacccgaggcgcccctaccggcccccctccccggttagcgggcggttgtaaggtctccggcgggcgctgcctgccttcctcccagagggtgtttcctagaaactgataaatcagatcgtgcctctttacccttggctttcgaagcaaattgatgttcacgtctgacgtgggcgcgggctgcgcagggcggcgccagaccccagccgcctcccaggggctagactgagcccggcacaaggggtgtgaaatagaatttattgtggctctgattatgtacacgtgagatggcctggctgggccggccgggctcacatggtttgtacaataaatacatctgtggggcgggctctccgcagccgggaagggccaccgccacggttcagtcc

SEQ ID NO: 47840 - DNA, 2461 bp, Artificial Sequence
  derived and/or modified sequence
gtgaagggcctgggttgagtaggggactcaggagaacagtggcggtttggaagtatcccagggcatggggctgcctaggggctttatggaagtcaaagctttagaggagtcagagagggaggtgccagccacacgaggctctgttggactgaggctgaagcctgtgggtatgttccagcatgctcagcttggtggctgctccagtcccactccgcacccaggatccacaggccacagctctgaccagagactgggcattgccagacagtgaggaggaaggagaggtgtttatggatcagggacgggagtcctagggatgataagccctgggctccagctgggaactatcagagtctgggggtgtcaggcaagctcggaggactgagagggaggccaccaagccctgtgagagagaaggtggaggtgaggacttgagaacagtggaaagaaggcagcctctgagggccccagggtggagcagatctgagtgatgaaaatccccttgggaccctgagagtgaggggaaggtcacggaagccgagagatccaggaatgtgaggtcagaggctgacctggttgtccacgcggatgttcgaaactcccaggatggagagaaaaacagagcaggaggaatgaggaagatgtggacgagtgtgaggctggggacgtgtgtgacaatggcatctgcagcaacacgccaggatctttccagtgtcagtgcctctctggctaccatctgtccagggaccggagccactgcgaggacattgatgagtgtgacttccctgcagcctgcattgggggtgactgcatcaataccaatggctcctacagatgtctttgcccccaggggcatcggctggtgggtggcaggaaatgccaagacatagatgagtgcagccaggacccgagcctgtgccttccccatggggcctgcaagaaccttcagggctcctatgtgtgtgtctgcgatgagggcttcactcccacccaggaccagcacggttgtgaggaggtggagcagccccaccacaagaaggagtgctacctgaacttcgatgacacagtgttctgcgacagcgtattggccaccaacgtgacccagcaggagtgctgctgctctctgggggccggctggggcgaccactgcgaaatctacccctgcccagtctacagctcagccgagttccacagcctctgcccagacggaaagggctacacccaggacaacaacatcgtcaactacggcatcccagcccaccgtgacatcgacgagtgcatgttgttcgggtcggagatttgcaaggagggcaagtgcgtgaacacgcagcctggctacgagtgctactgcaagcagggcttctactacgacgggaacctgctggaatgcgtggacgtggacgagtgcctggacgagtccaactgccggaacggagtgtgtgagaacacgcgcggcggctaccgctgtgcctgcacgccccctgccgagtacagtcccgcgcagcgccagtgcctgagcccggaagagatggacgtggacgagtgccaggacccggcagcctgccgccctggccgctgcgtcaacctgccgggctcctaccgctgcgagtgtcgcccgccctgggtgcccgggccctccggccgcgattgccagctccccgagagcccggccgagcgtgccccggagcggcgcgacgtgtgctggagccagcgcggagaggacggcatgtgcgctggccccctggccgggcctgccctcaccttcgacgactgctgctgccgccagggccgcggctggggcgcccaatgccgaccgtgcccgccgcgcggcgcggggtcccattgcccgacatcgcagagcgagagcaattccttctgggacacaagccccctgctgttggggaagcccccaagagatgaggacagttcagaggaggattcagacgagtgtcgctgcgtgagtggccgctgcgtgccgcggccgggcggcgccgtgtgcgagtgtcccggcggcttccagctcgacgcctcccgcgcccgctgcgtggatatcgacgagtgccgagagctgaaccagcgcgggctgctgtgcaagagcgagcgctgcgtgaacaccagcggctccttccgctgcgtctgcaaagccggcttcgcgcgcagccgcccgcacggggcctgcgttccccagcgccgccgctgacgccgccgacgccgccctcggcccagacctcggtgatcactgagggatttccgcgagctcggcctcacttctgccccgacttgtggctcggacccagggaccttcagggcccgcagaccctcccggcgccttgagacccgaggcgcccctaccggcccccctccccggttagcgggcggttgtaaggtctccggcgggcgctgcctgccttcctcccagagggtgtttcctagaaactgataaatcagatcgtgcctcttt

SEQ ID NO: 47841 - DNA, 3756 bp, Artificial Sequence
  derived and/or modified sequence
ttctttctgctcctcttctggaccccacagacttcctcctgggacctccgtgagccctggccaaaggctgtccccaccctttagccctttcctcagaggggattggaccagcactaacgagaagttactttggggccctgagacccccacgtttgcaagggaggctgggaaagagctggaaggcctgggctccggctccacccggcctccatcgtcagtgtgacccggcagggccacctctctccctcagcctcggtatctcgctctacgcaggcctccccgccccgccccgcccggaggaatccgcggccggccagacggtcccagttgtcagcagggctccaacatgacgctcatcggagagaacggccacagcacagacacgctcacgggctccggcttccgcgtggtggtgtgccctctcccctgcatgaatggcggccagtgctcctcgcgaaaccagtgcctgtgtcccccggacttcactgggcgcttctgccaggtgcccgcaggaggagccggtgggggtaccggcggctcaggccccggcctgagcaggacaggggccctgtccacaggggcgctgccgcccctggctccggagggcgactctgtggccagcaagcacgccatctacgccgtccaggtgatcgctgaccctcctgggcccggggaggggcctcctgcccagcacgcagccttcctggtgcccctaggcccgggacagatctcagcagaagtgcaggccccgccccccgtggtgaatgtgcgcgtccatcacccgcccgaggcctcagtccaggtgcaccgcattgagagctcgaacgccgagagcgcagccccctcccagcacctgctgccgcaccccaagccctcgcacccccggccgcccacccagaagcccctgggccgctgctttcaggacactctgcccaagcagccgtgtggcagcaaccccctccccggcctcaccaagcaggaagactgctgcggtagcatcggcactgcctggggccagagcaagtgccacaagtgtccccagctgcagtacacaggagtgcagaagccagggcctgtacgtggggaagtgggcgctgactgtccccagggctacaagaggcttaacagcacccactgccaggacatcaacgagtgcgcaatgccgggcgtgtgtcgccatggtgactgcctcaacaaccctggctcctatcgctgtgtctgcccacctggccatagtttaggcccctcccgtacacagtgcattgcagacaaaccggaggagaagagcctgtgtttccgcctggtgagccctgagcaccagtgccagcacccactgaccacccgcctgacccgccagctctgctgctgcagtgtcggcaaggcctggggcgcgcggtgtcagcgctgcccaacagatggcaccgctgcgttcaaggagatctgcccagctgggaagggataccacattctcacctcccaccagacgctcaccattcagggcgagagtgacttttcccttttcctgcaccctgacgggccacccaagccccagcagcttccggagagccctagccaggctccaccacctgaggacacagaggaagagagaggggtgaccacggactcaccggtgagtgaggagaggtcagtgcagcagagccacccaactgccaccacgactcctgcccggccctaccccgagctgatctcccgtccctcgcccccgaccatgcgctggttcctgccggacttgcctccttcccgcagcgccgtagagatcgctcccactcaggtcacagagactgatgagtgccgactgaaccagaacatctgtggccacggagagtgcgtgccgggcccccctgactactcctgccactgcaaccccggctaccggtcacatccccagcaccgctactgcgtggatgtgaacgagtgcgaggcagagccctgtggcccggggaggggcatctgcatgaacaccggcggctcctacaattgccactgcaaccgcggctaccgcctgcacgtgggcgccggggggcgctcgtgcgtggacctgaacgaatgcgccaagccccacctgtgcggcgacggcggcttctgcatcaactttcccggtcactacaagtgcaactgctaccccggctaccggctcaaagcctcccggcctcctgtgtgcgaagacatcgacgagtgccgggacccaagctcttgcccggatggcaaatgcgagaacaagcccgggagcttcaagtgcatcgcctgtcagcctggctaccgcagccaggggggcggggcctgtcgcgacgtgaacgagtgcgccgagggcagcccctgctcgcctggctggtgcgagaacctcccgggctccttccgctgcacctgtgcccagggctacgcgcccgcgcccgacggccgcagttgcttggatgtggacgagtgtgaggctggggacgtgtgtgacaatggcatctgcagcaacacgccaggatctttccagtgtcagtgcctctctggctaccatctgtccagggaccggagccactgcgaggacattgatgagtgtgacttccctgcagcctgcattgggggtgactgcatcaataccaatggctcctacagatgtctttgcccccaggggcatcggctggtgggtggcaggaaatgccaagacatagatgagtgcagccaggacccgagcctgtgccttccccatggggcctgcaagaaccttcagggctcctatgtgtgtgtctgcgatgagggcttcactcccacccaggaccagcacggttgtgaggaggtggagcagccccaccacaagaaggagtgctacctgaacttcgatgacacagtgttctgcgacagcgtattggccaccaacgtgacccagcaggagtgctgctgctctctgggggccggctggggcgaccactgcgaaatctacccctgcccagtctacagctcagccgagttccacagcctctgcccagacggaaagggctacacccaggacaacaacatcgtcaactacggcatcccagcccaccgtgacatcgacgagtgcatgttgttcgggtcggagatttgcaaggagggcaagtgcgtgaacacgcagcctggctacgagtgctactgcaagcagggcttctactacgacgggaacctgctggaatgcgtggacgtggacgagtgcctggacgagtccaactgccggaacggagtgtgtgagaacacgcgcggcggctaccgctgtgcctgcacgccccctgccgagtacagtcccgcgcagcgccagtgcctgagcccggaagagatggacgtggacgagtgccaggacccggcagcctgccgccctggccgctgcgtcaacctgccgggctcctaccgctgcgagtgtcgcccgccctgggtgcccgggccctccggccgcgattgccagctccccgagagcccggccgagcgtgccccggagcggcgcgacgtgtgctggagccagcgcggagaggacggcatgtgcgctggccccctggccgggcctgccctcaccttcgacgactgctgctgccgccagggccgcggctggggcgcccaatgccgaccgtgcccgccgcgcggcgcggggtcccattgcccgacatcgcagagcgagagcaattccttctgggacacaagccccctgctgttggggaagcccccaagagatgaggacagttcagaggaggattcagacgagtgtcgctgcgtgagtgg

SEQ ID NO: 47842 - DNA, 3327 bp, Artificial Sequence
  derived and/or modified sequence
gagctcctagggttagggctcaggtgggagatggctgttcttgggggctttgggaatgtggacaaggcccctcaaaggaggggctgttaaggaagcctaaggagaggtactccaggcaaagagaacagcctgcaaagcccactggccaggtgagtttggggcagagcagagttcactgttatggcccaggctgcatggcaggagtgagggggaaggggtgtgggaaatgaaactggtgagcagtgaggatccaaaggaggggagaggctggaggcagggagtcctgggcttggtgacaaagagagtgaggggggtggttcctggatctgactgcctgtgcacagctttggcactagttaggattcccaggaaaccagctcctgctagtcttgggagggggtaatcaacccttctggaatagggggtcgggtccctggggcaagggcttatggagtcactgggctagaggacactggtgtgaccgaggctatagagtttaaggtattgaggcgactggggagaaaggagttttagtcccttgggtgggagtactgggacgactgaggggccctgaggggatgtggtttggtttgaggtgagtggggtcagggtcttggagtgaaccgggaatggaagtatccgggcctgggtgtggggtgatacggctgtcaggggcctggagtcctagtttggagctttctggggtcttgatattggggttatctaaaagagagaaataggacatcctggagttggagtatgggcgtacaggaacctgaggtcatggtgtgactggggtgttgaggtctgccctggggatatggcagaaggtgagcgctccctgctctgccgcttgacctggccatgcccgcagagactgatgagtgccgactgaaccagaacatctgtggccacggagagtgcgtgccgggcccccctgactactcctgccactgcaaccccggctaccggtcacatccccagcaccgctactgcgtggatgtgaacgagtgcgaggcagagccctgtggcccggggaggggcatctgcatgaacaccggcggctcctacaattgccactgcaaccgcggctaccgcctgcacgtgggcgccggggggcgctcgtgcgtggacctgaacgaatgcgccaagccccacctgtgcggcgacggcggcttctgcatcaactttcccggtcactacaagtgcaactgctaccccggctaccggctcaaagcctcccggcctcctgtgtgcgaagacatcgacgagtgccgggacccaagctcttgcccggatggcaaatgcgagaacaagcccgggagcttcaagtgcatcgcctgtcagcctggctaccgcagccaggggggcggggcctgtcgcgacgtgaacgagtgcgccgagggcagcccctgctcgcctggctggtgcgagaacctcccgggctccttccgctgcacctgtgcccagggctacgcgcccgcgcccgacggccgcagttgcttggatgtggacgagtgtgaggctggggacgtgtgtgacaatggcatctgcagcaacacgccaggatctttccagtgtcagtgcctctctggctaccatctgtccagggaccggagccactgcgaggacattgatgagtgtgacttccctgcagcctgcattgggggtgactgcatcaataccaatggctcctacagatgtctttgcccccaggggcatcggctggtgggtggcaggaaatgccaagacatagatgagtgcagccaggacccgagcctgtgccttccccatggggcctgcaagaaccttcagggctcctatgtgtgtgtctgcgatgagggcttcactcccacccaggaccagcacggttgtgaggaggtggagcagccccaccacaagaaggagtgctacctgaacttcgatgacacagtgttctgcgacagcgtattggccaccaacgtgacccagcaggagtgctgctgctctctgggggccggctggggcgaccactgcgaaatctacccctgcccagtctacagctcagccgagttccacagcctctgcccagacggaaagggctacacccaggacaacaacatcgtcaactacggcatcccagcccaccgtgacatcgacgagtgcatgttgttcgggtcggagatttgcaaggagggcaagtgcgtgaacacgcagcctggctacgagtgctactgcaagcagggcttctactacgacgggaacctgctggaatgcgtggacgtggacgagtgcctggacgagtccaactgccggaacggagtgtgtgagaacacgcgcggcggctaccgctgtgcctgcacgccccctgccgagtacagtcccgcgcagcgccagtgcctgagcccggaagagatggacgtggacgagtgccaggacccggcagcctgccgccctggccgctgcgtcaacctgccgggctcctaccgctgcgagtgtcgcccgccctgggtgcccgggccctccggccgcgattgccagctccccgagagcccggccgagcgtgccccggagcggcgcgacgtgtgctggagccagcgcggagaggacggcatgtgcgctggccccctggccgggcctgccctcaccttcgacgactgctgctgccgccagggccgcggctggggcgcccaatgccgaccgtgcccgccgcgcggcgcggggtcccattgcccgacatcgcagagcgagagcaattccttctgggacacaagccccctgctgttggggaagcccccaagagatgaggacagttcagaggaggattcagacgagtgtcgctgcgtgagtggccgctgcgtgccgcggccgggcggcgccgtgtgcgagtgtcccggcggcttccagctcgacgcctcccgcgcccgctgcgtggatatcgacgagtgccgagagctgaaccagcgcgggctgctgtgcaagagcgagcgctgcgtgaacaccagcggctccttccgctgcgtctgcaaagccggcttcgcgcgcagccgcccgcacggggcctgcgttccccagcgccgccgctgacgccgccgacgccgccctcggcccagacctcggtgatcactgagggatttccgcgagctcggcctcacttctgccccgacttgtggctcggacccagggaccttcagggcccgcagaccctcccggcgccttgagacccgaggcgcccctaccggcccccctccccggttagcgggcggttgtaaggtctccggcgggcgctgcctgccttcctcccagagggtgtttcctagaaactgataaatcagatcgtgcctcttt

SEQ ID NO: 47843 - DNA, 3912 bp, Artificial Sequence
  derived and/or modified sequence
atgcctggccccagaggagctgctgggggcctggcccctgagatgagaggagctggagctgctggcctgctggccctgctgctgctgctgctgctgctgctgctgggcctgggcggccgggtggagggcggccctgctggggagagaggagctgggggcggcggggccctggcccgggagcgcttcaaggtggtgtttgcccctgtgatctgcaagaggacctgcctgaagggccagtgccgggacagctgccagcagggcagcaacatgaccctgattggagaaaatggccacagcacagacaccctgaccggcagcggcttccgggtggtggtgtgccccctgccctgcatgaatggaggccagtgcagcagcaggaaccagtgcctgtgccccccagacttcaccggccgcttctgccaggtgcctgctgggggcgccggcggcggcactggaggcagcggccctggcctgagcaggactggagccctgagcactggagccctgccccccctggcccctgagggggacagcgtggccagcaagcacgccatctatgctgtgcaggtgattgctgaccccccaggccctggagagggccccccagcccagcacgccgccttcctggtgcccctgggccctggccagatctctgctgaggtgcaggcccctcctcctgtggtgaatgtgcgggtgcaccaccccccagaggcctctgtgcaggtgcacagaattgagagcagcaatgctgagagcgctgcccccagccagcacctgctgccccaccccaagcccagccacccccggccccccacccagaagcccctgggccgctgcttccaggacaccctgcccaagcagccctgtggcagcaaccccctgcccggcctgaccaagcaggaggactgctgcggcagcattggaacagcctggggccagagcaagtgccacaagtgcccccagctgcagtacacaggagtgcagaagccaggccctgtgcggggggaggtgggcgctgactgcccccagggctacaagaggctgaacagcacccactgccaggacatcaatgaatgtgccatgcctggggtgtgcagacatggagactgcctgaacaaccctggcagctaccgctgtgtgtgccccccaggccacagcctgggccccagcaggacccagtgcatcgctgacaagccagaggagaagagcctgtgcttccggctggtgtccccagagcaccagtgccagcaccccctgaccacccggctgacccggcagctgtgctgctgcagcgtgggcaaggcctggggcgcccgctgccagcgctgccccacagatggaacagctgccttcaaggagatctgcccagctgggaagggctaccacatcctgaccagccaccagaccctgaccatccagggcgagagtgacttcagcctcttcctgcacccagatggcccccccaagccccagcagctgcctgagagccccagccaggcccctcctcctgaggacacagaggaggagcggggcgtgaccacagacagccctgtgtctgaggagaggtctgtgcagcagagccaccccacagccaccaccaccccagcccggccctacccagagctgatcagccggcccagcccccccaccatgcgctggttcctgcctgacctgccccccagccgctctgctgtggagatcgcccccacccaggtgacagaaacagatgaatgtcggctgaaccagaacatctgtggccatggagaatgtgtgcccggccccccagactacagctgccactgcaaccctggctaccgcagccacccccagcaccgctactgtgtggatgtgaatgaatgtgaggccgagccctgtggccctggccggggcatctgcatgaacacaggaggcagctacaactgccactgcaacagaggctaccgcctgcacgtgggcgccggcggccgcagctgtgtggacctgaatgaatgtgccaagccccacctgtgtggagatggcggcttctgcatcaacttccctggccactacaagtgcaactgctacccaggctaccgcctgaaggccagccggccccctgtgtgtgaggacattgatgagtgccgggaccccagcagctgcccagatggaaaatgtgagaacaagccaggcagcttcaagtgcatcgcctgccagcccggctaccgcagccagggcggcggggcctgcagagatgtgaatgaatgtgccgagggcagcccctgcagccctggctggtgtgagaacctgcccggcagcttccgctgcacctgtgcccagggctacgccccagccccagatggccgcagctgcctggatgtggatgaatgtgaggccggagatgtgtgtgacaatggcatctgcagcaacaccccaggcagcttccagtgccagtgcctgagcggctaccacctgagccgggacaggagccactgtgaagatattgatgaatgtgacttccctgctgcctgcattggaggagactgcatcaacaccaacggcagctaccgctgcctgtgcccccagggccaccggctggtgggcggcaggaagtgccaggacattgatgaatgttcccaggaccccagcctgtgcctgccccacggggcctgcaagaacctgcagggcagctatgtgtgtgtgtgtgatgagggcttcacccccacccaggaccagcacggctgtgaggaggtggagcagccccaccacaagaaggagtgctacctgaactttgatgacaccgtcttctgtgacagcgtgctggccaccaacgtgacccagcaggagtgctgctgcagcctgggcgccggctggggagaccactgtgagatctacccctgccctgtgtacagcagcgctgagttccacagcctgtgcccagatggcaagggctacacccaggacaacaacatcgtgaactacggcatcccagcccaccgggacattgatgagtgcatgctgtttggcagcgagatctgcaaggagggcaaatgtgtgaacacccagcccggctatgagtgctactgcaagcagggcttctactatgatggcaacctgctggagtgtgtggatgtggatgaatgtctggatgagagcaactgcagaaatggagtgtgtgagaacacccggggcggctaccgctgtgcctgcaccccacctgctgagtacagccctgcccagaggcagtgcctgagccctgaggagatggatgtggatgagtgccaggaccctgctgcctgccggcccggccgctgtgtgaacctgcccggcagctaccgctgtgaatgtcggcccccctgggtgcccggccccagcggccgggactgccagctgcctgagagccctgctgagcgggcccctgagaggagagatgtgtgctggagccagagaggagaagatggcatgtgtgccggccccctggccggccctgccctgacctttgatgactgctgctgccggcagggccggggctggggcgcccagtgccggccctgcccccccaggggggccggcagccactgccccaccagccagagcgagagcaacagcttctgggacaccagccccctgctgctgggcaagcccccaagagatgaggacagcagcgaggaggacagtgatgagtgccgctgtgtgtctggccgctgtgtgcccaggcctgggggcgctgtgtgtgagtgccctgggggcttccagctggatgccagccgggcccgctgtgtggacattgatgaatgtcgggagctgaaccagaggggcctgctgtgcaagtctgagcgctgtgtgaacaccagcggcagcttccgctgtgtgtgcaaggccggctttgcccggagccggccccacggggcctgtgtgccccagaggagaagatag

SEQ ID NO: 47844 - DNA, 792 bp, Artificial Sequence
  derived and/or modified sequence
atgctgtttggaagtgagatctgcaaggagggcaaatgtgtgaacacccagcccggctatgagtgctactgcaagcagggcttctactatgatggcaacctgctggagtgtgtggatgtggatgagtgcctggatgagagcaactgcagaaatggagtgtgtgagaacacccggggcggctaccgctgtgcctgcaccccacctgctgagtacagccctgcccagaggcagtgcctgagccctgaggagatggatgtggatgagtgccaggaccctgctgcctgcaggcctggccgctgtgtgaacctgcccggcagctaccgctgtgagtgcaggcctccctgggtgcccggccccagcggccgggactgccagctgcctgagagccctgctgagcgggcccctgagaggagagatgtgtgctggagccagagaggagaagatggcatgtgtgccggccccctggccggccctgccctgacctttgatgactgctgctgccggcagggccggggctggggcgcccagtgccggccctgccccccaagaggagctggcagccactgccccaccagccagagcgagagcaacagcttctgggacaccagccccctgctgctgggcaagcccccaagagatgaggacagcagtgaagaagattctgatgaatgtcgctgtgtgtctgctgctgcctgccggggccgggccgccccctgtgcctctgtgcctgctgccagcagcagcaccccaccagccccagctgcctggatcagcaccagcgctgagagctag

SEQ ID NO: 47845 - DNA, 921 bp, Artificial Sequence
  derived and/or modified sequence
atgctgtttggaagtgagatctgcaaggagggcaaatgtgtgaacacccagcccggctatgagtgctactgcaagcagggcttctactatgatggcaacctgctggagtgtgtggatgtggatgagtgcctggatgagagcaactgcagaaatggagtgtgtgagaacacccggggcggctaccgctgtgcctgcaccccacctgctgagtacagccctgcccagaggcagtgcctgagccctgaggagatggatgtggatgagtgccaggaccctgctgcctgcaggcctggccgctgtgtgaacctgcccggcagctaccgctgtgagtgcaggcctccctgggtgcccggccccagcggccgggactgccagctgcctgagagccctgctgagcgggcccctgagaggagagatgtgtgctggagccagagaggagaagatggcatgtgtgccggccccctggccggccctgccctgacctttgatgactgctgctgccggcagggccggggctggggcgcccagtgccggccctgccccccaagaggagctggcagccactgccccaccagccagagcgagagcaacagcttctgggacaccagccccctgctgctgggcaagcccccaagagatgaggacagcagtgaagaagattctgatgaatgtcgctgtgtgtctggccgctgtgtgcccaggcctggaggagctgtgtgtgaatgtcctgggggcttccagctggatgccagccgggcccgctgtgtggacattgatgagtgccgggagctgaaccagaggggcctgctgtgcaagtctgagcgctgtgtgaacaccagcggcagcttccgctgtgtgtgcaaggccggctttgcccggagccggccccatggagcctgtgtgccccagaggagaagatag

SEQ ID NO: 47846 - DNA, 3414 bp, Artificial Sequence
  derived and/or modified sequence
atgaccctcatcggggagaatggccacagcacagacaccctgactggaagtggcttccgggtggtggtgtgccccctgccctgcatgaatggaggccagtgcagcagcaggaaccagtgcctgtgccccccagacttcaccggccgcttctgccaggtgcctgctggaggagctgggggcggcaccggcggcagcggccctggcctgagcaggactggagccctgagcactggagccctgccccccctggcccctgagggggacagcgtggccagcaagcacgccatctatgctgtgcaggtgattgctgaccccccaggccctggagagggccccccagcccagcacgccgccttcctggtgcccctgggccctggccagatctctgctgaggtgcaggcccctcctcctgtggtgaatgtgcgggtgcaccaccccccagaggcctctgtgcaggtgcaccgcatcgagagcagcaatgctgagagcgctgcccccagccagcacctgctgccccaccccaagcccagccaccccaggcctcccacccagaagcccctgggccgctgcttccaggacaccctgcccaagcagccctgtggcagcaaccccctgcccggcctgaccaagcaggaggactgctgcggcagcatcggcacagcctggggccagagcaagtgccacaagtgcccccagctgcagtacacaggagtgcagaagccaggccctgtgcggggggaggtgggcgctgactgcccccagggctacaagaggctgaacagcacccactgccaggacatcaatgaatgtgccatgcctggggtgtgccgccacggggactgcctgaacaaccctggcagctaccgctgtgtgtgccccccaggccacagcctgggccccagcaggacccagtgcatcgctgacaagccagaggagaagagcctgtgcttccggctggtgtccccagagcaccagtgccagcaccccctgaccacccggctgacccggcagctgtgctgctgcagcgtgggcaaggcctggggcgcccgctgccagcgctgccccacagatggaacagctgccttcaaggagatctgcccagctgggaagggctaccacatcctgaccagccaccagaccctgaccatccagggcgagagtgacttcagcctcttcctgcacccagatggcccccccaagccccagcagctgcctgagagccccagccaggcccctcctcctgaggacacagaggaggagcggggcgtgaccacagacagccctgtgtctgaggagaggtctgtgcagcagagccaccccacagccaccaccaccccagcccggccctacccagagctgatcagccggcccagcccccccaccatgcgctggttcctgcctgacctgccccccagccgctctgctgtggagatcgcccccacccaggtgacagaaacagatgagtgccgcctgaaccagaacatctgtggccacggggagtgtgtgcccggccccccagactacagctgccactgcaaccctggctaccgcagccacccccagcaccgctactgtgtggatgtgaatgaatgtgaggccgagccctgtggccctggccggggcatctgcatgaacacaggaggcagctacaactgccactgcaacagaggctaccgcctgcacgtgggcgctgggggccgcagctgtgtggacctgaatgaatgtgccaagccccacctgtgtggagatggcggcttctgcatcaacttccctggccactacaagtgcaactgctacccaggctaccgcctgaaggccagcaggcctcctgtgtgtgaagatattgatgaatgtcgggaccccagcagctgcccagatggaaaatgtgagaacaagccaggcagcttcaagtgcatcgcctgccagcccggctaccgcagccagggcggcggggcctgcagagatgtgaatgaatgtgccgagggcagcccctgcagccctggctggtgtgagaacctgcccggcagcttccgctgcacctgtgcccagggctacgccccagccccagatggccgcagctgcctggatgtggatgaatgtgaggccggagatgtgtgtgacaatggcatctgcagcaacaccccaggcagcttccagtgccagtgcctgagcggctaccacctgagccgggacaggagccactgtgaggacattgatgaatgtgacttccctgctgcctgcatcggcggggactgcatcaacaccaacggcagctaccgctgcctgtgcccccagggccaccggctggtgggcggcaggaagtgccaggacattgatgagtgcagccaggaccccagcctgtgcctgccccatggagcctgcaagaacctgcagggcagctatgtgtgtgtgtgtgatgagggcttcacccccacccaggaccagcacggctgtgaggaggtggagcagccccaccacaagaaggagtgctacctgaactttgatgacacagtgttctgtgacagcgtgctggccaccaacgtgacccagcaggagtgctgctgcagcctgggcgccggctggggagaccactgtgagatctacccctgccctgtgtacagcagcgctgagttccacagcctgtgcccagatggcaagggctacacccaggacaacaacatcgtgaactacggcatcccagcccaccgggacattgatgagtgcatgctgtttggaagtgagatctgcaaggagggcaaatgtgtgaacacccagcccggctatgagtgctactgcaagcagggcttctactatgatggcaacctgctggagtgtgtggatgtggatgagtgcctggatgagagcaactgcagaaatggagtgtgtgagaacacccggggcggctaccgctgtgcctgcaccccacctgctgagtacagccctgcccagaggcagtgcctgagccctgaggagatggatgtggatgagtgccaggaccctgctgcctgcaggcctggccgctgtgtgaacctgcccggcagctaccgctgtgagtgcaggcctccctgggtgcccggccccagcggccgggactgccagctgcctgagagccctgctgagcgggcccctgagaggagagatgtgtgctggagccagagaggagaagatggcatgtgtgccggccccctggccggccctgccctgacctttgatgactgctgctgccggcagggccggggctggggcgcccagtgccggccctgccccccaagaggagctggcagccactgccccaccagccagagcgagagcaacagcttctgggacaccagccccctgctgctgggcaagcccccaagagatgaggacagcagtgaagaagattctgatgaatgtcgctgtgtgtctggatag

SEQ ID NO: 47847 - DNA, 2202 bp, Artificial Sequence
  derived and/or modified sequence
atgcctgctgagacagatgaatgtcggctgaaccagaacatctgtggccatggagaatgtgtgcccggccccccagactacagctgccactgcaaccctggctaccgcagccacccccagcaccgctactgtgtggatgtgaatgaatgtgaggccgagccctgtggccctggccggggcatctgcatgaacacaggaggcagctacaactgccactgcaacagaggctaccgcctgcacgtgggcgccggcggccgcagctgtgtggacctgaatgaatgtgccaagccccacctgtgtggagatggcggcttctgcatcaacttccctggccactacaagtgcaactgctacccaggctaccgcctgaaggccagccggccccctgtgtgtgaggacattgatgagtgccgggaccccagcagctgcccagatggaaaatgtgagaacaagccaggcagcttcaagtgcatcgcctgccagcccggctaccgcagccagggcggcggggcctgcagagatgtgaatgaatgtgccgagggcagcccctgcagccctggctggtgtgagaacctgcccggcagcttccgctgcacctgtgcccagggctacgccccagccccagatggccgcagctgcctggatgtggatgaatgtgaggccggagatgtgtgtgacaatggcatctgcagcaacaccccaggcagcttccagtgccagtgcctgagcggctaccacctgagccgggacaggagccactgtgaagatattgatgaatgtgacttccctgctgcctgcattggaggagactgcatcaacaccaacggcagctaccgctgcctgtgcccccagggccaccggctggtgggcggcaggaagtgccaggacattgatgaatgttcccaggaccccagcctgtgcctgccccacggggcctgcaagaacctgcagggcagctatgtgtgtgtgtgtgatgagggcttcacccccacccaggaccagcacggctgtgaggaggtggagcagccccaccacaagaaggagtgctacctgaactttgatgacaccgtcttctgtgacagcgtgctggccaccaacgtgacccagcaggagtgctgctgcagcctgggcgccggctggggagaccactgtgagatctacccctgccctgtgtacagcagcgctgagttccacagcctgtgcccagatggcaagggctacacccaggacaacaacatcgtgaactacggcatcccagcccaccgggacattgatgagtgcatgctgtttggcagcgagatctgcaaggagggcaaatgtgtgaacacccagcccggctatgagtgctactgcaagcagggcttctactatgatggcaacctgctggagtgtgtggatgtggatgaatgtctggatgagagcaactgcagaaatggagtgtgtgagaacacccggggcggctaccgctgtgcctgcaccccacctgctgagtacagccctgcccagaggcagtgcctgagccctgaggagatggatgtggatgagtgccaggaccctgctgcctgccggcccggccgctgtgtgaacctgcccggcagctaccgctgtgaatgtcggcccccctgggtgcccggccccagcggccgggactgccagctgcctgagagccctgctgagcgggcccctgagaggagagatgtgtgctggagccagagaggagaagatggcatgtgtgccggccccctggccggccctgccctgacctttgatgactgctgctgccggcagggccggggctggggcgcccagtgccggccctgcccccccaggggggccggcagccactgccccaccagccagagcgagagcaacagcttctgggacaccagccccctgctgctgggcaagcccccaagagatgaggacagcagcgaggaggacagtgatgagtgccgctgtgtgtctggccgctgtgtgcccaggcctgggggcgctgtgtgtgagtgccctgggggcttccagctggatgccagccgggcccgctgtgtggacattgatgaatgtcgggagctgaaccagaggggcctgctgtgcaagtctgagcgctgtgtgaacaccagcggcagcttccgctgtgtgtgcaaggccggctttgcccggagccggccccacggggcctgtgtgccccagaggagaagatag

SEQ ID NO: 47848 - DNA, 3912 bp, Artificial Sequence
  derived and/or modified sequence
atgcccggcccccggggcgccgccggcggcctggcccccgagatgagaggagccggggcggctggactactcgccctcttgctcttgttgctccttctcctgttaggcctcggtggccgggtcgagggtgggccagcgggtgagcggggagcagggggcggaggagcactggctagagaaaggttcaaagtcgttttcgcccccgtcatttgcaagagaacttgcttaaaggggcagtgtcgagactcctgtcagcaagggtctaacatgacgcttatcggggagaacggccattccaccgataccctgacaggtagtggattcagggttgtggtttgtccactgccttgtatgaacggcggacaatgtagttcacggaatcagtgcctgtgtcctcccgatttcacaggtagattttgccaagtgcccgccggaggagcaggaggagggacgggaggcagcggccccggcctgagtcggactggagctttgtccactggagccctcccacccctggcgcctgagggtgactccgtggccagcaagcacgccatttacgctgtgcaggtgatcgctgaccctccaggtcctggagaaggccctccagctcagcatgctgctttcctagtaccgctgggaccgggtcagataagcgcagaggtgcaggctccccctcctgtcgttaacgtgcgcgtgcatcacccacccgaggcttccgtccaggtgcacaggatcgagagcagcaacgccgaaagtgccgctccaagtcaacatctcctgccacatccgaagccatcccaccctcggcctccaacccaaaaacccctcgggcggtgtttccaggatacactacccaagcagccttgcgggtcaaacccactccctggcctcaccaaacaggaggattgttgtggatccatcgggactgcgtggggccagagcaaatgccacaaatgtccccagctacagtacaccggggttcaaaagcccggaccagtgagaggcgaagttggcgctgactgtccgcagggctacaaacgcctgaactccacccattgccaggatattaacgaatgcgctatgccaggcgtttgcagacatggcgactgcctaaacaatcctggctcatacaggtgtgtgtgtccccctggacactccctgggccccagcaggacgcagtgtatcgccgataaaccagaagagaagagtctgtgcttccgattggttagtcctgaacaccaatgccagcatccactcacaaccaggcttacaagacaactgtgctgttgttccgtgggcaaagcttggggcgccagatgtcagcggtgcccgaccgatggcacagcagctttcaaagaaatctgtccggccggcaaagggtatcacatccttacctcgcaccaaacccttacgattcaaggagagagcgattttagcctatttctgcatcctgacggaccgcccaaaccacagcaactgccagaatccccctcgcaggctccaccacctgaggacacagaggaggagcgcggggtgactacagactctccagtttccgaggagcggagcgtgcaacaatctcatcctactgccaccacaacacccgctagaccataccctgaacttatctcccgaccatcaccacctacgatgcgctggtttctcccagacctaccaccatcccgctccgctgtcgaaatcgctcccactcaggtcaccgaaacggatgaatgtagattaaatcaaaacatttgcgggcatggggaatgtgtgccaggcccaccggattactcatgtcactgtaatccaggataccgaagtcacccacagcataggtactgtgttgacgttaacgaatgcgaggccgaaccttgtggtccgggcagagggatctgtatgaacactggagggtcttacaattgtcattgcaacagagggtatcgcctgcatgtaggagcgggtgggagatcttgcgtcgacctgaatgaatgcgcaaagccccacctgtgtggtgacggtggcttttgcattaacttccccggacattacaagtgtaactgttatcccggataccgacttaaggccagccggccaccagtgtgcgaggatattgatgaatgccgcgacccttcttcctgccctgacggcaagtgcgagaataagcccggcagttttaagtgcatcgcttgccagccaggctatcgctctcaaggaggtggtgcttgcagggatgtgaatgagtgcgccgagggtagcccctgttctccagggtggtgcgagaatctgcccgggtcttttaggtgcacatgcgcccaagggtacgcccctgcccccgacggtcgcagctgcctcgatgtggatgagtgcgaggctggggacgtgtgcgacaacgggatctgttcgaacactccaggatcgtttcagtgtcagtgtcttagtgggtatcatctctcacgggaccgcagccattgtgaggatatcgacgagtgcgacttccccgcggcctgcattggcggcgactgcattaacacgaatgggtcttacaggtgcctttgtccgcaaggccaccggctggttggcggaaggaagtgtcaagatatcgacgagtgtagccaggatcccagcctatgccttccccatggcgcctgtaaaaacctgcagggctcctacgtttgtgtatgtgacgagggttttacccctactcaggaccaacacggttgcgaggaggttgagcagccccaccataagaaggaatgttatctgaacttcgacgatacggtgttctgcgactcagtgctcgccaccaacgtgacgcagcaagaatgctgctgttccctcggtgcagggtggggagatcactgcgagatctacccctgccccgtttatagtagtgccgagttccattccttgtgcccagatggcaaagggtatactcaggacaataacattgtgaactacgggattcctgcccaccgggacatcgacgagtgtatgctctttggttctgaaatctgtaaagagggcaagtgcgtcaacacacagccaggttatgagtgctactgcaaacagggcttctactatgacgggaacttactggagtgcgttgatgtggacgaatgccttgacgaaagcaactgtcggaacggggtgtgtgagaatacacgcggaggttaccggtgtgcctgtaccccccccgccgagtattcaccagcccaaaggcaatgtctctctccagaagaaatggacgtcgatgagtgccaggatcccgcagcttgccgcccaggcaggtgtgtgaatctaccgggttcataccgatgcgagtgtagacctccgtgggtgccaggtccttccggacgggactgccagctgccagaatccccggccgagagggcaccagaacgccgagatgtttgttggtctcagcggggcgaggatggcatgtgcgcaggtcctctagccggtcccgctctaacttttgatgattgttgttgtaggcagggtaggggttggggggctcagtgcagaccgtgccctccacgcggagccggcagccactgtcccactagccaatcagagagcaattccttctgggacacttcgcctctgctattagggaaacccccaagggatgaggactcttcagaggaggattctgatgagtgtcggtgtgtttctggaagatgcgtccccaggccaggcggcgccgtgtgtgaatgtcccggcggttttcaattggacgcctcaagagctcgctgtgtcgacatcgacgagtgtagggaattaaaccagcggggcctgctgtgtaagtcggagcgttgcgtcaatacatctggatcatttcgatgcgtttgcaaagccggatttgcaagatcccgcccccacggagcgtgtgtccctcagaggaggcggtag

SEQ ID NO: 47849 - DNA, 792 bp, Artificial Sequence
  derived and/or modified sequence
atgctgttcggcagcgagatctgcaaggagggcaagtgcgtgaacactcagccagggtatgaatgttactgtaaacagggcttctactacgacggaaatctgctggagtgtgtcgacgtcgacgagtgtctcgatgagtctaactgtaggaacggtgtctgcgagaacactcgcgggggttataggtgcgcatgtactccaccagctgagtattcaccagcccagcggcagtgtctctccccagaggaaatggacgtagacgaatgccaagatcctgccgcttgcaggcctgggcgctgcgtgaaccttccggggagctatcggtgcgagtgccggcctccctgggtacctggcccttccggtcgggattgccagcttcctgagtcccccgcagagagagcccccgaaaggcgcgacgtctgctggtctcaacgcggcgaagatggtatgtgcgcaggccctctggcaggtcctgctcttactttcgacgactgttgttgtcgccaggggcggggctggggagctcaatgtaggccttgtcctccaagaggcgccggctcacactgtccaacatctcaaagcgagtccaactcattttgggacacctccccactgctcctgggcaagccccctcgcgacgaagactcatccgaagaggatagcgacgagtgccgctgcgtttctgctgcagcctgtagagggagggctgcaccctgcgcctcagtcccagccgcctccagctctacaccacctgcaccagcagcctggatctccacatcagcagagtcttag

SEQ ID NO: 47850 - DNA, 921 bp, Artificial Sequence
  derived and/or modified sequence
atgctgttcggcagcgagatctgcaaggagggcaagtgcgtgaacacccagcccggctatgagtgctactgcaaacaggggttctattacgatgggaatttgttggagtgtgttgacgtcgacgaatgcctggatgaatctaattgccggaacggagtctgtgaaaatacccggggcgggtacaggtgcgcatgcacccctccagcagagtattccccagcgcagaggcagtgcctatccccggaggagatggacgtcgatgagtgtcaggaccccgccgcttgcaggccaggacgatgtgtgaacttgcccggcagttatcgatgtgagtgtaggcccccttgggtacccgggccaagtgggagggattgtcagctgccagagtcacccgctgaacgcgccccggagcgacgggatgtgtgttggagccagagaggagaagatgggatgtgtgctgggccactcgcgggtcccgcactgactttcgatgactgctgctgtcgtcagggaagggggtggggagcccagtgcagaccctgtccacccaggggggccggctcacattgtcccacctcgcagtccgagtcgaatagcttctgggatacctcccctctgttgctaggcaaaccccccagggatgaggacagttcagaagaggattccgacgaatgcaggtgcgtgagcggccggtgcgtgcctagaccgggtggggctgtgtgcgagtgtccgggaggcttccagctggacgctagtcgtgcacgatgcgtggacatcgacgaatgcagagagctgaatcaaaggggcttgctttgcaagtcagagagatgtgtcaacactagtggatcctttaggtgcgtctgtaaggccgggtttgctcggagtaggcctcatggggcctgcgtccctcaaaggagaaggtag

SEQ ID NO: 47851 - DNA, 3414 bp, Artificial Sequence
  derived and/or modified sequence
atgaccctgatcggcgagaacggccacagcaccgacaccctgaccggcagtggcttccgcgtggtggtgtgcccacttccgtgcatgaatggcggccagtgttccagtcgtaaccaatgtttatgtccaccggatttcacgggcaggttctgtcaggtccctgccgggggagcaggggggggtactggaggaagcgggcctggactgtcccgcacaggtgccctctcaacaggtgccctcccacctctggcccctgaaggagatagtgtcgcttctaagcacgctatatatgcggtgcaagtcattgcggaccccccaggccccggggaaggcccccccgcgcagcacgctgcatttctcgttccccttggccccggccagattagcgcagaggtgcaggcacctccccctgttgtgaacgtcagagtgcaccatcctcccgaggcttccgtgcaagtgcaccggatcgagtcctctaatgccgaaagtgccgctccctcacaacacctcctccctcatcctaagccctctcacccgaggcccccgacccagaagccactggggcggtgtttccaagataccctgccaaaacaaccgtgtggtagtaatccgttgcccggtctgacgaaacaagaagattgttgcggctctatcgggaccgcgtggggccaaagtaaatgtcataagtgcccgcagctgcagtacactggtgtacaaaaaccaggccctgttagaggagaggttggcgctgattgtccccagggctataaaagactcaactctacacactgccaggacatcaatgagtgtgctatgcctggggtgtgcaggcatggggactgtctgaataaccccggttcatacaggtgcgtgtgccccccaggccacagtctcggcccaagtaggacccaatgtatagccgataagccagaagagaagtccctgtgcttccgactggtgtcgccagagcaccagtgccagcatccgttgaccacgcggttaacccgccagctttgctgctgcagtgtggggaaggcctggggagccagatgccaaaggtgtccaacagacgggaccgctgcgtttaaagagatttgcccggccggcaaggggtaccacatcctgacgagccaccagaccttgacgatccagggagaaagcgacttctccttgttccttcatcccgacgggccgccaaagcctcaacagcttccggaaagccctagccaagcaccgccccctgaagatacagaggaagaaagaggagtcacgaccgattcccctgtgtctgaggaacggagtgttcagcagtcacacccaactgccacaaccactcctgctagaccataccctgagctgatcagccggccatctcctcccaccatgcggtggttcctccccgacctaccgccctctaggagtgctgtggagatcgcccctacacaggtcactgagacagacgagtgtcggctgaaccagaacatttgcggacatggcgagtgcgttccaggcccgccagactactcctgtcactgtaatccaggctataggtcacatccccagcatcgctactgcgtggacgtgaacgaatgtgaggccgaaccatgcgggcccggaagaggaatctgcatgaatacaggtggttcttacaattgtcattgtaacagaggatataggcttcatgtgggcgctggaggaaggtcctgtgtggatttaaacgagtgcgccaagccccacctgtgcggcgacggtggcttttgcatcaattttccggggcattacaaatgtaattgctacccagggtatcgtctgaaagccagtcgtccacctgtgtgcgaggatatcgatgagtgcagagaccccagttcatgcccagacggcaagtgcgagaacaagcctgggtcttttaagtgtatagcctgccagcccggctaccgtagccaaggcggaggggcgtgtagagatgttaatgaatgtgccgagggcagcccctgctcccctggatggtgcgagaatctgcccggctcattccgctgcacatgcgctcagggctacgcccctgcacccgacggacggagctgcctcgatgtggacgagtgcgaagccggcgacgtgtgcgataacggaatttgcagcaatacaccaggatcttttcagtgccagtgcttgtctggctatcacttaagtagagacagatcccattgtgaggatattgacgagtgcgactttcccgctgcatgcattggcggagattgcatcaacacaaacggttcttaccgatgtctctgtcctcaaggccaccgtcttgtcggaggtcgcaaatgccaagatatcgacgagtgcagccaggatcccagcctctgcttaccacatggcgcatgtaaaaatttgcagggtagctacgtgtgcgtctgcgacgagggattcacccccacgcaggatcaacacgggtgcgaggaagtggagcagcctcaccataagaaagagtgctatctcaattttgacgacacggtcttttgcgattccgtgttggctaccaacgtgacacagcaagagtgttgctgttctcttggggcaggatggggagatcactgtgaaatctacccatgccctgtatatagctccgccgagttccactcactgtgtcccgatggcaagggctatacccaggacaacaatatcgtgaattacggaatccctgcccatagggatatcgacgagtgcatgttgtttggttctgaaatctgtaaggagggcaaatgcgtaaacacccaaccaggatatgaatgctactgcaagcagggattctattacgatggcaatcttctggaatgtgttgatgtggacgaatgcttagacgagtccaactgccgcaacggggtttgtgagaacacaagaggtgggtatcgttgcgcttgcaccccacctgctgagtattcaccagctcaaagacagtgtctatcgccagaggaaatggacgtcgacgaatgtcaagatccagccgcttgcagacccggaagatgcgtgaacctgcctggttcatatcgatgtgagtgccgccctccctgggtgccagggccttctggtagagactgccaactgccagagagcccagcagagcgggccccagagcgtagagatgtctgctggagccagagaggcgaggatggaatgtgcgcaggccctctggccgggccagcccttacattcgatgattgttgctgcaggcaggggagagggtggggagcacagtgtcgaccctgccctcctcgcggcgcgggttctcactgccctacttcccagtccgaatcaaattccttctgggataccagcccgctgctgctggggaagcctcctcgcgacgaagattccagcgaggaagatagcgacgaatgccggtgcgtgtcaggatag

SEQ ID NO: 47852 - DNA, 2202 bp, Artificial Sequence
  derived and/or modified sequence
atgcccgccgagaccgacgagtgccggctgaaccagaacatctgcggacacggggaatgtgtcccaggcccccctgattactcttgtcactgcaacccgggctacagatcccacccacagcacagatactgtgtcgacgtgaacgagtgtgaagccgagccttgcgggcccggcagaggcatctgtatgaatacgggtggtagctataactgccattgcaacagaggctataggttacatgtgggtgccggcggccgttcttgcgtcgacctgaacgagtgtgcaaaacctcacctgtgcggggacggtggtttttgcataaatttccccggacactataaatgtaactgctatccgggctaccgactaaaagcttcgagaccccctgtgtgcgaagatattgacgagtgccgtgatccttcctcgtgccctgatggtaagtgcgagaacaaacctggatctttcaaatgcatcgcttgtcagccaggctaccggtctcaagggggcggtgcgtgccgagatgttaacgaatgcgccgaaggttcgccatgctcccctggctggtgcgaaaatctgccaggcagctttcgctgcacctgcgcacagggctatgcacctgcccctgacgggcggtcttgtctggacgtcgatgaatgcgaagcaggcgatgtgtgtgacaacggcatttgttcgaacaccccggggagttttcagtgccagtgcctgtctggataccacctgtcacgagatcggtcgcattgtgaagacattgacgaatgtgatttcccagctgcctgcatcggcggcgactgtattaacactaatgggtcctacaggtgcctttgcccccagggccatcgcttagtaggaggacggaagtgccaagacatagatgaatgtagtcaagatccgtccttgtgcttgcctcacggtgcctgtaaaaacctgcaaggaagctatgtctgcgtttgtgacgaggggtttacacctacacaggatcagcacggatgcgaggaggtggagcagcctcaccacaaaaaagagtgctaccttaatttcgacgatacagtcttctgcgacagcgtgcttgcgacaaatgtcacgcagcaagaatgctgctgttctttgggcgccggctggggggatcactgcgagatctacccctgccctgtgtacagctccgcggaattccactccctgtgtccagacggtaagggctatacccaggacaacaacatcgtcaactatggtatcccagcccacagagacatcgacgaatgcatgctgttcggaagtgagatctgcaaagaggggaaatgtgtaaatacccaaccaggttacgagtgctattgcaaacagggtttttattacgacggtaatcttcttgagtgtgtggacgtggatgaatgcctggacgagagcaattgccgaaacggggtgtgtgagaatacccgcggcggatacaggtgtgcttgtaccccacctgcagagtatagccctgcccagcggcagtgtcttagtcctgaagaaatggacgttgacgagtgccaggacccagctgcttgtcgcccaggcaggtgtgtcaatctgcccgggtcttatcgatgtgagtgcaggcccccctgggttcccggtccttctggcagggactgccagctcccggaatcacccgctgagcgggccccggagcgacgggatgtttgttggtcacagcggggagaagacggtatgtgcgcaggcccactggccggcccggcgctcacctttgacgactgctgctgcaggcagggccgcggctggggagcacagtgccggccatgtccaccaaggggtgctggaagccactgcccgacgtctcagtctgaatcaaactcattctgggatacctccccccttttactgggaaagccacctagagatgaggactctagcgaggaggattctgacgaatgccggtgtgtgagtggtaggtgtgtcccaaggccaggcggcgccgtgtgcgagtgccctggcggcttccaactcgacgcgtccagagcacgctgcgttgacattgatgagtgtcgtgaacttaaccagcgggggctgctgtgtaaatctgaacggtgcgtaaataccagcggaagcttccgctgtgtgtgcaaagcaggatttgcccgcagtcgcccacatggtgcttgtgtgccacagagaagacgatag

SEQ ID NO: 47853 - DNA, 3912 bp, Artificial Sequence
  derived and/or modified sequence
atgccaggacccagaggcgctgctgggggactcgctcccgaaatgcgcggtgctggagcggcagggttgcttgctcttctactcttgttgctgctgctgttgcttggcctgggcggacgtgtggagggcggacccgctggcgagaggggggcaggtggtggaggcgcattggccagggaacgctttaaagttgtctttgcacccgttatatgcaaacggacatgtctcaagggacagtgccgggattcttgtcagcaggggtccaacatgacactcataggtgaaaatgggcatagtaccgacaccttaaccggaagtgggtttcgcgtcgtggtttgccctctgccatgtatgaacggcggtcagtgttcgtccaggaatcaatgtctctgccctccagacttcaccgggaggttctgccaagtgccggcagggggagcaggcggagggacggggggatccggacctggactgtctcgcactggggctctctcaactggtgctttacctcctctggccccagaaggcgacagtgtagcctctaaacacgccatttacgccgtccaagttattgccgatccccctggcccaggcgagggaccacctgcacagcatgctgcctttctagtcccactaggcccaggccagatatccgccgaggtgcaggcacctcctcccgtagtgaatgtccgggtgcatcatccacccgaagcaagcgtgcaggtacaccgcatcgagtctagcaacgctgaatccgccgctcctagtcagcacctactaccgcatcccaagcctagccatcccagaccacccactcagaaaccactggggaggtgctttcaggacacactaccaaagcagccctgcggctccaaccctctacctggactgactaagcaggaggattgctgcggttcgattggtactgcttggggccagtccaaatgtcataagtgccctcaactccagtataccggagtacaaaagccgggtcccgtgagaggagaagtaggggctgattgcccacagggatacaagcgattaaatagtacccattgtcaggacatcaacgaatgtgccatgccgggtgtatgtcggcatggggattgcctgaataacccgggttcgtatagatgcgtctgtcctcccggacattccctgggacccagtagaactcagtgcattgccgataagccagaggaaaaatctctctgctttcgtctcgtgtcacctgagcatcaatgtcaacatccccttactacacgtcttacgcgccaattgtgctgctgcagcgtgggaaaagcatggggtgcacggtgtcagcgatgccctacagatggaacagcagcattcaaggagatctgcccagccggtaagggataccatatacttaccagccaccagaccctgacaattcaaggcgagtccgacttctcgctgtttttgcatccggatgggcctcccaagccccagcaattacctgagagcccctctcaggccccaccaccagaagacaccgaagaggagcgaggcgtgacaaccgacagccccgttagcgaagagaggagcgtgcagcagagtcatcccacggctaccaccacacccgctcggccttatcctgagcttatctctcggcctagccctcctactatgcgatggttcctacctgacctgccgccatccaggtccgcagtagaaatcgcaccaacccaggttaccgagacagatgaatgtaggttgaatcagaatatctgtggccacggcgaatgtgttccaggcccaccggattatagttgtcactgcaatccgggttatcggtctcacccacaacacaggtactgtgtggacgtaaacgaatgcgaagctgaaccttgtgggccaggcagaggtatctgcatgaatacaggaggttcctacaactgccactgtaataggggctacagattgcatgtgggcgctggaggcaggtcctgtgtcgacctgaacgagtgcgccaaaccacacctgtgtggcgacggtggattctgcatcaactttccaggacactacaagtgtaactgctatcccggataccggctgaaagcttctcgccctccagtctgcgaggatattgatgaatgtagagatccaagttcctgtcctgatggtaagtgcgagaacaagcccggatcttttaagtgcattgcctgtcagccaggttatagaagccaaggcggaggtgcttgcagagacgttaatgagtgtgcagaaggctctccctgctcaccgggatggtgcgaaaatctgcctggctcattcaggtgcacatgtgcccagggctacgctcctgctcccgatggcagatcttgccttgatgttgacgagtgcgaggctggcgacgtatgcgacaacgggatttgcagtaatacgcctggttccttccagtgtcaatgcttatccggatatcacctgagtcgagatagatcccattgcgaggacatcgacgaatgcgatttccccgctgcctgtatcggaggggactgtattaacaccaatggttcttataggtgtctgtgtccacagggtcatcgcctggtcggtggtagaaaatgccaggacatcgatgagtgttcacaggacccatcattgtgcctccctcacggagcatgtaagaatctgcagggatcctacgtttgtgtctgcgatgagggcttcactccaactcaggaccagcacggatgcgaggaggtggaacagccccatcacaaaaaggagtgctacctcaacttcgatgacacagtgttctgtgattcagtgctcgccaccaacgtgacccagcaggaatgctgctgctcgttaggggctgggtggggggatcattgtgaaatctacccatgtcctgtttacagctctgccgaatttcacagcctgtgccctgatggcaaaggctacacgcaggataacaacatcgtcaattatggaatcccagctcaccgggacatagatgagtgtatgcttttcggtagcgagatatgcaaggaaggcaagtgtgtgaatactcagcctggctacgaatgctactgtaaacagggtttctactatgacggaaatttacttgaatgcgtagacgtcgacgaatgtctggatgaatcaaactgccgaaatggagtgtgtgagaacacacgtggaggataccggtgtgcatgtaccccacccgctgagtacagcccagctcagcgccagtgtctgagtccagaggagatggatgtggatgagtgccaggacccggctgcttgtagaccgggacgctgcgtgaacctcccgggatcgtatcgatgcgagtgccggcctccctgggtgccgggaccgagtggcagagattgccaattgcctgagagtcccgcagaaagggcgccagaacgcagggacgtttgctggtcacagcgaggggaagatggaatgtgcgccggtcccctcgcagggcctgctctcaccttcgacgactgttgttgccggcaagggagaggatggggagctcaatgccgcccttgtcctcccagaggcgctggcagccattgccctacttcacagtctgagtccaacagcttttgggacaccagcccgttactcctgggcaaacccccacgggacgaggattcatctgaggaagacagtgatgaatgccggtgtgttagcgggagatgcgtgcccaggccaggcggagctgtgtgcgaatgtcccggtggctttcagctggatgcctcacgagccaggtgtgttgacatcgatgaatgcagagagttgaatcagagaggcctgttatgcaaatccgaaaggtgtgtgaatacaagtgggagcttcaggtgtgtttgcaaagcaggattcgccagatctcgccctcacggagcctgcgtgccccagcgccgtcgatag

SEQ ID NO: 47854 - DNA, 792 bp, Artificial Sequence
  derived and/or modified sequence
atgcttttcggatcggagatctgcaaagagggaaaatgtgtaaatactcagcctgggtacgaatgctactgcaaacagggattctattatgatggaaatttacttgagtgcgttgacgtggatgagtgtctggatgagagcaattgcaggaatggggtgtgtgaaaacacaaggggcggatacaggtgcgcctgcaccccacccgctgagtactctcctgcacagcggcagtgcttgagtccggaagaaatggacgtggacgagtgccaggatcctgcagcctgtcgccctgggcgttgtgttaacttgccaggttcttaccgctgcgagtgccgccctccatgggttcctggcccttcaggccgagattgtcagttgccagagtctccagctgaacgcgcaccagagcggagagacgtgtgttggtcccaaagaggcgaagacgggatgtgtgcaggcccactggcaggacccgctctgactttcgatgattgttgttgccgacagggcagaggttggggcgcacagtgccggccatgccccccacggggtgctggcagtcactgcccgacaagtcagagtgaatctaactcgttttgggacacttctccactattgcttgggaaacccccacgagatgaagatagctccgaggaagacagcgatgagtgccggtgcgtatccgcagcagcatgccgaggcagggctgctccctgcgcatccgtccccgctgccagctcatccacaccaccagcccctgcggcttggatctccaccagcgcagagagctag

SEQ ID NO: 47855 - DNA, 921 bp, Artificial Sequence
  derived and/or modified sequence
atgctcttcggttcggaaatatgtaaggaggggaaatgcgttaacacccagcctggatatgagtgttactgtaagcagggtttttattatgatggaaaccttctcgagtgtgtcgatgtggacgaatgtctggatgaatccaattgtagaaatggggtgtgtgaaaataccagaggtgggtacaggtgcgcctgcactccacccgctgaatacagccctgcacagagacaatgcctctcacctgaggagatggatgttgacgaatgtcaggatcccgctgcctgtcgcccaggaagatgcgttaacctgcctggctcctatagatgcgagtgcagacccccttgggtaccgggaccttccgggcgagattgccagctgccagaaagccctgctgagagagctcccgagagacgggacgtttgttggtcccagcgaggcgaagatggcatgtgtgctggcccattagccggaccagccctgacattcgatgactgctgctgccggcaaggacgtggctggggcgcacagtgtcgcccttgccccccaagaggagccggaagccattgccccactagtcagtcagagagtaatagcttctgggacacctcgcccctcctgctgggcaagcccccacgcgacgaagactcctccgaggaggatagtgatgagtgtcggtgtgtctctggcagatgcgttcctcgcccaggcggtgccgtctgcgagtgcccaggaggcttccaactggatgcttctcgtgctaggtgcgtcgatattgatgaatgcagggagctcaaccagaggggcctactgtgtaaatccgagcggtgcgttaatacaagcggctctttcaggtgcgtctgtaaagctggcttcgcgcgatcccgtccacacggtgcttgcgttccccagagaaggaggtag

SEQ ID NO: 47856 - DNA, 3414 bp, Artificial Sequence
  derived and/or modified sequence
atgacactgattggtgagaacgggcacagcacagacacgctgacagggtctggcttcagggttgtagtgtgcccactcccatgtatgaacggagggcagtgttcatccaggaaccagtgtctgtgccccccagatttcaccggacgcttttgccaggtgcctgctgggggagccggaggaggcactggtggaagtggacctgggctgtcacggacaggagcactgagcacgggggcacttccacccttagcaccagagggagacagcgttgcttctaagcacgctatttatgccgtgcaggtgattgctgacccccctggtccaggcgagggccctccagctcaacatgcggctttcctcgtgcccctgggtccaggccagatatctgccgaagtccaggcaccaccgcctgttgtcaacgtccgggtccatcatcctccagaggcctctgtacaggtgcaccggatcgagtctagcaacgcagagagcgcagcgcctagccagcacctcctgcctcaccccaaaccctcccacccgagaccccctacgcagaagccactcggtcgttgtttccaggatacactgccaaagcagccatgcggaagtaatccactgcctggtctgaccaagcaggaggattgctgtgggtcaattggcacggcctggggtcagtctaaatgccacaagtgcccacagctccagtacactggagttcagaaaccaggaccggtgcggggagaagtcggggcagactgtccacaagggtataagcgcctcaatagcacacactgtcaggatatcaacgagtgcgccatgcccggtgtatgccgccacggcgactgtcttaataatccaggctcctaccgctgtgtgtgcccgccaggacactccctgggtcctagccggactcaatgcatagcggataaacctgaggaaaagagtctttgtttcaggttagtcagcccagaacaccagtgtcagcacccattgacgactagattaacaaggcagctctgctgttgctcagtcggtaaagcctggggagcgagatgtcagcgatgtccaactgatggcaccgctgctttcaaagaaatctgccccgcaggaaaaggttaccacatacttacaagtcatcagacgctaacaattcagggcgagtccgatttcagtttatttctacacccagacggccctccaaagccgcagcaactcccagagagccccagtcaggcccctccaccggaagatactgaagaggaaaggggggttactacggattcccccgtgagcgaggagcggtcagtgcagcagtcccacccgactgctactacgacccctgcaagaccataccccgaattaattagtaggccctctccgccaacaatgaggtggttccttcccgatcttccaccaagtcgaagtgccgttgagatcgcacccacccaggtgactgagaccgatgaatgcaggctgaatcagaacatatgcggacacggagagtgcgtgcctggtcctcctgactactcatgccattgcaaccccggatatcggtctcacccgcagcatagatattgcgttgacgtcaacgagtgtgaggctgaaccttgcggaccgggacggggaatctgcatgaataccggcggttcctacaactgccattgcaacagaggctacaggctccatgtgggggcaggcggacgttcgtgtgtcgatttgaacgagtgcgctaagccccatttgtgcggggatggcggtttttgtatcaattttccgggacactataagtgcaactgctatcccggataccggctgaaggcttctcgcccacctgtctgtgaagacatagatgaatgcagagacccaagttcctgtcccgacggaaaatgtgagaataaaccgggaagcttcaaatgtatcgcctgccagccaggataccgtagtcaaggaggtggggcttgcagggatgtcaacgagtgtgccgaagggtccccctgtagcccagggtggtgcgagaatctgcctggaagcttccgatgtacatgcgctcagggctatgcccctgcaccagatggcaggtcttgcttggacgttgatgaatgcgaagccggagacgtgtgcgacaatggtatctgctccaatacaccaggatcattccagtgtcagtgtctatctgggtaccacctttcacgggatagatctcactgtgaggatatcgatgagtgcgactttccagccgcatgtattggcggagactgtatcaacactaatggcagttacagatgcctctgccctcagggccacaggttggtgggcggtagaaagtgccaggatattgatgaatgttctcaggacccatctctgtgcctgccacatggcgcttgcaagaatctccaagggtcctatgtgtgtgtgtgtgacgagggcttcacgcccactcaggaccaacatggctgtgaggaggtcgagcagccacaccacaagaaggagtgctatctgaactttgacgacaccgtgttctgtgattcggtcttggcgactaacgttactcaacaggaatgctgctgctctctgggggctggctggggagaccactgtgaaatctatccgtgccccgtctatagtagcgccgaattccactccctctgccctgatggcaaaggatacacacaggataataacatcgttaactacgggatccccgctcatcgcgatatcgacgagtgtatgctctttggttcggagatctgcaaagagggcaagtgcgtcaacactcagcctggatacgaatgttattgcaagcaaggattttactacgacggaaaccttctggaatgcgtcgacgtggatgagtgtctggacgaaagcaactgccgcaacggtgtgtgtgaaaacacaaggggaggctatcgctgtgcttgcaccccgcctgctgagtactctccggctcaacgacagtgtttgtctcccgaagaaatggatgtcgatgaatgtcaggatccggcagcttgccgtcctggtcggtgcgtaaatctgccagggtcgtacaggtgcgagtgtcgcccaccatgggtgcctggcccatccggcagggattgtcaactgcctgagtctccagccgagagagcacccgaacgacgcgatgtctgttggagccagagaggtgaggacggaatgtgtgccggacctctggccggaccagcactgacatttgatgactgctgttgtcgccagggccgaggctggggcgcacagtgtagaccttgtccaccgagaggcgcaggatcccactgccccaccagccagagcgagtccaattctttctgggataccagcccactgctattgggtaaacctccacgcgacgaggactcttccgaagaagacagcgacgagtgccgatgtgtatccgggtag

SEQ ID NO: 47857 - DNA, 2202 bp, Artificial Sequence
  derived and/or modified sequence
atgcctgctgagacggacgaatgcagactgaatcagaatatatgcggccacggtgagtgcgtaccagggccacccgactatagctgccactgcaatcccggttaccggtcccaccctcagcacaggtattgtgtggacgtgaacgaatgcgaggccgaaccctgtgggccaggtagaggaatttgtatgaataccggagggtcatacaactgtcactgcaaccggggatatcgcctgcatgtcggcgcaggagggaggtcctgcgtggaccttaacgaatgtgctaagccgcacctctgcggggacggcggattctgcatcaatttccccggacactacaaatgcaactgctatcctggatacagacttaaagcctccagacccccagtgtgtgaagatatcgacgaatgtagagatccatcgagctgtcccgatggaaagtgcgaaaacaagcctggcagctttaaatgtattgcctgccaaccaggctacaggagccagggcggaggagcctgtagagacgttaacgagtgtgccgagggctccccgtgctctccaggatggtgcgagaatctacccggttcctttcgctgtacatgtgctcaagggtatgcgcctgcccctgacggccgtagctgtctggatgtagatgagtgcgaagcaggcgacgtgtgtgataacggaatctgcagcaacactcccggatccttccaatgtcagtgcctcagcggatatcacctgagccgcgatcggtcccactgcgaggacattgatgaatgcgacttcccagccgcttgcatcggcggagattgcatcaatactaatggcagttacagatgcctgtgcccacagggtcaccgactcgtgggaggcaggaagtgtcaggacatcgatgaatgcagccaggatccttcgctctgtttgccccatggagcctgcaaaaaccttcaaggctcctatgtctgtgtgtgtgatgaggggtttacaccaacgcaggaccagcatggatgcgaggaagtcgagcagccacaccataagaaggaatgctacctaaactttgatgatacagtgttctgcgacagcgtgctggcaacaaatgtcacacagcaggaatgctgctgttcactgggagcgggatggggggaccactgtgagatctacccgtgtcctgtgtattcttctgctgaatttcacagcctgtgcccagatggaaagggctacacccaggataacaatatagttaactatggtatcccagctcacagagacatcgacgagtgtatgctgttcggatcagagatctgcaaagaaggcaagtgtgttaacacccagcctggctatgagtgctattgcaaacaaggattttactatgacggcaatctgctcgaatgcgtggacgtagacgaatgcttagatgagagtaactgtcggaatggcgtgtgtgaaaatacgcggggtgggtaccgctgcgcttgcaccccgccagccgaatattcgcccgctcagcgccagtgcctgtctcctgaggagatggacgttgacgaatgtcaggatcctgccgcttgccgccctggcagatgtgtgaacctgccgggaagctaccggtgtgagtgccgcccaccttgggtgcccggtccttccggtcgggactgccagctaccagaatcacctgctgagcgtgcccctgaaaggcgggacgtgtgttggagtcagagaggagaagacgggatgtgtgccggtccgctcgccggaccagcccttaccttcgacgactgttgttgccgtcaaggcagagggtggggggcacagtgccgaccttgtcctcccagaggggctgggagccactgccccacctctcagtcagagagcaattccttttgggacacttctccattacttctcgggaagccccctcgggacgaggattcaagcgaggaggattctgacgaatgccgctgtgtttcagggaggtgcgtgcccaggcccggaggggctgtgtgtgaatgcccgggtgggtttcagctggatgcaagccgcgctcgatgcgtcgatattgatgaatgtagagagctgaaccagcgcggactcctgtgtaaaagtgaacggtgcgtgaacacgagcggatcctttagatgcgtatgcaaggctgggttcgcacgttcaaggccccacggcgcatgcgtcccacagcggagacggtag

SEQ ID NO: 47858 - DNA, 3912 bp, Artificial Sequence
  derived and/or modified sequence
atgccagggccgagaggggcggccggaggccttgctccagagatgcggggtgccggcgccgctgggcttctcgctctgcttcttctgttgcttttgctgttactcggtcttggtggacgggtggagggagggcccgcaggcgagcgcggagccggcggtggcggtgcactcgctcgagaaaggttcaaggtggttttcgctccggtgatttgtaagcggacttgcttaaagggacaatgtagagattcatgccagcagggatcaaacatgaccctgattggcgagaacgggcattctacggatacgctaacaggctcggggttccgcgtggtggtttgccccctgccatgcatgaacgggggacagtgctccagcaggaatcagtgtctctgtcctcctgactttacaggaagattttgtcaggttcccgcaggtggcgccgggggagggactgggggatctgggccaggattgtccagaaccggagccctcagcactggggcccttccaccccttgcacctgaaggagattcggtcgccagtaaacatgctatctacgccgtgcaagtgatcgccgaccctccaggtccaggtgaaggaccacccgcccagcacgctgctttccttgttccccttggacccggacagatttccgcagaagtgcaagcacctcctccagtggtgaatgtgcgagtgcaccatccacctgaggcttctgtgcaagttcaccggattgaatcctcgaatgctgaatctgcagctcctagccaacaccttctgcctcaccctaaacctagccatccccggcccccaactcagaaacctctgggcagatgtttccaagatacactaccgaaacaaccttgcggcagtaacccattgccaggtctcacgaaacaggaggactgctgtggatccatcggcaccgcctgggggcaatccaaatgtcacaagtgcccgcagctgcaatataccggcgtgcagaaacccggcccagttagaggagaagtcggcgccgactgtcctcagggctacaagagactgaactccacgcactgccaagatatcaacgaatgcgccatgcccggagtgtgccgacacggcgattgcctcaacaaccctggcagttaccgctgcgtgtgtcctcccggtcattccttgggtccttcgcggacacagtgcatcgctgataaacctgaagaaaagtccctgtgttttaggctggttagtccggaacatcagtgtcagcaccctctaactacgcgtttaacaagacagctgtgctgttgctctgttggtaaggcttggggcgcccgatgtcagcgttgcccaaccgacgggacagccgcctttaaagagatttgtcctgcaggaaaaggctaccatattttaaccagccaccagactctgaccattcagggagaatctgattttagccttttcttacacccagatggtccaccaaaacctcagcaattgccagaatcaccatcacaggcgcctccccccgaggacacggaggaggagagaggtgtcactaccgacagccctgttagcgaggagcgcagtgttcagcaatcccatccaactgcaaccacgactccggcccgcccttaccccgaattaatcagtaggcccagccctcctacgatgcggtggttcctacctgaccttcctcccagtcgaagcgctgtcgaaatcgcccccacccaggtcacagagactgatgagtgtcggctgaaccaaaacatctgtgggcacggggaatgtgtcccaggtccgcccgactatagttgtcattgtaatccaggatatcgatctcatcctcaacaccgctactgcgtggacgtgaacgagtgcgaagccgagccatgcggccccggccgggggatctgcatgaacacaggcggatcctacaactgccattgcaacagaggctacaggttacatgtaggggcgggcggcaggtcttgcgtggatctcaatgagtgcgctaagccacatctttgcggagacggaggattctgcattaattttcccggacactacaagtgcaactgctaccccggatacaggctgaaagcttctagacctcctgtctgcgaggacattgatgaatgcagagacccatcctcctgtccagatggaaaatgcgaaaataagcctggatcctttaagtgtatagcttgtcagcccggctaccgctctcaaggagggggggcctgtagggatgtaaatgagtgtgcagagggaagcccttgctcgcctggttggtgtgagaaccttcctggttcctttagatgtacatgtgctcagggttatgctcccgctccggatggcagaagctgtctggatgtggacgagtgcgaagccggcgatgtgtgtgacaacggcatctgcagtaacacaccggggtccttccaatgtcagtgcctgtctggctatcacttaagccgggatcgttcacattgtgaagatattgacgaatgcgactttcccgcagcctgcattggcggcgactgcattaataccaatgggtcctaccgctgcttatgccctcagggtcaccgcctggttggcggccggaagtgtcaggatatcgatgagtgttcacaagacccttccctgtgcctgcctcatggcgcatgcaagaacctgcagggctcctacgtttgcgtgtgtgatgagggctttacgcctacccaggaccagcacggatgtgaggaagtcgaacagcctcaccataaaaaggagtgttatctgaatttcgacgacacggtcttctgtgactccgtcctggcaacaaatgtaacgcaacaagagtgttgctgctctctgggtgcgggatggggcgaccactgtgagatctacccctgcccagtatattctagcgcagagttccattccctgtgtccagatggcaaagggtatacccaggataataatattgttaattatggcatccccgcccaccgtgatatcgatgaatgtatgctattcggatcggagatctgcaaggaaggcaagtgcgtcaatacacaacccggctatgagtgttactgtaagcaggggttctattacgacggcaacttgcttgagtgcgttgacgtagacgaatgtctggacgagtctaactgccgcaacggggtctgtgagaatacccgagggggttatcgttgcgcctgcactccaccggccgaatattcacccgcccaacgtcaatgcctttctccggaagagatggatgtggacgagtgtcaggatcctgcagcatgtcgccccggcaggtgcgtcaacctgcctggatcataccgctgtgaatgcaggcctccgtgggtgccgggcccgtcgggacgtgattgccagctacccgaaagcccagctgaaagggctccagagcgtcgggatgtgtgttggagtcagcgaggtgaggacggtatgtgcgcaggccccctagcaggaccagccctaactttcgatgattgctgctgtcgccagggcaggggttggggagcccagtgccgtccctgcccgcctcgaggcgctggaagccactgccccacaagccagtcagagagcaattccttttgggacacttcccccttactccttggtaagccacctagggatgaggactcaagcgaagaagactcagacgaatgccggtgtgtgtccggccgctgcgtccctcggccgggaggagccgtgtgcgaatgtccggggggtttccaactggacgctagccgtgctcggtgcgttgatattgatgaatgcagagagcttaaccagagagggctcctgtgcaagtctgagaggtgcgtgaacacatctggcagtttccggtgtgtgtgcaaagctggatttgcaagaagccgtcctcatggggcatgtgttcctcagagaaggcggtag

SEQ ID NO: 47859 - DNA, 792 bp, Artificial Sequence
  derived and/or modified sequence
atgttgttcggaagcgagatctgtaaggaagggaagtgtgtgaacacccaacctgggtatgagtgctactgtaagcagggtttttactacgacggaaatctccttgaatgcgtggatgttgacgaatgccttgatgagtccaattgccgcaatggcgtatgtgagaatacacgtggcggttacagatgcgcctgcacccctcctgccgagtattccccagcacaacgccagtgcctatcacctgaagaaatggacgtagacgagtgtcaggatccggcagcatgccgccccggccgctgcgtcaatctgcctggctcatatcgctgtgaatgccggccgccctgggtccctggaccatcaggccgtgattgccaactgccggaatcccccgccgagagagcccctgagcgaagggacgtctgttggtcccaacggggcgaagacgggatgtgcgccggtcctctggcagggcctgccctcacttttgacgactgctgctgtagacaaggccgtggttggggcgcccaatgtagaccgtgtccaccacgaggggcaggaagccattgtccaacaagtcaaagtgaatctaattctttctgggacacaagtcctctgctcctgggaaagccgccaagggacgaagactccagtgaggaggatagcgatgaatgtagatgcgtgtctgccgcggcttgtcggggtcgagccgctccttgcgcctccgtccccgccgcaagcagctcgactccgccagccccagccgcctggattagcacttctgccgagagctag

SEQ ID NO: 47860 - DNA, 921 bp, Artificial Sequence
  derived and/or modified sequence
atgctctttgggtccgaaatttgcaaagaaggcaagtgtgttaatacacagccaggttacgagtgttactgcaaacagggcttttactatgatggaaatttgttggaatgtgttgatgtggacgagtgcctcgatgagtccaactgccgcaatggggtttgcgagaacacccgaggcggttacaggtgcgcatgcacaccacctgctgaatacagcccagcccagcggcaatgccttagtcccgaggagatggacgtcgatgagtgccaagacccagcagcctgccgccccgggagatgcgtcaacctaccaggatcttacagatgcgagtgccggccaccttgggtacctggccccagcggccgtgattgccaactgcctgagagtcctgctgagcgcgcccccgaacgcagggacgtgtgctggtcccagagaggggaagatggaatgtgcgcaggtcctctggcagggcctgccttaaccttcgacgactgttgctgtcgccagggtcgcggctggggagcacagtgcagaccatgccctccgcgcggcgctggctcccactgcccaacttcccagtccgaatctaattccttttgggatacatcccctttactgctcggcaaacctccgcgtgatgaagacagttcagaggaagatagtgatgaatgtcgctgcgtatctggacgatgtgtgccacggccaggtggggctgtatgcgaatgccccggcggcttccaactggatgccagtagggcccgatgcgttgacatagatgaatgtcgtgagctgaatcagagaggccttctgtgcaagtctgagcgatgcgtcaacacttctgggagctttcgatgcgtctgtaaagctggattcgcccggagtcggccacatggtgcatgtgtcccccaacgaagacggtag

SEQ ID NO: 47861 - DNA, 3414 bp, Artificial Sequence
  derived and/or modified sequence
atgacgctgataggagagaacggccactcaacagacaccctgaccggcagcgggtttagagtcgtggtctgccctcttccatgtatgaatggggggcagtgctcatccagaaaccagtgtctgtgcccgcccgactttacgggccgcttttgtcaggtccccgctggcggtgcagggggtggtacagggggaagcggccccgggcttagccggaccggcgccctgtctaccggcgccctacctcccctagctcctgaaggcgattcagtcgcaagcaagcacgctatttatgccgtccaggtaatagcggacccgccagggcccggcgaggggccccctgcacagcatgccgcatttctggtgccgctgggccccggccaaatctctgccgaagtacaagcccctcctccagttgtcaatgtccgcgtgcatcaccccccagaggcctctgtccaggtgcatcgcattgaaagttctaacgcagagtccgctgccccctcccagcacttgctgccacatcctaagccatcccatcctcgcccccccacccagaagccccttggaaggtgtttccaagatactttgccaaagcagccttgtggatcaaaccccttgccaggactgactaaacaggaagattgctgcggctccattggaaccgcttggggtcagagtaagtgccacaagtgtccacaactccagtacaccggggtccaaaaaccgggcccggtcaggggcgaggtgggggccgattgtcctcagggctacaaaagacttaattcgacgcactgccaagacatcaatgaatgcgccatgcccggcgtgtgccgtcacggtgactgcctgaacaacccaggtagctatcgatgcgtttgccctcctggacactctctcggcccatcaagaacccagtgcatcgccgataagcccgaagaaaaatctctgtgtttcagactggtgtcacctgaacatcagtgccagcatccactcacaacaagacttacccgacagctgtgctgttgcagtgtgggcaaggcgtggggcgctcggtgtcagagatgtcctacagatggcaccgcagctttcaaagagatatgcccagcaggaaagggctaccatatcctcacatcacaccagaccctgactatacaaggagaatcagatttttcattgtttctccatccagacggtcccccaaagccgcagcaactgccagagtccccatctcaagctcctcccccagaagacaccgaagaagagagaggggtgacgactgattccccagtttcagaagaaagatcggttcagcagtctcatcccacagctacgactactcctgcacggccataccctgagttgatttctaggccttcaccaccaactatgcgctggttcttacccgacctgcccccctctagaagtgctgtggaaatagcccctacccaggttaccgagacagacgagtgccgactgaaccagaacatttgcgggcacggggaatgcgttcccggaccacccgactactcctgtcactgtaacccgggctacagatcacaccctcaacatcggtactgtgtagacgtgaacgaatgcgaggccgagccctgtggacctggtcgcggaatctgcatgaatactggcggcagctacaactgtcactgtaatcggggatatagactacacgtaggagccggtgggcggagctgcgttgatctaaacgagtgtgctaaaccccacctctgcggcgacgggggcttttgtatcaacttcccagggcattacaagtgtaactgctacccgggttataggttaaaggcttcaagaccacctgtatgtgaagacatcgatgagtgtagagatccatccagctgtcctgatggcaagtgcgaaaacaaacctggatcctttaaatgcatcgcctgccagccgggctaccgttcccaaggggggggcgcatgtcgggacgtgaatgagtgcgcagaaggttctccatgcagtcccggctggtgcgagaacctgccaggtagctttcgctgcacttgcgctcaggggtacgctcccgcacctgacggtagatcatgcctcgatgttgacgaatgtgaagccggagacgtttgtgataacggaatttgcagcaatacgcctgggagcttccagtgccagtgcctatccgggtatcacttaagccgcgatcggagccattgcgaggatatcgacgagtgcgactttcccgcagcatgtatcggaggcgattgcatcaacacaaacggatcctaccgatgtctgtgtccccagggtcatcgactggtgggcggacgaaagtgccaagacatagatgagtgcagtcaggacccctcgctctgcctgcctcacggtgcatgtaagaatttacaagggtcttacgtgtgcgtgtgcgatgagggatttacccctacacaggatcagcatggatgtgaggaagtagagcagcctcatcacaagaaggaatgctatcttaacttcgacgacactgtgttctgtgatagcgtgctggccaccaatgtgacacaacaggaatgttgctgtagcttaggcgcgggttggggcgatcattgcgaaatatatccttgtcccgtgtactctagcgccgaattccattcactatgccccgacggaaaaggatatacccaggacaacaacatagttaactacggcatccccgcccatcgcgacatcgatgagtgtatgttgtttggtagtgaaatctgtaaagaagggaaatgcgtgaatacccagcctgggtacgagtgttactgtaagcagggattctattacgacggaaatcttctggagtgcgtagacgtcgatgaatgtctggatgaatctaactgccgaaacggcgtgtgcgaaaatacccgcgggggctaccggtgcgcctgcacccccccagccgaatatagccccgcccagagacagtgtctgtccccagaggaaatggacgtggatgagtgccaagatccagcagcatgtaggcccggccgatgcgtcaacctacccggatcttaccgatgcgagtgtcgcccaccctgggtccctgggccttcaggcagagattgccaactcccagagagtccagctgaaagggctccagaacgcagggatgtatgttggagtcaacggggggaagacggcatgtgtgctggcccgctcgctggaccagccctgaccttcgacgactgttgctgtaggcagggccgcggttggggtgcccagtgcagaccttgtccacccaggggtgccggcagccactgccccacaagccaatctgagagcaatagcttttgggatacctcacctctgctgctgggcaaacctccaagggacgaggactctagcgaagaggatagcgatgaatgtaggtgcgtgagtggatag

SEQ ID NO: 47862 - DNA, 2202 bp, Artificial Sequence
  derived and/or modified sequence
atgcctgccgaaactgatgagtgccggttgaaccagaacatttgcggccacggagagtgtgtacctggcccgccagactacagctgtcactgtaatccaggatacaggtctcacccacagcatcgctattgcgtggatgtcaatgagtgtgaagcagaaccttgcggtcccggacgcggtatatgtatgaacaccggcgggagctataactgccactgtaatagagggtacagattacacgttggagcgggcgggagatcatgcgtggacctaaacgagtgtgctaagcctcacctctgcggagatggggggttttgcattaactttcctgggcattacaagtgcaattgttatcctggatataggcttaaggcatccagaccccccgtgtgtgaggacattgacgaatgccgagacccttcttcctgtcctgacggcaagtgcgagaacaagcctgggagcttcaagtgtatcgcttgtcagccagggtacaggtcccaggggggcggcgcatgccgggatgttaacgagtgcgctgaaggtagcccttgttcaccagggtggtgtgagaaccttcctggaagcttccggtgtacctgtgcacaagggtatgctccagccccagatggtcggagctgcctggacgttgatgaatgcgaggccggagacgtctgcgataacggaatttgctcaaacacacctggctccttccagtgccagtgtttgtcggggtatcatttgagtagagatagaagccactgcgaagacatcgatgaatgcgacttcccagccgcttgtatcggtggggactgtatcaacacaaatgggagttacaggtgtttgtgtccgcaaggtcatcggctagtgggcggtagaaagtgccaggatatcgatgagtgtagtcaagaccccagtctttgcctgccgcacggagcctgcaagaatttacagggatcctacgtgtgtgtttgcgatgagggattcactcctacacaggaccagcacgggtgcgaggaagtggagcagcctcaccacaagaaggaatgctacttaaactttgatgacacagtgttttgcgatagtgttctggccaccaatgtcacccagcaagagtgttgctgcagcctcggcgcaggttggggggaccattgcgaaatttacccatgccctgtctactcttctgctgaattccactctctgtgccccgacggaaaggggtacacgcaagataacaacatcgtgaattatggaatcccggcccatagagacatagatgagtgcatgttgttcggcagtgaaatctgtaaagagggaaaatgtgtgaatactcagcccggttacgaatgctattgcaaacaaggtttctactatgacgggaacctacttgagtgcgtggacgtggacgaatgtttggatgagtctaattgccggaacggtgtgtgcgagaacaccagagggggataccggtgcgcttgcaccccgcctgctgaatatagtcccgcccagcggcagtgcctcagcccagaggaaatggacgtcgacgaatgtcaggaccctgccgcttgtcgcccaggacgctgcgttaacctacccggatcctatcggtgtgaatgccggccaccatgggttccaggcccttccggcagggactgccagctgcctgagtcccctgccgagcgtgcccctgaacggagggatgtgtgttggagccagcggggcgaggatgggatgtgtgcaggacctctcgcgggccccgctcttaccttcgatgattgctgttgccggcagggcagagggtggggcgcacaatgcagaccttgtcccccccggggagcaggatctcactgtccaacctcacagtcggaaagcaattcattttgggacacttcaccactgttactgggcaagcctcctcgtgacgaagactcctcggaggaagatagcgacgagtgcagatgcgtgagcggccggtgcgtacctaggcccgggggcgccgtttgcgaatgccctggcggttttcagctggacgcgtctcgggcccgatgtgtggatattgatgagtgtcgggaactcaatcagcggggactgctctgcaagtctgaacgttgtgttaacacttctggatccttcagatgcgtttgcaaagccggatttgcccgttcacgaccacacggcgcttgcgtaccacagcggcggagatag

SEQ ID NO: 47863 - DNA, 3912 bp, Artificial Sequence
  derived and/or modified sequence
atgcccggtccacgcggggccgccgggggattagcccctgagatgagaggtgccggtgcggccgggcttctcgcactgctgctactactgctactgctgcttcttggactgggcgggagggtggagggtggaccagccggcgaaagaggtgcaggaggtggtggggctctggcaagggaacggtttaaggtcgtgttcgctccagtgatatgcaaacgaacttgtctcaagggacaatgccgcgactcatgccaacaaggcagtaacatgactcttattggggaaaatggacactctaccgacaccttgacaggttccggctttcgcgtcgtggtgtgtcccctgccttgtatgaacggcggacagtgctcctcacgcaaccaatgtttgtgccctccagattttacagggagattctgtcaggtgcctgcaggtggggctggtggtggaaccggcgggagtgggcccggtttaagccgcactggggctttatctacaggagcgttgccacccctggcgcctgagggagactctgtggcctctaagcatgccatctacgctgttcaagttattgccgacccccccggcccaggtgaaggtccacccgcccagcacgctgctttccttgttccccttggacccggacagatttccgcagaagtgcaagcacctcctccagtggtgaatgtgcgagtgcaccatccacctgaggcttctgtgcaagttcaccggattgaatcctcgaatgctgaatctgcagctcctagccaacaccttctgcctcaccctaaacctagccatccccggcccccaactcagaaacctctgggcagatgtttccaagatacactaccgaaacaaccttgcggcagtaacccattgccaggtctcacgaaacaggaggattgttgtggttccatcggaacggcgtggggccagagcaaatgccacaaatgtcctcaattacagtacactggagtccagaagcccgggcctgtgcgaggcgaggtgggagctgactgcccccaaggatataagaggcttaatagtactcactgtcaagacattaatgaatgcgccatgcccggggtgtgccgtcatggagattgtctcaacaacccaggcagttacaggtgcgtatgcccaccagggcactctctaggaccttcacgcacacagtgcattgcagacaaaccagaagagaaatctctgtgcttccgcctagtgtcgccggaacatcaatgccaacatcccttgaccacacgattaactcgtcagctgtgttgttgttcagttgggaaggcctggggcgcccgctgtcagcgatgtcctaccgatggcacagccgccttcaaagaaatttgccccgcaggcaaagggtatcatatcctcacgtcgcaccaaacattgacaatccagggagagtccgactttagcttgtttctgcatcccgacggaccaccaaaaccacagcagctccccgaatcccctagtcaagcgcccccaccagaggacaccgaggaagagcgcggtgtgactaccgactccccagtatctgaggaaaggtccgtgcaacagtcccacccgacggcaaccacaacaccagcaagaccatacccagaactgatatctagaccttcaccgccaacaatgcgctggttcctacccgatctacccccttcgagatctgcagtcgaaatagcaccaactcaagtaacagagaccgacgaatgcaggctaaatcagaatatctgtggacatggcgaatgtgtgccaggcccacccgattactcttgccactgcaatcccggttataggtcccacccccaacaccgctattgcgtcgacgtgaatgaatgcgaagccgaaccttgcgggccaggtagaggaatttgcatgaacacaggaggctcgtacaactgccactgtaatagaggctaccggcttcatgtgggcgcaggcggaagatcctgtgtcgatcttaatgagtgcgctaagccccacctgtgtggtgatggaggattctgcatcaatttccccggtcattacaagtgtaattgctaccctggatacaggctcaaagcatctcgcccccccgtctgtgaagacatagatgagtgtcgcgatccctcctcatgcccagacggtaaatgtgagaacaagccaggatcctttaaatgtatcgcatgtcagcccggttaccgctctcaaggcggaggtgcctgccgagacgtgaacgaatgtgctgaagggtcaccctgctcacctggatggtgtgaaaacctacctggttcgttcaggtgcacctgcgctcaaggctatgccccagctcctgacgggaggtcttgcttggacgtcgatgagtgcgaggcaggagacgtctgtgacaatggaatttgtagcaacacaccaggttcctttcaatgccagtgcctgtccggatatcatctttcacgtgacagatcacactgcgaagacatagacgaatgtgactttccggcagcctgtatcggtggcgactgtataaacaccaatggatcctatagatgtctgtgtccgcagggccacaggttggtgggcggccgcaaatgtcaggacatcgatgagtgttcccaagacccatccctttgccttcctcacggagcctgtaagaatctgcagggatcatatgtctgcgtttgcgatgagggatttactcccacccaggatcaacacggatgcgaagaagtagaacagcctcatcacaagaaggaatgctatctcaactttgacgacaccgttttttgtgacagtgtcctcgccacaaatgtgacgcagcaggaatgttgctgctcgcttggagccggctggggtgatcattgcgagatttatccatgccccgtttattcatcagccgagtttcacagcctctgtccggacggcaagggctacacccaggataataatatcgttaattacggaattccagcgcatagagatattgacgagtgcatgttattcggatccgaaatctgcaaagagggaaagtgtgtgaacactcagcctggatatgaatgctactgcaaacaaggcttctattacgatggaaacctactcgaatgcgtagacgtggacgagtgcctggatgaatcaaactgtcgaaatggcgtctgcgaaaacaccagaggcggctacagatgcgcttgcacccctcccgctgaatactccccagcacaaagacaatgtctgagccccgaagaaatggatgtcgacgagtgtcaagacccagccgcatgcagaccaggacggtgtgttaacctgcctggttcttaccgctgcgagtgcagacccccttgggtgcccggcccctccggccgcgattgccagttgcctgaaagccctgccgagcgggcaccagaacggcgggatgtgtgttggtcccaaagaggagaagacggtatgtgcgctggccccctggctggccccgcgctaacatttgacgattgctgttgcaggcaaggcagaggctggggtgctcagtgccggccatgcccaccgagaggtgccgggagtcactgtccaacaagccagagcgaatcaaactcattttgggatacatcgcctctcctgctcggcaagcctccaagagatgaagattctagtgaagaagactctgacgaatgtaggtgtgtttctggcagatgcgtcccaaggccaggaggggcggtgtgtgaatgtcctggagggttccagttggacgcctcacgagctaggtgcgtggacatcgacgagtgccgagaattgaaccagaggggattactgtgcaaatccgaacgttgtgtgaatacctcagggtctttccgctgtgtgtgtaaagctggcttcgcacgctcccgtccccacggtgcgtgcgtgccgcagaggcgtagatag

SEQ ID NO: 47864 - DNA, 792 bp, Artificial Sequence
  derived and/or modified sequence
atgctgttcggaagtgaaatttgcaaggaaggaaagtgtgtgaatacccaacccggctacgagtgctattgtaaacaagggttctattatgacggcaatctcctcgagtgtgtggatgtggacgaatgtctagatgagagtaactgccggaatggggtgtgcgagaataccaggggtggctatagatgcgcttgtactccacccgccgaatactcacctgcccaacgccagtgtctctcccccgaggaaatggatgtggacgaatgccaagaccctgctgcttgccggccaggccgatgcgtcaatctgcctggctcatatcgctgtgaatgccggccgccctgggtccctggaccatcaggccgtgattgccaactgccggaatcccccgccgagagagcccctgagcgaagggacgtctgttggtcccaacggggcgaagacgggatgtgcgccggtcctctggcagggcctgccctcacttttgacgactgctgctgtagacaaggccgtggttggggcgcccaatgtagaccgtgtccaccacgaggggcaggaagccattgtccaacaagtcaaagtgaatctaattctttctgggacacatcacctctcttgcttggcaaaccccccagggacgaggacagctctgaggaggatagcgacgagtgcagatgtgtttctgctgctgcatgccgcggacgagctgccccttgcgcatcagttcctgccgcctcctcttcgactccccccgcaccagccgcgtggatttctacaagcgccgaatcttag

SEQ ID NO: 47865 - DNA, 921 bp, Artificial Sequence
  derived and/or modified sequence
atgctctttggttcggaaatctgtaaggaaggaaagtgcgtaaacacccagccagggtatgaatgctactgtaagcaagggttctactatgatggaaatcttttagagtgtgtcgatgtagacgaatgcttagacgagtcgaattgtaggaatggtgtctgtgagaacacccgtggtggctatagatgcgcttgtacccccccagccgaatactcccccgcccagcgacagtgtctgtcacctgaagagatggacgtggatgaatgccaggaccccgctgcctgtcgacccggtcgttgcgtcaatctgcccggatcttatagatgcgagtgccggccaccttgggtccccggcccttctggacgtgattgtcagctgcctgagtcccccgcagagcgtgctcctgaaaggcgcgacgtttgctggtcccagcgaggcgaggacggaatgtgtgcgggccctctggccggccctgcattgacatttgatgactgttgctgtcgccaaggaagaggttggggcgctcagtgcaggccctgcccccctagaggcgccggaagtcattgccccaccagtcagtcagagtcaaactcattttgggacacctcacctttactgttgggcaagccccctagagatgaggacagcagcgaagaagacagtgacgaatgcagatgtgtctctggaagatgtgtgcctaggcctggtggcgccgtttgtgaatgtccaggaggttttcagctggacgcctcgagagctcgttgtgtggatatcgacgagtgcagggagttaaatcagagagggctattatgcaaaagtgaaaggtgcgtgaatacctccggatctttcaggtgtgtatgtaaagccgggtttgctcgatcccggccccatggcgcctgcgtacctcaacgtcgccgctag

SEQ ID NO: 47866 - DNA, 3414 bp, Artificial Sequence
  derived and/or modified sequence
atgacgttgattggagaaaacggtcattccacggataccctcaccggttcaggttttagagtcgtagtatgcccattgccttgtatgaatgggggccaatgtagctctcggaaccaatgtctatgtcccccggattttacaggtcgcttctgtcaggttcccgcaggtggagccgggggcggcacagggggatctggtcccggactgtccagaacgggtgccctctccaccggtgccctccccccactggccccagaaggggacagcgtcgcctctaaacatgcaatctatgcagtgcaggtaatcgctgaccctccaggtcctggagaaggaccaccagcacaacacgctgctttccttgtgcctcttgggcccggccagatctccgctgaagtgcaggccccgccgcctgtggttaatgttagggttcaccatccacccgaggcctctgtccaggtacaccgcatcgagtcatctaacgcagagtcagctgcccctagtcagcacttactgcctcatcccaagcctagccatcccagaccaccaacgcaaaagcctttagggcgatgtttccaagacacacttcctaaacaaccctgtggctctaacccattaccaggcctaaccaaacaggaagattgttgtggctccatcggaactgcctggggtcagtccaagtgtcacaaatgccctcagctacagtataccggagtccagaaaccaggtcctgtgcgcggtgaagtgggcgcagactgccctcaaggctacaaacgtctgaattctacccactgtcaggacattaatgaatgtgccatgcctggagtatgtcgtcatggcgactgtttaaacaaccccggctcatatcgttgtgtatgtccgccgggtcactccctcgggccgtccaggactcagtgtatagccgacaaaccagaagagaaaagcctctgcttccgactcgtgagccctgaacaccagtgccaacatcccctgaccacaagactaaccagacaactatgttgctgcagcgtcggcaaggcatggggagctcgatgccagcggtgcccaactgatggaactgccgccttcaaagagatttgccctgcaggaaagggatatcacatcctcactagccaccaaactttgactattcaaggtgagagtgatttttcattgtttttgcacccggacggtccccctaagccacagcagttaccggagtccccgtctcaagcacctccccccgaagacacagaagaagagcgaggggttactacagactcccccgtcagcgaagaacgatcagtgcagcaaagtcaccccacagccaccacaactcctgcacgcccctatcctgaactgattagccgaccatcccccccgacgatgagatggtttctgccagatcttcctcctagtcgcagtgccgttgagatcgcaccaactcaggttacagaaaccgatgaatgcagactcaaccagaatatctgcggccatggcgagtgtgtgcctggcccccctgactacagctgtcactgcaaccccggatacagaagccacccccagcaccgatactgcgttgatgtgaatgagtgtgaggccgaaccttgtgggccaggtcgaggaatctgcatgaacacaggagggtcctataactgtcactgcaaccgggggtatagattgcacgtgggtgccggagggagaagttgtgtagacttaaacgaatgcgccaaaccccacctttgtggagacggcggattctgtattaattttccgggtcactacaaatgtaattgctaccctggctatagactgaaggctagcagaccaccagtctgtgaggatatcgatgagtgcagagacccaagtagttgccccgatggaaagtgtgaaaacaaaccaggctcttttaagtgcattgcatgccaaccaggctacagatcccagggcggcggcgcttgtcgtgacgtcaatgaatgtgctgaaggctctccctgttcccccggctggtgtgaaaatcttcccggcagttttagatgcacctgtgctcaagggtatgctcccgctcccgatggacgttcatgtctggacgtggacgagtgtgaggcgggcgatgtttgtgataatggaatctgtagtaatacccctggatcctttcagtgtcagtgcctcagcggataccatctgtcaagagataggagccactgtgaagacattgatgagtgtgacttcccagccgcctgtatcggtggcgattgcatcaataccaacggttcttaccggtgtctctgtccccagggccacagacttgtgggcggccgaaaatgtcaagatatcgacgagtgtagccaagacccctctctctgtctcccgcacggcgcatgtaaaaatctgcaaggatcctacgtgtgtgtgtgtgacgaaggatttacacccacccaggatcaacatggctgcgaggaggtggaacagccccaccataagaaggaatgttacctcaactttgatgacaccgtgttctgcgactccgttttggcaaccaatgtgacacaacaagaatgctgctgttctctgggcgccggctggggtgaccattgcgaaatttatccatgcccagtgtattcttccgccgaatttcactccctctgccctgacgggaaaggctatacgcaggataacaacatcgttaattacggaatcccggcccacagagacatcgatgagtgcatgctgttcggatctgaaatttgcaaagaagggaagtgtgtgaatacgcagcctggctatgagtgctattgtaaacaaggcttttactacgatggaaacttgctagagtgtgttgatgtcgacgagtgcttggacgagtcaaactgccgtaacggcgtgtgcgaaaacactagaggaggctacagatgtgcctgtacccccccagctgaatatagtccggcccagaggcaatgcctgtcacctgaagagatggacgtggacgagtgtcaggatccagctgcttgtcgtcccgggagatgtgtgaatctgcccgggtcttatcgctgcgaatgcaggcccccttgggttcccggcccttctggtcgcgactgccaactgcctgaatctccagcagaacgagcccccgaaagacgtgatgtgtgttggagccagaggggtgaggacggcatgtgcgccggcccccttgctggaccagcactcacctttgacgattgctgttgtagacagggccgtggatggggcgcacaatgtagaccatgtccccctagaggcgctgggtctcactgtcctacaagccagtctgaaagtaatagtttctgggacaccagccccttactattaggaaagccgccacgagatgaggattctagcgaagaggactctgatgaatgtaggtgcgtttctggctag

SEQ ID NO: 47867 - DNA, 2202 bp, Artificial Sequence
  derived and/or modified sequence
atgcctgccgaaactgatgagtgccggttgaaccagaacatttgcggccacggagagtgtgtacctggcccgccagactacagctgtcactgtaatccaggatacaggtctcacccacagcatcgctattgcgtggatgtcaatgagtgtgaagcagaaccttgcggtcccggacgcggtatatgtatgaacaccggcgggagctataactgccactgtaatagagggtacagattacacgttggagcgggcgggagatcatgcgtggacctaaacgagtgtgctaagcctcacctctgcggcgatggaggcttttgcattaattttcccggacactacaagtgtaattgctacccaggttacagactcaaggcgtccagacccccagtgtgtgaagatatcgatgagtgtagagatccgtcttcctgcccggatgggaagtgcgaaaataagccaggtagttttaagtgtatcgcttgccaacctggatatagatctcagggcggtggtgcgtgtagagacgtcaacgaatgcgcggaagggtctccttgctcaccaggttggtgtgagaacctgcctggaagcttccgctgtacgtgcgcccaggggtatgctcccgcacctgatggaagatcatgcctcgatgttgatgagtgcgaggccggagatgtgtgtgacaacggaatttgcagcaacacaccagggtcgtttcagtgccagtgtctctctgggtatcatctaagtagagataggtctcactgcgaagatatcgacgagtgcgatttccctgccgcttgtatcggcggagactgtatcaatacaaacgggagctataggtgcctctgcccccagggacacaggctagtcggcggccgtaaatgtcaagacatcgatgagtgttcccaggatccctcgctttgtcttccgcacggtgcttgcaagaacctacagggatcatacgtctgcgtttgcgacgaaggctttactcccacacaagaccagcacggttgtgaggaggtggaacagccacaccacaagaaagagtgctacctcaattttgacgataccgtattttgtgacagtgtgctcgcaacaaatgttacacaacaggaatgttgttgctctcttggcgccggatggggagatcactgtgaaatttacccctgccccgtctattcatccgctgaatttcattcattatgtcccgacggtaaaggctacactcaggataacaatatcgtgaattatggaattccggcccaccgcgatatagatgagtgtatgctgtttggttccgagatctgtaaggagggcaaatgcgttaacacccagccaggatacgaatgttattgcaaacagggtttttactatgatggcaacctactagagtgtgtggatgttgatgaatgtctggacgagtccaattgcaggaacggagtctgtgagaacacaagagggggttaccgatgcgcttgcactccccctgctgaatattcccctgctcagagacaatgcctcagtccagaggaaatggatgtcgacgagtgccaggaccccgctgcatgcaggcctgggagatgtgtgaatctccctgggtcatatcgctgtgaatgcagaccaccgtgggtccccggaccatcaggtcgagattgtcagctacccgaatctcctgctgaaagagccccagaacgaagggatgtctgctggtcgcagaggggtgaagatggtatgtgcgcagggcctttagccggacccgcactgactttcgacgattgttgctgccggcaaggtaggggttggggagcccagtgccgaccctgcccgcctcgcggtgccggcagccactgcccaacatcacagtccgagtctaactctttctgggacacttcccccctgcttttaggaaaacccccccgcgatgaagattcttccgaagaggactcagatgagtgtagatgcgttagcggacgatgcgtgccaagacccggcggagctgtttgcgaatgtcccgggggattccaactggacgcgtccagggcgaggtgcgtggatatcgatgaatgccgagagctgaaccagcggggacttttatgtaagtcggaaaggtgtgtgaatacctctggttcattccgctgcgtgtgcaaagccggattcgcccgcagtagaccccacggagcctgcgtaccacagagaaggcgatag

SEQ ID NO: 47868 - DNA, 3912 bp, Artificial Sequence
  derived and/or modified sequence
atgcccggccccagaggcgccgccggcggcctggcccccgagatgagaggcgccggcgccgccggcctgctggccctgctgctgctgctgctgctgctgctgctgggcctgggcggcagagtggagggcggccccgccggcgagagaggcgccggcggcggcggcgccctggccagagagagattcaaggtggtgttcgcccccgtgatctgcaagagaacctgcctgaagggccagtgcagagacagctgccagcagggcagcaacatgaccctgatcggcgagaacggccacagcaccgacaccctgaccggcagcggcttcagagtggtggtgtgccccctgccctgcatgaacggcggccagtgcagcagcagaaaccagtgcctgtgcccccccgacttcaccggcagattctgccaggtgcccgccggcggcgccggcggcggcaccggcggcagcggccccggcctgagcagaaccggcgccctgagcaccggcgccctgccccccctggcccccgagggcgacagcgtggccagcaagcacgccatctacgccgtgcaggtgatcgccgacccccccggccccggcgagggcccccccgcccagcacgccgccttcctggtgcccctgggccccggccagatcagcgccgaggtgcaggcccccccccccgtggtgaacgtgagagtgcaccacccccccgaggccagcgtgcaggtgcacagaatcgagagcagcaacgccgagagcgccgcccccagccagcacctgctgccccaccccaagcccagccaccccagaccccccacccagaagcccctgggcagatgcttccaggacaccctgcccaagcagccctgcggcagcaaccccctgcccggcctgaccaagcaggaggactgctgcggcagcatcggcaccgcctggggccagagcaagtgccacaagtgcccccagctgcagtacaccggcgtgcagaagcccggccccgtgagaggcgaggtgggcgccgactgcccccagggctacaagagactgaacagcacccactgccaggacatcaacgagtgcgccatgcccggcgtgtgcagacacggcgactgcctgaacaaccccggcagctacagatgcgtgtgcccccccggccacagcctgggccccagcagaacccagtgcatcgccgacaagcccgaggagaagagcctgtgcttcagactggtgagccccgagcaccagtgccagcaccccctgaccaccagactgaccagacagctgtgctgctgcagcgtgggcaaggcctggggcgccagatgccagagatgccccaccgacggcaccgccgccttcaaggagatctgccccgccggcaagggctaccacatcctgaccagccaccagaccctgaccatccagggcgagagcgacttcagcctgttcctgcaccccgacggcccccccaagccccagcagctgcccgagagccccagccaggcccccccccccgaggacaccgaggaggagagaggcgtgaccaccgacagccccgtgagcgaggagagaagcgtgcagcagagccaccccaccgccaccaccacccccgccagaccctaccccgagctgatcagcagacccagcccccccaccatgagatggttcctgcccgacctgccccccagcagaagcgccgtggagatcgcccccacccaggtgaccgagaccgacgagtgcagactgaaccagaacatctgcggccacggcgagtgcgtgcccggcccccccgactacagctgccactgcaaccccggctacagaagccacccccagcacagatactgcgtggacgtgaacgagtgcgaggccgagccctgcggccccggcagaggcatctgcatgaacaccggcggcagctacaactgccactgcaacagaggctacagactgcacgtgggcgccggcggcagaagctgcgtggacctgaacgagtgcgccaagccccacctgtgcggcgacggcggcttctgcatcaacttccccggccactacaagtgcaactgctaccccggctacagactgaaggccagcagaccccccgtgtgcgaggacatcgacgagtgcagagaccccagcagctgccccgacggcaagtgcgagaacaagcccggcagcttcaagtgcatcgcctgccagcccggctacagaagccagggcggcggcgcctgcagagacgtgaacgagtgcgccgagggcagcccctgcagccccggctggtgcgagaacctgcccggcagcttcagatgcacctgcgcccagggctacgcccccgcccccgacggcagaagctgcctggacgtggacgagtgcgaggccggcgacgtgtgcgacaacggcatctgcagcaacacccccggcagcttccagtgccagtgcctgagcggctaccacctgagcagagacagaagccactgcgaggacatcgacgagtgcgacttccccgccgcctgcatcggcggcgactgcatcaacaccaacggcagctacagatgcctgtgcccccagggccacagactggtgggcggcagaaagtgccaggacatcgacgagtgcagccaggaccccagcctgtgcctgccccacggcgcctgcaagaacctgcagggcagctacgtgtgcgtgtgcgacgagggcttcacccccacccaggaccagcacggctgcgaggaggtggagcagccccaccacaagaaggagtgctacctgaacttcgacgacaccgtgttctgcgacagcgtgctggccaccaacgtgacccagcaggagtgctgctgcagcctgggcgccggctggggcgaccactgcgagatctacccctgccccgtgtacagcagcgccgagttccacagcctgtgccccgacggcaagggctacacccaggacaacaacatcgtgaactacggcatccccgcccacagagacatcgacgagtgcatgctgttcggcagcgagatctgcaaggagggcaagtgcgtgaacacccagcccggctacgagtgctactgcaagcagggcttctactacgacggcaacctgctggagtgcgtggacgtggacgagtgcctggacgagagcaactgcagaaacggcgtgtgcgagaacaccagaggcggctacagatgcgcctgcaccccccccgccgagtacagccccgcccagagacagtgcctgagccccgaggagatggacgtggacgagtgccaggaccccgccgcctgcagacccggcagatgcgtgaacctgcccggcagctacagatgcgagtgcagacccccctgggtgcccggccccagcggcagagactgccagctgcccgagagccccgccgagagagcccccgagagaagagacgtgtgctggagccagagaggcgaggacggcatgtgcgccggccccctggccggccccgccctgaccttcgacgactgctgctgcagacagggcagaggctggggcgcccagtgcagaccctgcccccccagaggcgccggcagccactgccccaccagccagagcgagagcaacagcttctgggacaccagccccctgctgctgggcaagccccccagagacgaggacagcagcgaggaggacagcgacgagtgcagatgcgtgagcggcagatgcgtgcccagacccggcggcgccgtgtgcgagtgccccggcggcttccagctggacgccagcagagccagatgcgtggacatcgacgagtgcagagagctgaaccagagaggcctgctgtgcaagagcgagagatgcgtgaacaccagcggcagcttcagatgcgtgtgcaaggccggcttcgccagaagcagaccccacggcgcctgcgtgccccagagaagaagatag

SEQ ID NO: 47869 - DNA, 792 bp, Artificial Sequence
  derived and/or modified sequence
atgctgttcggcagcgagatctgcaaggagggcaagtgcgtgaacacccagcccggctacgagtgctactgcaagcagggcttctactacgacggcaacctgctggagtgcgtggacgtggacgagtgcctggacgagagcaactgcagaaacggcgtgtgcgagaacaccagaggcggctacagatgcgcctgcaccccccccgccgagtacagccccgcccagagacagtgcctgagccccgaggagatggacgtggacgagtgccaggaccccgccgcctgcagacccggcagatgcgtgaacctgcccggcagctacagatgcgagtgcagacccccctgggtgcccggccccagcggcagagactgccagctgcccgagagccccgccgagagagcccccgagagaagagacgtgtgctggagccagagaggcgaggacggcatgtgcgccggccccctggccggccccgccctgaccttcgacgactgctgctgcagacagggcagaggctggggcgcccagtgcagaccctgcccccccagaggcgccggcagccactgccccaccagccagagcgagagcaacagcttctgggacaccagccccctgctgctgggcaagccccccagagacgaggacagcagcgaggaggacagcgacgagtgcagatgcgtgagcgccgccgcctgcagaggcagagccgccccctgcgccagcgtgcccgccgccagcagcagcaccccccccgcccccgccgcctggatcagcaccagcgccgagagctag

SEQ ID NO: 47870 - DNA, 921 bp, Artificial Sequence
  derived and/or modified sequence
atgctgttcggcagcgagatctgcaaggagggcaagtgcgtgaacacccagcccggctacgagtgctactgcaagcagggcttctactacgacggcaacctgctggagtgcgtggacgtggacgagtgcctggacgagagcaactgcagaaacggcgtgtgcgagaacaccagaggcggctacagatgcgcctgcaccccccccgccgagtacagccccgcccagagacagtgcctgagccccgaggagatggacgtggacgagtgccaggaccccgccgcctgcagacccggcagatgcgtgaacctgcccggcagctacagatgcgagtgcagacccccctgggtgcccggccccagcggcagagactgccagctgcccgagagccccgccgagagagcccccgagagaagagacgtgtgctggagccagagaggcgaggacggcatgtgcgccggccccctggccggccccgccctgaccttcgacgactgctgctgcagacagggcagaggctggggcgcccagtgcagaccctgcccccccagaggcgccggcagccactgccccaccagccagagcgagagcaacagcttctgggacaccagccccctgctgctgggcaagccccccagagacgaggacagcagcgaggaggacagcgacgagtgcagatgcgtgagcggcagatgcgtgcccagacccggcggcgccgtgtgcgagtgccccggcggcttccagctggacgccagcagagccagatgcgtggacatcgacgagtgcagagagctgaaccagagaggcctgctgtgcaagagcgagagatgcgtgaacaccagcggcagcttcagatgcgtgtgcaaggccggcttcgccagaagcagaccccacggcgcctgcgtgccccagagaagaagatag

SEQ ID NO: 47871 - DNA, 3414 bp, Artificial Sequence
  derived and/or modified sequence
atgaccctgatcggcgagaacggccacagcaccgacaccctgaccggcagcggcttcagagtggtggtgtgccccctgccctgcatgaacggcggccagtgcagcagcagaaaccagtgcctgtgcccccccgacttcaccggcagattctgccaggtgcccgccggcggcgccggcggcggcaccggcggcagcggccccggcctgagcagaaccggcgccctgagcaccggcgccctgccccccctggcccccgagggcgacagcgtggccagcaagcacgccatctacgccgtgcaggtgatcgccgacccccccggccccggcgagggcccccccgcccagcacgccgccttcctggtgcccctgggccccggccagatcagcgccgaggtgcaggcccccccccccgtggtgaacgtgagagtgcaccacccccccgaggccagcgtgcaggtgcacagaatcgagagcagcaacgccgagagcgccgcccccagccagcacctgctgccccaccccaagcccagccaccccagaccccccacccagaagcccctgggcagatgcttccaggacaccctgcccaagcagccctgcggcagcaaccccctgcccggcctgaccaagcaggaggactgctgcggcagcatcggcaccgcctggggccagagcaagtgccacaagtgcccccagctgcagtacaccggcgtgcagaagcccggccccgtgagaggcgaggtgggcgccgactgcccccagggctacaagagactgaacagcacccactgccaggacatcaacgagtgcgccatgcccggcgtgtgcagacacggcgactgcctgaacaaccccggcagctacagatgcgtgtgcccccccggccacagcctgggccccagcagaacccagtgcatcgccgacaagcccgaggagaagagcctgtgcttcagactggtgagccccgagcaccagtgccagcaccccctgaccaccagactgaccagacagctgtgctgctgcagcgtgggcaaggcctggggcgccagatgccagagatgccccaccgacggcaccgccgccttcaaggagatctgccccgccggcaagggctaccacatcctgaccagccaccagaccctgaccatccagggcgagagcgacttcagcctgttcctgcaccccgacggcccccccaagccccagcagctgcccgagagccccagccaggcccccccccccgaggacaccgaggaggagagaggcgtgaccaccgacagccccgtgagcgaggagagaagcgtgcagcagagccaccccaccgccaccaccacccccgccagaccctaccccgagctgatcagcagacccagcccccccaccatgagatggttcctgcccgacctgccccccagcagaagcgccgtggagatcgcccccacccaggtgaccgagaccgacgagtgcagactgaaccagaacatctgcggccacggcgagtgcgtgcccggcccccccgactacagctgccactgcaaccccggctacagaagccacccccagcacagatactgcgtggacgtgaacgagtgcgaggccgagccctgcggccccggcagaggcatctgcatgaacaccggcggcagctacaactgccactgcaacagaggctacagactgcacgtgggcgccggcggcagaagctgcgtggacctgaacgagtgcgccaagccccacctgtgcggcgacggcggcttctgcatcaacttccccggccactacaagtgcaactgctaccccggctacagactgaaggccagcagaccccccgtgtgcgaggacatcgacgagtgcagagaccccagcagctgccccgacggcaagtgcgagaacaagcccggcagcttcaagtgcatcgcctgccagcccggctacagaagccagggcggcggcgcctgcagagacgtgaacgagtgcgccgagggcagcccctgcagccccggctggtgcgagaacctgcccggcagcttcagatgcacctgcgcccagggctacgcccccgcccccgacggcagaagctgcctggacgtggacgagtgcgaggccggcgacgtgtgcgacaacggcatctgcagcaacacccccggcagcttccagtgccagtgcctgagcggctaccacctgagcagagacagaagccactgcgaggacatcgacgagtgcgacttccccgccgcctgcatcggcggcgactgcatcaacaccaacggcagctacagatgcctgtgcccccagggccacagactggtgggcggcagaaagtgccaggacatcgacgagtgcagccaggaccccagcctgtgcctgccccacggcgcctgcaagaacctgcagggcagctacgtgtgcgtgtgcgacgagggcttcacccccacccaggaccagcacggctgcgaggaggtggagcagccccaccacaagaaggagtgctacctgaacttcgacgacaccgtgttctgcgacagcgtgctggccaccaacgtgacccagcaggagtgctgctgcagcctgggcgccggctggggcgaccactgcgagatctacccctgccccgtgtacagcagcgccgagttccacagcctgtgccccgacggcaagggctacacccaggacaacaacatcgtgaactacggcatccccgcccacagagacatcgacgagtgcatgctgttcggcagcgagatctgcaaggagggcaagtgcgtgaacacccagcccggctacgagtgctactgcaagcagggcttctactacgacggcaacctgctggagtgcgtggacgtggacgagtgcctggacgagagcaactgcagaaacggcgtgtgcgagaacaccagaggcggctacagatgcgcctgcaccccccccgccgagtacagccccgcccagagacagtgcctgagccccgaggagatggacgtggacgagtgccaggaccccgccgcctgcagacccggcagatgcgtgaacctgcccggcagctacagatgcgagtgcagacccccctgggtgcccggccccagcggcagagactgccagctgcccgagagccccgccgagagagcccccgagagaagagacgtgtgctggagccagagaggcgaggacggcatgtgcgccggccccctggccggccccgccctgaccttcgacgactgctgctgcagacagggcagaggctggggcgcccagtgcagaccctgcccccccagaggcgccggcagccactgccccaccagccagagcgagagcaacagcttctgggacaccagccccctgctgctgggcaagccccccagagacgaggacagcagcgaggaggacagcgacgagtgcagatgcgtgagcggctag

SEQ ID NO: 47872 - DNA, 2202 bp, Artificial Sequence
  derived and/or modified sequence
atgcccgccgagaccgacgagtgcagactgaaccagaacatctgcggccacggcgagtgcgtgcccggcccccccgactacagctgccactgcaaccccggctacagaagccacccccagcacagatactgcgtggacgtgaacgagtgcgaggccgagccctgcggccccggcagaggcatctgcatgaacaccggcggcagctacaactgccactgcaacagaggctacagactgcacgtgggcgccggcggcagaagctgcgtggacctgaacgagtgcgccaagccccacctgtgcggcgacggcggcttctgcatcaacttccccggccactacaagtgcaactgctaccccggctacagactgaaggccagcagaccccccgtgtgcgaggacatcgacgagtgcagagaccccagcagctgccccgacggcaagtgcgagaacaagcccggcagcttcaagtgcatcgcctgccagcccggctacagaagccagggcggcggcgcctgcagagacgtgaacgagtgcgccgagggcagcccctgcagccccggctggtgcgagaacctgcccggcagcttcagatgcacctgcgcccagggctacgcccccgcccccgacggcagaagctgcctggacgtggacgagtgcgaggccggcgacgtgtgcgacaacggcatctgcagcaacacccccggcagcttccagtgccagtgcctgagcggctaccacctgagcagagacagaagccactgcgaggacatcgacgagtgcgacttccccgccgcctgcatcggcggcgactgcatcaacaccaacggcagctacagatgcctgtgcccccagggccacagactggtgggcggcagaaagtgccaggacatcgacgagtgcagccaggaccccagcctgtgcctgccccacggcgcctgcaagaacctgcagggcagctacgtgtgcgtgtgcgacgagggcttcacccccacccaggaccagcacggctgcgaggaggtggagcagccccaccacaagaaggagtgctacctgaacttcgacgacaccgtgttctgcgacagcgtgctggccaccaacgtgacccagcaggagtgctgctgcagcctgggcgccggctggggcgaccactgcgagatctacccctgccccgtgtacagcagcgccgagttccacagcctgtgccccgacggcaagggctacacccaggacaacaacatcgtgaactacggcatccccgcccacagagacatcgacgagtgcatgctgttcggcagcgagatctgcaaggagggcaagtgcgtgaacacccagcccggctacgagtgctactgcaagcagggcttctactacgacggcaacctgctggagtgcgtggacgtggacgagtgcctggacgagagcaactgcagaaacggcgtgtgcgagaacaccagaggcggctacagatgcgcctgcaccccccccgccgagtacagccccgcccagagacagtgcctgagccccgaggagatggacgtggacgagtgccaggaccccgccgcctgcagacccggcagatgcgtgaacctgcccggcagctacagatgcgagtgcagacccccctgggtgcccggccccagcggcagagactgccagctgcccgagagccccgccgagagagcccccgagagaagagacgtgtgctggagccagagaggcgaggacggcatgtgcgccggccccctggccggccccgccctgaccttcgacgactgctgctgcagacagggcagaggctggggcgcccagtgcagaccctgcccccccagaggcgccggcagccactgccccaccagccagagcgagagcaacagcttctgggacaccagccccctgctgctgggcaagccccccagagacgaggacagcagcgaggaggacagcgacgagtgcagatgcgtgagcggcagatgcgtgcccagacccggcggcgccgtgtgcgagtgccccggcggcttccagctggacgccagcagagccagatgcgtggacatcgacgagtgcagagagctgaaccagagaggcctgctgtgcaagagcgagagatgcgtgaacaccagcggcagcttcagatgcgtgtgcaaggccggcttcgccagaagcagaccccacggcgcctgcgtgccccagagaagaagatag

SEQ ID NO: 47873 - protein, 504 aa, Artificial Sequence
  derived and/or modified sequence
MDPGQQPPPQPAPQGQGQPPSQPPQGQGPPSGPGQPAPAATQAAPQAPPAGHQIVHVRGDSETDLEALFNAVMNPKTANVPQTVPMRLRKLPDSFFKPPEPKSHSRQASTDAGTAGALTPQHVRAHSSPASLQLGAVSPGTLTPTGVVSGPAATPTAQHLRQSSFEIPDDVPLPAGWEMAKTSSGQRYFLNHIDQTTTWQDPRKAMLSQMNVTAPTSPPVQQNMMNSASGPLPDGWEQAMTQDGEIYYINHKNKTTSWLDPRLDPRFAMNQRISQSAPVKQPPPLAPQSPQGGVMGGSNSNQQQQMRLQQLQMEKERLRLKQQELLRQAMRNINPSTANSPKCQELALRSQLPTLEQDGGTQNPVSSPGMSQELRTMTTNSSDPFLNSGTYHSRDESTDSGLSMSSYSVPRTPDDFLNSVDEMDTGDTINQSTLPSQQNRFPDYLEAIPGTNVDLGTLEGDGMNIEGEELMPSLQEALSSDILNDMESVLAATKLDKESFLTWL

SEQ ID NO: 47874 - DNA, 1515 bp, Artificial Sequence
  derived and/or modified sequence
atggaccccggccagcagccccccccccagcccgccccccagggccagggccagccccccagccagcccccccagggccagggcccccccagcggccccggccagcccgcccccgccgccacccaggccgccccccaggccccccccgccggccaccagatcgtgcacgtgagaggcgacagcgagaccgacctggaggccctgttcaacgccgtgatgaaccccaagaccgccaacgtgccccagaccgtgcccatgagactgagaaagctgcccgacagcttcttcaagccccccgagcccaagagccacagcagacaggccagcaccgacgccggcaccgccggcgccctgaccccccagcacgtgagagcccacagcagccccgccagcctgcagctgggcgccgtgagccccggcaccctgacccccaccggcgtggtgagcggccccgccgccacccccaccgcccagcacctgagacagagcagcttcgagatccccgacgacgtgcccctgcccgccggctgggagatggccaagaccagcagcggccagagatacttcctgaaccacatcgaccagaccaccacctggcaggaccccagaaaggccatgctgagccagatgaacgtgaccgcccccaccagcccccccgtgcagcagaacatgatgaacagcgccagcggccccctgcccgacggctgggagcaggccatgacccaggacggcgagatctactacatcaaccacaagaacaagaccaccagctggctggaccccagactggaccccagattcgccatgaaccagagaatcagccagagcgcccccgtgaagcagcccccccccctggccccccagagcccccagggcggcgtgatgggcggcagcaacagcaaccagcagcagcagatgagactgcagcagctgcagatggagaaggagagactgagactgaagcagcaggagctgctgagacaggccatgagaaacatcaaccccagcaccgccaacagccccaagtgccaggagctggccctgagaagccagctgcccaccctggagcaggacggcggcacccagaaccccgtgagcagccccggcatgagccaggagctgagaaccatgaccaccaacagcagcgaccccttcctgaacagcggcacctaccacagcagagacgagagcaccgacagcggcctgagcatgagcagctacagcgtgcccagaacccccgacgacttcctgaacagcgtggacgagatggacaccggcgacaccatcaaccagagcaccctgcccagccagcagaacagattccccgactacctggaggccatccccggcaccaacgtggacctgggcaccctggagggcgacggcatgaacatcgagggcgaggagctgatgcccagcctgcaggaggccctgagcagcgacatcctgaacgacatggagagcgtgctggccgccaccaagctggacaaggagagcttcctgacctggctgtag

SEQ ID NO: 47875 - DNA, 1515 bp, Artificial Sequence
  derived and/or modified sequence
atggacccaggccagcagcccccaccacagccagcccctcagggacaagggcaaccacctagccagcccccccagggccagggacctcccagcggcccaggccaacccgccccagccgcgacacaggcagcccctcaggcaccacctgccggacaccagatcgttcatgtaagaggcgatagcgagactgatctcgaggctctctttaacgcggtgatgaaccctaaaacagctaatgttccccagaccgtgcctatgagactaaggaaactaccagacagcttttttaagcccccagagcccaagagccattccaggcaagctagcacagacgcaggcacagccggcgccttgacccctcaacatgtacgggcccactctagccctgccagcctgcagcttggggcagtgtcccctggcaccctcactccaaccggcgtcgtgagcggccctgctgccacccctacggcacagcacctgcgacaatccagctttgaaattccggacgacgttccattacccgcgggttgggagatggctaaaacatccagcgggcaaagatattttcttaaccatattgatcaaacaaccacctggcaggaccctagaaaggctatgctgtcgcagatgaacgttacagctcctactagccctccagtacagcaaaatatgatgaatagcgcatcgggcccactgcccgatggctgggagcaagctatgacacaggacggcgaaatttactacattaaccataaaaacaaaacaacatcttggctcgacccgagattagacccccggtttgctatgaaccagaggatctcacagtcagctccagtgaagcaacctccacctctggctccgcagtcaccccagggaggggtcatgggcggtagcaacagtaaccagcagcagcagatgagacttcagcagctgcagatggagaaggaaagactgaggttgaagcaacaggagctcctacggcaagctatgcggaatatcaatccatccactgccaactcaccaaagtgtcaagaattggccctgcgctcccagttaccaacgctggaacaggatggtgggacccaaaacccggtttcctcccctggaatgagtcaggaattacgcaccatgactacaaacagctcggacccattcctgaattctgggacatatcattcccgagacgagtctaccgatagcggcttgtctatgtccagctattccgtgcctcgcaccccagatgactttctgaacagtgtggacgaaatggatacaggtgacacaatcaatcagtccaccctgcccagtcagcaaaaccggtttccagattatctggaagctattccaggcacgaatgtagatttaggaactctggagggcgacggcatgaatatcgagggcgaggaactgatgccttccctacaggaagccctgagctcagatattttaaacgacatggagagtgtgttggcggcgactaagctggataaggaaagcttcctgacttggttgtag

SEQ ID NO: 47876 - DNA, 1515 bp, Artificial Sequence
  derived and/or modified sequence
atggaccccggccagcagcccccaccccagcctgccccccagggccagggccagccccccagccagcccccccagggccagggccccccatctggccctggccagcctgccccagctgccacccaggccgccccccaggcccccccagctggccaccagatcgtgcacgtgcggggggacagcgagacagacctggaggccctcttcaatgctgtgatgaaccccaagacagccaacgtgccccagacagtgcccatgaggctgaggaagctgcctgacagcttcttcaagcccccagagcccaagagccacagccggcaggccagcacagatgctggaacagctggggccctgaccccccagcacgtgcgggcccacagcagccctgccagcctgcagctgggcgctgtgtccccaggcaccctgacccccactggagtggtgtctggccctgctgccacccccacagcccagcacctgcggcagagcagctttgagatcccagatgatgtgcccctgcctgctggctgggagatggccaagaccagcagcggccagcgctacttcctgaaccacatcgaccagaccaccacctggcaggaccccaggaaggccatgctgagccagatgaatgtgacagcccccaccagcccccctgtgcagcagaacatgatgaacagcgccagcggccccctgcctgatggctgggagcaggccatgacccaggatggagagatctactacatcaaccacaagaacaagaccacctcctggctggacccccggctggaccccaggtttgccatgaaccagaggatcagccagagcgcccctgtgaagcagcccccacccctggccccccagagcccccagggcggcgtgatgggcggcagcaacagcaaccagcagcagcagatgaggctgcagcagctgcagatggagaaggagcggctgcggctgaagcagcaggagctgctgcggcaggccatgaggaacatcaaccccagcacagccaacagccccaagtgccaggagctggccctgcggagccagctgcccaccctggagcaggacggcggcacccagaaccctgtgagcagccctggcatgagccaggagctgcggaccatgaccaccaacagcagtgaccccttcctgaacagcggcacctaccacagcagagatgagagcacagacagcggcctgtccatgagcagctacagcgtgcccaggaccccagatgacttcctgaacagcgtggatgagatggacacaggagacaccatcaaccagagcaccctgcccagccagcagaaccgcttcccagactacctggaggccatccctggcaccaacgtggacctgggcaccctggagggagatggcatgaacattgaaggagaggagctgatgcccagcctgcaggaggccctgagcagtgacatcctgaatgacatggagagcgtgctggccgccaccaagctggacaaggagagcttcctgacctggctgtag

SEQ ID NO: 47877 - DNA, 1515 bp, Artificial Sequence
  derived and/or modified sequence
atggaccccggccagcagccccccccccagcccgccccccagggccaggggcagcctcctagccaaccaccccagggtcaggggccgccatccggcccggggcagcccgccccggccgccactcaagccgcacctcaggcccctcccgccgggcatcagattgttcatgtccgaggcgatagcgagacagatctggaggccctgttcaatgccgtcatgaaccccaagacagcgaatgtccctcagactgtccctatgaggttacgcaaattgcctgactcattctttaagcccccagagccaaagtctcacagtagacaagcctccaccgacgctggcactgccggcgcacttaccccccaacatgttagggcccacagttcacccgctagtctccagctcggagcggtgagccctggtactctcacacccacaggagtggttagcggccccgcagctacacctaccgcccagcacctccggcaaagcagcttcgaaattcccgatgatgtccccctgccagcgggctgggagatggccaagacaagttctggccaacgctacttcctgaatcatatcgatcagactactacttggcaggatcctagaaaagccatgctgagtcagatgaatgtgaccgctcccacctcacccccagtccaacaaaatatgatgaactctgcttcgggccctttgcccgatggctgggaacaggccatgacccaagatggcgagatttactacattaatcataagaataaaacgacttcttggttggacccaaggctggacccaagattcgccatgaatcaacggatttctcagtcagctcctgttaaacagcccccccccttagcccctcagagtcctcagggaggtgtgatgggaggcagtaattccaaccaacagcagcagatgcgactgcaacagctccaaatggagaaggaacgactgcggctcaagcaacaagaactgctcagacaggctatgagaaacatcaacccttccaccgccaactcacccaaatgccaggaactcgctttgcggtcccagctgcctacacttgaacaagatgggggcactcagaaccctgtttcatctcctggcatgagccaagagttgcgaaccatgacaacaaattcttctgacccctttctgaactctggaacgtatcattcaagggatgagtcaaccgattccgggctctcaatgtctagctatagcgtcccccggacacctgatgatttcctgaactctgtggacgagatggacacgggggacaccatcaaccaaagcacactcccttcacagcaaaacagatttcctgattacctggaagcgatccccggcactaacgtcgacctggggacactggagggggacggcatgaacatcgaaggtgaagaactaatgccttctctgcaagaggctctgagtagcgatattttaaacgatatggagtcagtgctggctgctacaaaactcgacaaggagtcttttctgacctggttatag

SEQ ID NO: 47878 - DNA, 1515 bp, Artificial Sequence
  derived and/or modified sequence
atggatccaggccaacagcccccacctcaaccagccccacaggggcagggccagccaccttctcaacctccccaagggcaaggcccaccaagcgggccaggacagcctgcccctgccgctacccaggcagcacctcaggcacctcctgcaggacaccagatcgttcatgttaggggcgattccgagaccgaccttgaggctctctttaatgccgtgatgaatccaaagaccgctaacgtcccgcaaacggtgcccatgaggctccgcaagctcccggatagcttttttaagccacccgaacctaaatcccactcccgccaagccagcaccgatgcaggtaccgccggagccctgaccccacagcatgtccgcgcacacagttcaccagcctcacttcagctcggcgcagtctcgccgggtaccctaaccccaacgggagttgtctcaggacctgccgcaactcctactgctcagcacctgcggcagtctagcttcgagattcccgacgacgtgccgttacctgccggttgggagatggcaaaaacttctagcggtcagagatatttcctgaaccacattgatcagacaaccacctggcaggacccccgaaaggccatgctgagccaaatgaacgtcacggcccctacatccccccctgtgcagcagaatatgatgaacagcgcatcaggaccattgcctgatgggtgggagcaggccatgacccaggacggggaaatatactacatcaaccacaaaaacaagacaactagctggctggacccccgtttagatcctcggttcgctatgaatcaacggatcagccagtccgctcccgtcaagcagccccctcctttggccccacagagtccccaggggggtgtgatgggaggctcgaactctaaccagcagcaacagatgcggcttcagcagcttcaaatggaaaaagagagattacgcttgaagcagcaagagctgctgcgtcaagccatgcgtaacatcaacccttctacggccaatagcccgaagtgtcaggagttggctttgaggagccagctgcctaccctagaacaggacggcggaactcagaaccccgtctcttctccaggcatgagccaggagcttagaacaatgacaacaaactccagcgatcccttccttaacagcggaacatatcactcacgagacgaaagcacagattctggactgagcatgagttcctattcggtgccaaggactcccgacgatttcctcaattcagtggatgagatggatactggtgatacgattaatcagtctaccctgccctctcagcagaacaggtttccagactacttagaagctatccccggtactaatgtggatctagggaccctggagggggatggtatgaacatcgagggggaggaattaatgccttctttacaggaagccttgagttcagacatattaaatgatatggagagtgtcctggccgcaaccaagttggacaaggagagcttcctgacgtggctatag

SEQ ID NO: 47879 - DNA, 5386 bp, Artificial Sequence
  derived and/or modified sequence
gccgccgccagggaaaagaaagggaggaaggaaggaacaagaaaaggaaataaagagaaaggggaggcggggaaaggcaacgagctgtccggcctccgtcaagggagttggagggaaaaagttctcaggcgccgcaggtccgagtgcctcgcagcccctcccgaggcgcagccgccagaccagtggagccggggcgcagggcgggggcggaggcgccggggcgggggatgcggggccgcggcgcagccccccggccctgagagcgaggacagcgccgcccggcccgcagccgtcgccgcttctccacctcggcccgtggagccggggcgtccgggcgtagccctcgctcgcctgggtcagggggtgcgcgtcgggggaggcagaagccatggatcccgggcagcagccgccgcctcaaccggccccccagggccaagggcagccgccttcgcagcccccgcaggggcagggcccgccgtccggacccgggcaaccggcacccgcggcgacccaggcggcgccgcaggcaccccccgccgggcatcagatcgtgcacgtccgcggggactcggagaccgacctggaggcgctcttcaacgccgtcatgaaccccaagacggccaacgtgccccagaccgtgcccatgaggctccggaagctgcccgactccttcttcaagccgccggagcccaaatcccactcccgacaggccagtactgatgcaggcactgcaggagccctgactccacagcatgttcgagctcattcctctccagcttctctgcagttgggagctgtttctcctgggacactgacccccactggagtagtctctggcccagcagctacacccacagctcagcatcttcgacagtcttcttttgagatacctgatgatgtacctctgccagcaggttgggagatggcaaagacatcttctggtcagagatacttcttaaatcacatcgatcagacaacaacatggcaggaccccaggaaggccatgctgtcccagatgaacgtcacagcccccaccagtccaccagtgcagcagaatatgatgaactcggcttcaggtcctcttcctgatggatgggaacaagccatgactcaggatggagaaatttactatataaaccataagaacaagaccacctcttggctagacccaaggcttgaccctcgttttgccatgaaccagagaatcagtcagagtgctccagtgaaacagccaccacccctggctccccagagcccacagggaggcgtcatgggtggcagcaactccaaccagcagcaacagatgcgactgcagcaactgcagatggagaaggagaggctgcggctgaaacagcaagaactgcttcggcaggcaatgcggaatatcaatcccagcacagcaaattctccaaaatgtcaggagttagccctgcgtagccagttaccaacactggagcaggatggtgggactcaaaatccagtgtcttctcccgggatgtctcaggaattgagaacaatgacgaccaatagctcagatcctttccttaacagtggcacctatcactctcgagatgagagtacagacagtggactaagcatgagcagctacagtgtccctcgaaccccagatgacttcctgaacagtgtggatgagatggatacaggtgatactatcaaccaaagcaccctgccctcacagcagaaccgtttcccagactaccttgaagccattcctgggacaaatgtggaccttggaacactggaaggagatggaatgaacatagaaggagaggagctgatgccaagtctgcaggaagctttgagttctgacatccttaatgacatggagtctgttttggctgccaccaagctagataaagaaagctttcttacatggttatagagccctcaggcagactgaattctaaatctgtgaaggatctaaggagacacatgcaccggaaatttccataagccagttgcagttttcaggctaatacagaaaaagatgaacaaacgtccagcaagatactttaatcctctattttgctcttccttgtccattgctgctgttaatgtattgctgacctctttcacagttggctctaaagaatcaaaagaaaaaaactttttatttcttttgctattaaaactactgttcattttgggggctgggggaagtgagcctgtttggatgatggatgccattccttttgcccagttaaatgttcaccaatcattttaactaaatactcagacttagaagtcagatgcttcatgtcacagcatttagtttgttcaacagttgtttcttcagcttcctttgtccagtggaaaaacatgatttactggtctgacaagccaaaaatgttatatctgatattaaatacttaatgctgatttgaagagatagctgaaaccaaggctgaagactgttttactttcagtattttcttttcctcctagtgctatcattagtcacataatgaccttgattttattttaggagcttataaggcatgagacaatttccatataaatatattaattattgccacatactctaatatagattttggtggataattttgtgggtgtgcattttgttctgttttgttgggttttttgttttttttgtttttggcagggtcggtgggggggttggttggttggttggttttgtcggaacctaggcaaatgaccatattagtgaatctgttaatagttgtagcttgggatggttattgtagttgttttggtaaaatcttcatttcctggttttttttaccaccttatttaaatctcgattatctgctctctcttttatatacatacacacacccaaacataacatttataatagtgtggtagtggaatgtatccttttttaggtttccctgctttccagttaatttttaaaatggtagcgctttgtatgcatttagaatacatgactagtagtttatatttcactggtagtttaaatctggttggggcagtctgcagatgtttgaagtagtttagtgttctagaaagagctattactgtggatagtgcctaggggagtgctccacgccctctgggcatacggtagatattatctgatgaattggaaaggagcaaaccagaaatggctttattttctcccttggactaatttttaagtctcgattggaattcagtgagtaggttcataatgtgcatgacagaaataagctttatagtggtttaccttcatttagctttggaagttttctttgccttagttttggaagtaaattctagtttgtagttctcatttgtaatgaacacattaacgactagattaaaatattgccttcaagattgttcttacttacaagacttgctcctacttctatgctgaaaattgaccctggatagaatactataaggttttgagttagctggaaaagtgatcagattaataaatgtatattggtagttgaatttagcaaagaaatagagataatcatgattatacctttatttttacaggaagagatgatgtaactagagtatgtgtctacaggagtaataatggtttccaaagagtattttttaaaggaacaaaacgagcatgaattaactcttcaatataagctatgaagtaatagttggttgtgaattaaagtggcaccagctagcacctctgtgttttaagggtctttcaatgtttctagaataagcccttattttcaagggttcataacaggcataaaatctcttctcctggcaaaagctgctatgaaaagcctcagcttgggaagatagatttttttccccccaattacaaaatctaagtattttggcccttcaatttggaggagggcaaaagttggaagtaagaagttttattttaagtactttcagtgctcaaaaaaatgcaatcactgtgttgtatataatagttcataggttgatcactcataataattgactctaaggcttttattaagaaaacagcagaaagattaaatcttgaattaagtctggggggaaatggccactgcagatggagttttagagtagtaatgaaattctacctagaatgcaaaattgggtatatgaattacatagcatgttgttgggattttttttaatgtgcagaagatcaaagctacttggaaggagtgcctataatttgccagtagccacagattaagattatatcttatatatcagcagattagctttagcttagggggagggtgggaaagtttggggggggggttgtgaagatttagggggaccttgatagagaactttataaacttctttctctttaataaagacttgtcttacaccgtgctgccattaaaggcagctgttctagagtttcagtcacctaagtacacccacaaaacaatatgaatatggagatcttcctttacccctcaactttaatttgcccagttatacctcagtgttgtagcagtactgtgatacctggcacagtgctttgatcttacgatgccctctgtactgacctgaaggagacctaagagtcctttccctttttgagtttgaatcatagccttgatgtggtctcttgttttatgtccttgttcctaatgtaaaagtgcttaactgcttcttggttgtattgggtagcattgggataagattttaactgggtattcttgaattgcttttacaataaaccaattttataatctttaaatttatcaactttttacatttgtgttattttcagtcagggcttcttagatctacttatggttgatggagcacattgatttggagtttcagatcttccaaagcactatttgttgtaataacttttctaaatgtagtgcctttaaaggaaaaatgaacacagggaagtgactttgctacaaataatgttgctgtgttaagtattcatattaaatacatgccttctatatggaacatggcagaaagactgaaaaataacagtaattaattgtgtaattcagaattcataccaatcagtgttgaaactcaaacattgcaaaagtgggtggcaatattcagtgcttaacacttttctagcgttggtacatctgagaaatgagtgctcaggtggattttatcctcgcaagcatgttgttataagaattgtgggtgtgcctatcataacaattgttttctgtatcttgaaaaagtattctccacattttaaatgttttatattagagaattctttaatgcacacttgtcaaatatatatatatagtaccaatgttacctttttattttttgttttagatgtaagagcatgctcatatgttaggtacttacataaattgttacattattttttcttatgtaatacctttttgtttgtttatgtggttcaaatatattctttccttaaactctt

SEQ ID NO: 47880 - DNA, 1638 bp, Artificial Sequence
  derived and/or modified sequence
ctgcaatgtagttagcccactcgggatgtaacttgagtggaaagaagagttaccgcccccactcccattccctctcctatttgcaggcctgttgtatagtctcctgtcggagaccaaagggttttggaactcagaaaaaatcacttaacctgatgacaaaaacccgggttaaggaggaggaaagaaggaaaaacaatttagctgcttgcctaaacacttcaatttgtcttaggccagtactgatgcaggcactgcaggagccctgactccacagcatgttcgagctcattcctctccagcttctctgcagttgggagctgtttctcctgggacactgacccccactggagtagtctctggcccagcagctacacccacagctcagcatcttcgacagtcttcttttgagatacctgatgatgtacctctgccagcaggttgggagatggcaaagacatcttctggtcagagatacttcttaaatcacatcgatcagacaacaacatggcaggaccccaggaaggccatgctgtcccagatgaacgtcacagcccccaccagtccaccagtgcagcagaatatgatgaactcggcttcaggtcctcttcctgatggatgggaacaagccatgactcaggatggagaaatttactatataaaccataagaacaagaccacctcttggctagacccaaggcttgaccctcgttttgccatgaaccagagaatcagtcagagtgctccagtgaaacagccaccacccctggctccccagagcccacagggaggcgtcatgggtggcagcaactccaaccagcagcaacagatgcgactgcagcaactgcagatggagaaggagaggctgcggctgaaacagcaagaactgcttcggcaggcaatgcggaatatcaatcccagcacagcaaattctccaaaatgtcaggagttagccctgcgtagccagttaccaacactggagcaggatggtgggactcaaaatccagtgtcttctcccgggatgtctcaggaattgagaacaatgacgaccaatagctcagatcctttccttaacagtggcacctatcactctcgagatgagagtacagacagtggactaagcatgagcagctacagtgtccctcgaaccccagatgacttcctgaacagtgtggatgagatggatacaggtgatactatcaaccaaagcaccctgccctcacagcagaaccgtttcccagactaccttgaagccattcctgggacaaatgtggaccttggaacactggaaggagatggaatgaacatagaaggagaggagctgatgccaagtctgcaggaagctttgagttctgacatccttaatgacatggagtctgttttggctgccaccaagctagataaagaaagctttcttacatggttatagagccctcaggcagactgaattctaaatctgtgaaggatctaaggagacacatgcaccggaaatttccataagccagttgcagttttcaggctaatacagaaaaagatgaacaaacgtccagcaagatactttaatcctctattttgctcttccttgtccattgctgctgttaatgtattgctgacctctttcacagttggctctaaagaatc

SEQ ID NO: 47881 - protein, 243 aa, Artificial Sequence
  derived and/or modified sequence
MRQMIRSFSEPFGRDLLSISDGRGRAHNRRGHNDGEDSLTHTDVSSFQTMDQMVSNMRNYMQKLERNFGQLSVDPNGHSFCSSSVMTYSKIGDEPPKVFQASTQTRRAPGGIKETRKAMRDSDSGLEKMAIGHHIHDRAHVIKKSKNKKTGDEEVNQEFINMNESDAHAFDEEWQSEVLKYKPGRHNLGNTRMRSVGHENPGSRELKRREKPQQSPAIEHGRRSNVLGDKLHIKGSSVKSNKK

SEQ ID NO: 47882 - DNA, 732 bp, Artificial Sequence
  derived and/or modified sequence
atgcgtcaaatgatccgtagcttttcagagccgttcggtcgtgatctgttgagcatcagtgatggaaggggccgggcccacaatagacgagggcataacgacggtgaggactccttaacacataccgatgtgtcgagtttccaaactatggatcaaatggtttctaatatgaggaactatatgcagaagttagagcggaatttcggccaactctccgtggatcccaacggacactctttttgttcctctagtgttatgacttactccaaaattggtgacgaaccgcccaaagtgttccaagcctctactcaaacaagacgcgcacctggaggtattaaagagactagaaaggcaatgcgggattcagatagtggcctggaaaaaatggcaatcggtcaccacatacacgaccgggcccacgtcataaaaaagagcaaaaataagaaaaccggcgatgaagaagtgaaccaggagttcatcaatatgaatgaatctgacgcgcatgccttcgacgaagagtggcaatcagaagtcctcaagtataagccaggccggcataacctgggaaacactaggatgagaagcgtgggtcacgagaaccccggctcacgggagctgaagcgcagggaaaaaccccagcaaagtccagcgatcgagcatggccggcgctcaaacgtactaggcgacaaactccatatcaagggatcatccgtgaagagcaacaaaaagtag

SEQ ID NO: 47883 - DNA, 732 bp, Artificial Sequence
  derived and/or modified sequence
atgcgccagatgatccgttctttcagcgagccatttggtagagatctgctgtccatttcggacggaagaggtcgtgcacataaccggagaggtcacaatgatggcgaggacagtttgacccacactgatgtttccagttttcaaacaatggaccaaatggtgtccaacatgaggaattatatgcagaagctggagagaaacttcggccagctatcggtggatcccaacggacacagcttttgttcctcttctgtaatgacctatagcaagataggcgatgaacctccaaaagtctttcaggcgtccactcaaacccgcagggcacctggggggataaaagagactcgcaaggccatgcgggacagtgacagtggacttgagaagatggctattggccaccatattcatgacagggctcacgtaatcaagaagtcaaagaacaagaaaaccggtgatgaagaagttaaccaggaatttataaacatgaatgagtccgacgcgcacgcctttgacgaggagtggcaaagtgaggtgctcaaatataaacctggcagacataatcttgggaataccaggatgagaagtgtggggcatgaaaacccagggagcagggagctcaagcgtcgcgagaaacctcagcagtcacccgcgatcgagcatggcagacgaagtaatgtcttaggcgacaagctccacattaaagggtcttcagttaaatccaataagaagtag

SEQ ID NO: 47884 - DNA, 732 bp, Artificial Sequence
  derived and/or modified sequence
atgcgccagatgataagatcattcagtgaacctttcggaagagacctattgtctatctccgacggccgggggcgagcccacaacagaagaggtcataacgacggagaagattccctgacgcataccgatgtgagtagtttccaaacaatggaccagatggtctccaatatgcgcaactacatgcaaaagttagagagaaattttggccagcttagcgtcgaccccaacgggcattcgttctgttctagcagcgtgatgacatatagtaaaatcggcgacgagcctcctaaggtcttccaggcctccacacaaacgagaagggccccagggggaattaaagagactcgaaaggcgatgcgcgactctgattcagggctggagaagatggcaatcggccaccacatccacgatagggcccatgtgatcaaaaagagcaagaacaagaaaaccggcgacgaggaggttaaccaggaatttatcaatatgaatgagagtgacgctcatgcattcgacgaagagtggcaaagcgaggtgctaaaatacaaaccgggccgccataatctgggaaatactagaatgcgcagtgttggccatgagaatccagggtctcgagagctgaagaggcgtgaaaaaccccagcagagccctgccatcgaacatggccggagaagtaacgtgcttggagataagctgcacattaaggggagtagcgttaagtccaataagaaatag

SEQ ID NO: 47885 - DNA, 732 bp, Artificial Sequence
  derived and/or modified sequence
atgaggcagatgatccgctccttcagcgagcccttcggccgggacctgctgagcatcagtgatggccggggccgggcccacaacagaagaggccacaatgatggagaggacagcctgacccacacagatgtgagcagcttccagaccatggaccagatggtgagcaacatgaggaactacatgcagaagctggagaggaactttggccagctgtctgtggaccccaacggccacagcttctgcagcagctctgtgatgacctacagcaagattggagatgagccccccaaggtgttccaggccagcacccagacccggcgggcccctgggggcatcaaggagaccaggaaggccatgagggacagcgacagcggcctggagaagatggccatcggccaccacatccatgaccgggcccacgtgatcaagaagagcaagaacaagaagacaggagatgaggaggtgaaccaggagttcatcaacatgaatgaaagtgatgcccacgcctttgatgaggagtggcagagcgaggtgctgaagtacaagccaggccgccacaacctgggcaacaccaggatgaggtctgtgggccatgaaaatcctggcagccgggagctgaagaggcgggagaagccccagcagagccctgccatcgagcacggccgccgcagcaatgtgctgggggacaagctgcacatcaagggcagctctgtgaagagcaacaagaagtag

SEQ ID NO: 47886 - DNA, 732 bp, Artificial Sequence
  derived and/or modified sequence
atgcggcagatgatccggagcttcagcgagcccttcggccgggacctgttaagtatcagcgatggacggggacgcgcccacaatagaagaggtcacaatgatggggaagatagccttacccacacagacgtatcgagctttcaaacgatggatcagatggtgtcaaacatgaggaattacatgcagaagctggagaggaacttcggtcagctctcagttgaccccaatggccatagcttctgttcctcaagcgtcatgacatactccaagatcggggatgaaccgccaaaggtattccaggccagcacgcagacccgcagggctccagggggtataaaggagactaggaaggccatgagagactcggacagcggcttagagaaaatggccattgggcatcacatccatgaccgtgctcatgtcattaaaaaatcaaagaacaaaaagactggtgacgaggaggtaaaccaggagtttattaatatgaatgagagtgatgcgcatgcttttgacgaggagtggcaatctgaggtgttgaagtacaaacctggtcggcataacttagggaatacgaggatgagatctgtgggtcacgagaatcctggaagccgggagctcaaacggagggaaaagccacagcagtctcccgctatagaacacggccgaagaagtaacgtcctcggcgacaagctccacattaaggggagttcagtcaaaagcaacaagaagtag

SEQ ID NO: 47887 - DNA, 732 bp, Artificial Sequence
  derived and/or modified sequence
atgcggcagatgatccggagcttcagcgagcccttcggccgggacttgctcagcataagtgatggacgcgggcgtgcccataaccggagggggcacaatgacggcgaggacagcctcacacacactgacgttagttcatttcaaactatggaccagatggtcagcaacatgaggaactacatgcagaagctagagcgcaactttggccagctcagcgtcgaccccaatggccatagcttctgtagtagctcagtgatgacctatagcaaaatcggggatgagcctcccaaggttttccaggcctcaacccaaactcgtagggctcctgggggcattaaagaaactcgaaaggcaatgcgtgacagcgacagcggccttgaaaagatggcaatcggccaccatatacatgaccgggcacacgtgataaagaaatccaagaacaagaaaaccggggatgaggaggtgaatcaggaatttatcaacatgaatgagtctgacgcacacgcctttgacgaagagtggcagtcggaagtgctcaagtacaaacccggccggcataatctgggaaacaccagaatgaggtccgtggggcatgagaatccaggcagccgggagctgaagaggagagaaaaacctcagcagtcccccgccatcgagcatggcagacgcagcaatgtactgggggataagctgcacattaaaggaagttccgtcaaatctaacaaaaagtag

SEQ ID NO: 47888 - DNA, 732 bp, Artificial Sequence
  derived and/or modified sequence
atgcggcagatgatccggagcttcagcgagcccttcggccgggacttactgagtatcagtgacggaagaggcagggctcataataggcgagggcataatgacggcgaggattccttgacccacaccgacgtatcctcatttcagaccatggaccagatggtgtccaatatgaggaactatatgcagaaactcgagagaaatttcggccagctgtctgtggatcccaatgggcactcattctgctcatcttctgtgatgacatactcgaagattggggacgaacccccaaaggtgttccaggctagcactcaaactcggcgggcccccggcggcatcaaagagacgcgcaaggccatgagggactcggactccgggctagaaaaaatggccatcggacaccacattcacgatcgggctcatgtgattaaaaaaagtaagaataagaaaacaggggacgaggaggtgaatcaggaattcatcaacatgaacgaatctgacgcccatgctttcgatgaagagtggcaaagcgaagttctgaaatacaagcctggaagacataacctgggaaatacaaggatgcggtccgtcgggcacgaaaatccaggttcccgagaattaaagcgccgcgagaagcctcaacaatctcccgctattgagcacgggaggcgcagtaacgtattgggcgataaactgcacattaaaggatcctcggtgaagagcaacaaaaaatag

SEQ ID NO: 47889 - DNA, 732 bp, Artificial Sequence
  derived and/or modified sequence
atgaggcaaatgattaggtcattttccgaaccctttggcagggatctgctgagcatttctgatggaagggggagggcccataaccgcagaggccataatgacggggaagactcacttactcatactgacgtatcatcttttcagacgatggatcagatggtgagcaatatgaggaattatatgcagaaactcgagcggaatttcgggcagctgtccgttgatccaaacgggcactccttttgcagcagctcggtcatgacatatagtaagatcggagacgagcccccaaaagtgttccaggccagcacccagaccaggcgcgcacccggagggattaaagagaccaggaaggccatgcgcgacagcgattctggccttgagaaaatggctatcgggcatcatatacatgatcgggcacacgtgatcaagaagagcaagaataagaagaccggagatgaggaagtgaatcaggagttcatcaacatgaatgagtcggatgcacatgcgttcgatgaagagtggcagtcagaagttctgaagtataaaccaggcagacacaatctcggcaatacacgcatgcggagtgtaggccacgagaaccctggaagcagagagctgaagcgccgagagaagcctcagcagagccctgctattgagcacggtaggcggagtaatgtgcttggggataagctgcacatcaaagggagtagtgttaagtctaacaagaaatag

SEQ ID NO: 47890 - DNA, 732 bp, Artificial Sequence
  derived and/or modified sequence
atgcgccagatgattcggtcattctcggagcctttcgggagggacctcctgtctatctcagacggtcggggaagggcgcataacagacgcggtcacaatgacggtgaagactccttaacccacacagatgtaagctctttccagactatggaccagatggtgagtaatatgcgaaactatatgcagaagctggagcgcaattttggccagttatcagtcgaccccaacggacactccttttgcagctcctctgtaatgacgtactcaaagatcggcgatgaaccccctaaggtgtttcaggcttctacgcagacaagacgggcaccgggagggattaaggagacccggaaggcaatgagggacagcgactcggggctggagaaaatggctatcggccaccatattcacgatcgcgctcatgttattaaaaaatccaaaaacaagaaaactggtgacgaagaggtcaatcaggaattcataaacatgaacgagtctgacgcccatgcctttgacgaggagtggcagtccgaggtcctgaaatacaagccagggcgacacaatctgggcaacacacgaatgcgaagtgttgggcacgagaaccctggatccagggagttgaaacggcgagaaaagccacaacaatcgcctgctattgaacatggcaggcgtagtaatgtgctgggtgataaactgcacatcaaagggtcttctgttaagagtaacaaaaagtag

SEQ ID NO: 47891 - DNA, 732 bp, Artificial Sequence
  derived and/or modified sequence
atgcgccagatgattaggagctttagcgagccgtttggacgggatctgctgtcaataagcgatgggaggggcagagcccacaaccggagggggcacaacgacggagaggattcgctgacccataccgatgtgtcttcctttcaaactatggatcagatggtgagcaacatgagaaactacatgcagaagctggaacggaacttcggacagctttccgtggatccgaatggtcatagcttctgctccagtagcgtcatgacatatagcaaaattggggatgaacctcctaaagtgttccaggcatcaacgcagactcggcgtgccccagggggtattaaggaaacccggaaggcaatgcgcgatagcgatagcggacttgagaagatggctatcggccaccacattcatgatcgcgctcatgtaattaagaagagcaagaataagaagaccggggacgaggaagttaatcaagagtttatcaacatgaatgagagcgatgcgcatgcattcgacgaggagtggcaatccgaagttctcaagtataaacccggaagacacaacctcggcaacactagaatgcggtcagttggccatgagaatcctggaagccgggagctgaaacgtagagaaaagccgcagcagagccccgctatagaacacggaaggcggagtaacgtgctgggtgacaagctgcatataaaggggagcagcgtgaagagtaacaaaaagtag

SEQ ID NO: 47892 - DNA, 732 bp, Artificial Sequence
  derived and/or modified sequence
atgagacagatgatcagaagcttcagcgagcccttcggcagagacctgctgagcatcagcgacggcagaggcagagcccacaacagaagaggccacaacgacggcgaggacagcctgacccacaccgacgtgagcagcttccagaccatggaccagatggtgagcaacatgagaaactacatgcagaagctggagagaaacttcggccagctgagcgtggaccccaacggccacagcttctgcagcagcagcgtgatgacctacagcaagatcggcgacgagccccccaaggtgttccaggccagcacccagaccagaagagcccccggcggcatcaaggagaccagaaaggccatgagagacagcgacagcggcctggagaagatggccatcggccaccacatccacgacagagcccacgtgatcaagaagagcaagaacaagaagaccggcgacgaggaggtgaaccaggagttcatcaacatgaacgagagcgacgcccacgccttcgacgaggagtggcagagcgaggtgctgaagtacaagcccggcagacacaacctgggcaacaccagaatgagaagcgtgggccacgagaaccccggcagcagagagctgaagagaagagagaagccccagcagagccccgccatcgagcacggcagaagaagcaacgtgctgggcgacaagctgcacatcaagggcagcagcgtgaagagcaacaagaagtag

SEQ ID NO: 47893 - protein, 227 aa, Artificial Sequence
  derived and/or modified sequence
MARPVQLAPGSLALVLCRLEAQKAAGAAEEPGGRAVFRAFRRANARCFWNARLARAASRLAFQGWLRRGVLLVRAPPACLQVLRDAWRRRALRPPRGFRIRAVGDVFPVQMNPITQSQFVPLGEVLCCAISDMNTAQIVVTQESLLERLMKHYPGIAIPSEDILYTTLGTLIKERKIYHTGEGYFIVTPQTYFITNTTTQENKRMLPSDESRLMPASMTYLDTESGI

SEQ ID NO: 47894 - DNA, 684 bp, Artificial Sequence
  derived and/or modified sequence
atggccagacccgtgcagctggcccccggcagcctggccctggtgctgtgcagactggaggcccagaaggccgccggcgccgccgaggagcccggcggcagagccgtgttcagagccttcagaagagccaacgccagatgcttctggaacgccagactggccagagccgccagcagactggccttccagggctggctgagaagaggcgtgctgctggtgagagccccccccgcctgcctgcaggtgctgagagacgcctggagaagaagagccctgagaccccccagaggcttcagaatcagagccgtgggcgacgtgttccccgtgcagatgaaccccatcacccagagccagttcgtgcccctgggcgaggtgctgtgctgcgccatcagcgacatgaacaccgcccagatcgtggtgacccaggagagcctgctggagagactgatgaagcactaccccggcatcgccatccccagcgaggacatcctgtacaccaccctgggcaccctgatcaaggagagaaagatctaccacaccggcgagggctacttcatcgtgaccccccagacctacttcatcaccaacaccaccacccaggagaacaagagaatgctgcccagcgacgagagcagactgatgcccgccagcatgacctacctggacaccgagagcggcatctag

SEQ ID NO: 47895 - DNA, 684 bp, Artificial Sequence
  derived and/or modified sequence
atggccaggcccgttcagctggctcctggatctctggccctggttttatgtcgactagaggcgcagaaagcggcgggggccgcagaggaacctggcgggagggccgtgttcagagccttcagacgggccaatgccagatgcttttggaacgctcgcctggctcgtgccgcttctcgcctggcctttcagggctggctcaggagaggcgtactgctagtgcgcgcaccccccgcgtgtcttcaggtgctgcgagacgcttggcggagacgtgccttacggccaccaagaggctttcggatccgtgctgtaggtgatgtcttcccagtgcagatgaaccccataacccagagccaattcgtgcccctcggcgaggtgctctgttgcgctattagcgacatgaacaccgcacagatcgtggttacccaggagtcgctactcgaacgactgatgaagcattatcccgggattgcaattccatccgaggacattctgtacacaacacttggaactctaatcaaagagagaaagatttaccacaccggggagggctatttcattgttacaccacagacctactttatcacaaacactaccactcaagagaataagaggatgttgcccagcgatgagtcaaggttgatgccagcttcaatgacctacttggatactgagtctggcatttag

SEQ ID NO: 47896 - DNA, 684 bp, Artificial Sequence
  derived and/or modified sequence
atggcccggcctgtgcagctggcccctggcagcctggccctggtgctgtgccgcctggaggcccagaaggctgctggagctgctgaggagcccggcggccgggctgtgttccgggccttcagaagagccaatgcccgctgcttctggaatgcccggctggcccgggccgccagccggctggccttccagggctggctgcggcggggcgtgctgctggtgcgggcccccccagcctgcctgcaggtgctgagagatgcctggaggagaagagccctgcggcccccccggggcttccgcatccgggctgtgggagatgtgtttcctgtgcagatgaaccccatcacccagagccagtttgtgcccctgggggaggtgctgtgctgtgccatcagtgacatgaacacagcccagatcgtggtgacccaggagagcctgctggagcggctgatgaagcactacccaggcatcgccatccccagcgaggacatcctgtacaccaccctgggcaccctcatcaaggagaggaagatctaccacactggagagggctacttcatcgtgaccccccagacctacttcatcaccaacaccaccacccaggagaacaagaggatgctgcccagtgatgagagccggctgatgcctgcctccatgacctacctggacacagaaagtggcatctag

SEQ ID NO: 47897 - DNA, 684 bp, Artificial Sequence
  derived and/or modified sequence
atggcccggcccgtgcagctggcccccggcagcctggccctggtgttatgtcggctagaggcacagaaggcagccggagcagccgaagagcccggggggcgcgccgtttttcgggccttccgcagggctaacgcgagatgtttctggaatgcgcggctggcccgcgctgcttccagactcgcatttcagggatggcttagacgaggcgtgctcctcgtcagagcccctcccgcctgtctgcaggtgctgcgcgatgcatggcgccgacgggccctgagaccccctcgaggctttagaatacgcgcagtgggtgatgtatttccggtgcagatgaaccctattacccaaagccaattcgttccattgggagaagttttgtgctgtgcgatttctgacatgaacacagcccaaatcgtggtcacgcaggagagcctgctcgagcgacttatgaaacattacccggggattgccatcccgtcggaagacattctatatactacactgggcacactgataaaggagcggaagatctatcacaccggagagggctacttcatcgtgaccccacagacttactttatcaccaatacaaccacccaggagaataaaagaatgcttccatctgatgagtcccggctcatgcctgcatctatgacatacctcgatacagagagcggcatatag

SEQ ID NO: 47898 - DNA, 684 bp, Artificial Sequence
  derived and/or modified sequence
atggcacgccctgtacaacttgccccaggctcactcgctctagtgctgtgcaggttagaggcgcagaaagccgcaggggcagctgaggagcctggtggcagagccgtgtttcgggcattccgcagggctaacgctcggtgtttctggaacgcgcgtctagccagggccgcatcacgtttggcattccagggatggctgaggcggggagtgttgctggtaagggcacctccagcatgtctccaggtgctacgcgacgcttggcggagaagagcactaaggcctccaaggggattcaggattcgcgcagtgggtgatgtgttccccgtccagatgaatccgattacgcagagccagttcgtgccgttgggagaagtcctttgttgcgcaattagtgacatgaacaccgctcagatcgtggtgactcaggagtcgctgttagagcgtctcatgaagcattaccccggaatcgcaatcccttccgaagatattctatatacgacgttgggcaccctgataaaggagaggaagatatatcataccggtgagggatacttcatagtgaccccccagacatacttcatcactaacactactacgcaggagaataaacggatgttgccatcggatgaatctcgcctaatgccagcttccatgacatacctggacactgagtccggtatttag

SEQ ID NO: 47899 - DNA, 1135 bp, Artificial Sequence
  derived and/or modified sequence
atggcccggcccgtgcagctggcgccgggctcgctggcgctagtgctgtgccggctggaggcgcagaaggcggcgggggccgcggaggagcctggtgggcgcgcggtgttccgcgctttccgtcgcgccaacgcgcgctgcttctggaacgcgcggctggcgcgcgccgcctcgcggctggccttccagggctggctgcggcggggggtgctgctggtgcgcgcgccccccgcctgcctgcaggtgctgcgcgatgcctggcggcgccgggccctgcggccgccgcgcggcttccgcatcagggcggtgggtgatgtctttccagtgcaaatgaatccaataactcaatctcagttcgtacctttgggtgaagttctttgctgtgctatatctgatatgaatacagctcagattgtagtaacgcaggaatcacttttggagcgtttgatgaaacattacccaggcattgcaattccatcggaagatattctttataccactctgggaacgctgattaaagaaaggaagatttatcacactggagaaggatacttcatagttactcctcagacttacttcattacaaatacaaccacccaggaaaataagagaatgctgccatcagatgaaagtcgcctgatgccagcttccatgacatatctggacacagagtctgggatctaataattcagtcattttggatggactaaaaagaagacagaattttctgcaaaatgtcgaaggcacaaagagcagtcaaccactcacatctaattccttactaccgctaactccagtcataaacgtttaattttcttttggaaacctacttttttctttataaaaaggtagagcattattacagaatctttcaatcatgtaagaattgagtatataagaattgtctaaaggcaagcatatctatactattaaccacattacacattttgttctaattactggctttttttcctcttttggtgtcttaaggctttttgaagcttattttactgtgagtttattgggagtatatagattattttcgattaaaaagtggaattattggtccccttccaattgtaattatcttgaatttttatacattagtttctcaaatatatagaatgccaattta

SEQ ID NO: 47900 - protein, 169 aa, Artificial Sequence
  derived and/or modified sequence
MARPVQLAPGSLALVLCRLEAQKAAGAAEEPGGRAVFRAFRRANARCFWNARLARAASRLAFQGWLRRGVLLVRAPPACLQVLRDAWRRRALRPPRGFRIRAVGDVFPVQMNPITQSQFVPLGEVLCCAISDMNTAQIVVTQESLLERLMKHYPGHRVWDLIIQSFWMD

SEQ ID NO: 47901 - DNA, 510 bp, Artificial Sequence
  derived and/or modified sequence
atggccagacccgtgcagctggcccccggcagcctggccctggtgctgtgcagactggaggcccagaaggccgccggcgccgccgaggagcccggcggcagagccgtgttcagagccttcagaagagccaacgccagatgcttctggaacgccagactggccagagccgccagcagactggccttccagggctggctgagaagaggcgtgctgctggtgagagccccccccgcctgcctgcaggtgctgagagacgcctggagaagaagagccctgagaccccccagaggcttcagaatcagagccgtgggcgacgtgttccccgtgcagatgaaccccatcacccagagccagttcgtgcccctgggcgaggtgctgtgctgcgccatcagcgacatgaacaccgcccagatcgtggtgacccaggagagcctgctggagagactgatgaagcactaccccggccacagagtgtgggacctgatcatccagagcttctggatggactag

SEQ ID NO: 47902 - DNA, 510 bp, Artificial Sequence
  derived and/or modified sequence
atggccaggcccgtccagctggcacccggtagcctggctctcgtattgtgtcggttggaagcacagaaggcagccggcgctgctgaagagcctgggggaagggcagtgttccgggcttttcggcgcgcaaacgcccgatgtttctggaacgcgcgtctcgcaagagcggcaagccggctggccttccaaggatggctgcgacggggcgtgttactcgtcagagctccccctgcttgtcttcaggtcctccgtgatgcttggcgtcgaagggcccttcgcccaccccggggttttagaattcgtgccgtcggagacgtattcccagtacagatgaatccaatcacacagtcacagtttgtgccactgggcgaagttctgtgctgcgctatctccgatatgaataccgcacaaattgtcgtcacacaagagagcctcttagaaaggctgatgaaacattaccccggacaccgggtttgggatctgattatacagtcgttctggatggactag

SEQ ID NO: 47903 - DNA, 510 bp, Artificial Sequence
  derived and/or modified sequence
atggcccggcctgtgcagctggcccctggcagcctggccctggtgctgtgccgcctggaggcccagaaggctgctggagctgctgaggagcccggcggccgggctgtgttccgggccttcagaagagccaatgcccgctgcttctggaatgcccggctggcccgggccgccagccggctggccttccagggctggctgcggcggggcgtgctgctggtgcgggcccccccagcctgcctgcaggtgctgagagatgcctggaggagaagagccctgcggcccccccggggcttccgcatccgggctgtgggagatgtgtttcctgtgcagatgaaccccatcacccagagccagtttgtgcccctgggggaggtgctgtgctgtgccatcagtgacatgaacacagcccagatcgtggtgacccaggagagcctgctggagcggctgatgaagcactacccaggccaccgggtgtgggacctgatcatccagagcttctggatggactag

SEQ ID NO: 47904 - DNA, 510 bp, Artificial Sequence
  derived and/or modified sequence
atggcccggcccgtgcagctggcccccggcagcctggccctggtgctttgtaggttggaggctcaaaaagcagcaggcgccgctgaagagccgggtggacgggctgtgtttcgggctttcaggcgcgccaatgcccgttgcttctggaacgcacggctcgccagagctgcctcccgcctggcatttcagggctggctcagacgtggggtcttgctggtgcgcgcccctccggcttgtctgcaggtgttgcgcgatgcctggagacgcagggctctgcgccctccacgcggctttagaatccgcgccgtaggcgacgtgtttcccgtgcagatgaacccaatcactcagtcacaatttgttcccctgggtgaggtgttgtgttgtgccattagtgacatgaataccgctcagatcgttgtgactcaggagagcctgctggagcgtctgatgaaacactacccagggcaccgcgtctgggacctgatcatccagtcattctggatggactag

SEQ ID NO: 47905 - DNA, 510 bp, Artificial Sequence
  derived and/or modified sequence
atggcaaggcctgttcagctggccccagggagccttgccctcgtgctgtgccgattggaagcgcagaaggccgcaggcgctgcagaggagccaggaggcagggcagttttccgggctttcagaagagctaacgcaagatgcttttggaacgcgaggcttgccagggcagcctcccgactggcttttcagggctggcttcgaagaggggtgcttctggtgagggccccacccgcatgtctccaggtgctcagagatgcctggcgccgtcgcgctctccggccaccccgtggtttccgtattcgagccgtaggcgacgtgtttcccgtgcaaatgaatcctattacccagtcccaattcgtgcccttaggcgaagtcttatgctgtgcaattagtgacatgaacacggcacagatagtagtgacgcaggagagtctcctggaaagactgatgaaacattacccagggcaccgagtctgggacctaatcatccagtccttttggatggattag

SEQ ID NO: 47906 - DNA, 935 bp, Artificial Sequence
  derived and/or modified sequence
atggcccggcccgtgcagctggcgccgggctcgctggcgctagtgctgtgccggctggaggcgcagaaggcggcgggggccgcggaggagcctggtgggcgcgcggtgttccgcgctttccgtcgcgccaacgcgcgctgcttctggaacgcgcggctggcgcgcgccgcctcgcggctggccttccagggctggctgcggcggggggtgctgctggtgcgcgcgccccccgcctgcctgcaggtgctgcgcgatgcctggcggcgccgggccctgcggccgccgcgcggcttccgcatcagggcggtgggtgatgtctttccagtgcaaatgaatccaataactcaatctcagttcgtacctttgggtgaagttctttgctgtgctatatctgatatgaatacagctcagattgtagtaacgcaggaatcacttttggagcgtttgatgaaacattacccaggacacagagtctgggatctaataattcagtcattttggatggactaaaaagaagacagaattttctgcaaaatgtcgaaggcacaaagagcagtcaaccactcacatctaattccttactaccgctaactccagtcataaacgtttaattttcttttggaaacctacttttttctttataaaaaggtagagcattattacagaatctttcaatcatgtaagaattgagtatataagaattgtctaaaggcaagcatatctatactattaaccacattacacattttgttctaattactggctttttttcctcttttggtgtcttaaggctttttgaagcttattttactgtgagtttattgggagtatatagattattttcgattaaaaagtggaattattggtccccttccaattgtaattatcttgaatttttatacattagtttctcaaatatatagaatgccaattta

SEQ ID NO: 47907 - protein, 989 aa, Artificial Sequence
  derived and/or modified sequence
MARPVQLAPGSLALVLCRLEAQKAAGAAEEPGGRAVFRAFRRANARCFWNARLARAASRLAFQGWLRRGVLLVRAPPACLQVLRDAWRRRALRPPRGFRIRAVGDVFPVQMNPITQSQFVPLGEVLCCAISDMNTAQIVVTQESLLERLMKHYPGIAIPSEDILYTTLGTLIKERKIYHTGEGYFIVTPQTYFITNTTTQENKRMLPSDESRLMPASMTYLVSMESCAESAQENAAPISHCQSCQCFRDMHTQDVQEAPVAAEVTRKSHRGLGESVSWVQNGAVSVSAEHHICESTKPLPYTRDKEKGKKFGFSLLWRSLSRKEKPKTEHSSFSAQFPPEEWPVRDEDDLDNIPRDVEHEIIKRINPILTVDNLIKHTVLMQKYEEQKKYNSQGTSTDMLTIGHKYPSKEGVKKRQGLSAKPQGQGHSRRDRHKARNQGSEFQPGSIRLEKHPKLPATQPIPRIKSPNEMVGQKPLGEITTVLGSHLIYKKRISNPFQGLSHRGSTISKGHKIQKTSDLKPSQTGPKEKPFQKPRSLDSSRIFDGKAKEPYAEQPNDKMEAESIYINDPTVKPINDDFRGHLFSHPQQSMLQNDGKCCPFMESMLRYEVYGGENEVIPEVLRKSHSHFDKLGETKQTPHSLPSRGASFSDRTPSACRLVDNTIHQFQNLGLLDYPVGVNPLRQAARQDKDSEELLRKGFVQDAETTSLENEQLSNDDQALYQNEVEDDDGACSSLYLEEDDISENDDLRQMLPGHSQYSFTGGSQGNHLGKQKVIERSLTEYNSTMERVESQVLKRNECYKPTGLHATPGESQEPNLSAESCGLNSGAQFGFNYEEEPSVAKCVQASAPADERIFDYYSARKASFEAEVIQDTIGDTGKKPASWSQSPQNQEMRKHFPQKFQLFNTSHMPVLAQDVQYEHSHLEGTENHSMAGDSGIDSPRTQSLGSNNSVILDGLKRRQNFLQNVEGTKSSQPLTSNSLLPLTPVINV

SEQ ID NO: 47908 - DNA, 2970 bp, Artificial Sequence
  derived and/or modified sequence
atggccagacccgtgcagctggcccccggcagcctggccctggtgctgtgcagactggaggcccagaaggccgccggcgccgccgaggagcccggcggcagagccgtgttcagagccttcagaagagccaacgccagatgcttctggaacgccagactggccagagccgccagcagactggccttccagggctggctgagaagaggcgtgctgctggtgagagccccccccgcctgcctgcaggtgctgagagacgcctggagaagaagagccctgagaccccccagaggcttcagaatcagagccgtgggcgacgtgttccccgtgcagatgaaccccatcacccagagccagttcgtgcccctgggcgaggtgctgtgctgcgccatcagcgacatgaacaccgcccagatcgtggtgacccaggagagcctgctggagagactgatgaagcactaccccggcatcgccatccccagcgaggacatcctgtacaccaccctgggcaccctgatcaaggagagaaagatctaccacaccggcgagggctacttcatcgtgaccccccagacctacttcatcaccaacaccaccacccaggagaacaagagaatgctgcccagcgacgagagcagactgatgcccgccagcatgacctacctggtgagcatggagagctgcgccgagagcgcccaggagaacgccgcccccatcagccactgccagagctgccagtgcttcagagacatgcacacccaggacgtgcaggaggcccccgtggccgccgaggtgaccagaaagagccacagaggcctgggcgagagcgtgagctgggtgcagaacggcgccgtgagcgtgagcgccgagcaccacatctgcgagagcaccaagcccctgccctacaccagagacaaggagaagggcaagaagttcggcttcagcctgctgtggagaagcctgagcagaaaggagaagcccaagaccgagcacagcagcttcagcgcccagttcccccccgaggagtggcccgtgagagacgaggacgacctggacaacatccccagagacgtggagcacgagatcatcaagagaatcaaccccatcctgaccgtggacaacctgatcaagcacaccgtgctgatgcagaagtacgaggagcagaagaagtacaacagccagggcaccagcaccgacatgctgaccatcggccacaagtaccccagcaaggagggcgtgaagaagagacagggcctgagcgccaagccccagggccagggccacagcagaagagacagacacaaggccagaaaccagggcagcgagttccagcccggcagcatcagactggagaagcaccccaagctgcccgccacccagcccatccccagaatcaagagccccaacgagatggtgggccagaagcccctgggcgagatcaccaccgtgctgggcagccacctgatctacaagaagagaatcagcaaccccttccagggcctgagccacagaggcagcaccatcagcaagggccacaagatccagaagaccagcgacctgaagcccagccagaccggccccaaggagaagcccttccagaagcccagaagcctggacagcagcagaatcttcgacggcaaggccaaggagccctacgccgagcagcccaacgacaagatggaggccgagagcatctacatcaacgaccccaccgtgaagcccatcaacgacgacttcagaggccacctgttcagccacccccagcagagcatgctgcagaacgacggcaagtgctgccccttcatggagagcatgctgagatacgaggtgtacggcggcgagaacgaggtgatccccgaggtgctgagaaagagccacagccacttcgacaagctgggcgagaccaagcagaccccccacagcctgcccagcagaggcgccagcttcagcgacagaacccccagcgcctgcagactggtggacaacaccatccaccagttccagaacctgggcctgctggactaccccgtgggcgtgaaccccctgagacaggccgccagacaggacaaggacagcgaggagctgctgagaaagggcttcgtgcaggacgccgagaccaccagcctggagaacgagcagctgagcaacgacgaccaggccctgtaccagaacgaggtggaggacgacgacggcgcctgcagcagcctgtacctggaggaggacgacatcagcgagaacgacgacctgagacagatgctgcccggccacagccagtacagcttcaccggcggcagccagggcaaccacctgggcaagcagaaggtgatcgagagaagcctgaccgagtacaacagcaccatggagagagtggagagccaggtgctgaagagaaacgagtgctacaagcccaccggcctgcacgccacccccggcgagagccaggagcccaacctgagcgccgagagctgcggcctgaacagcggcgcccagttcggcttcaactacgaggaggagcccagcgtggccaagtgcgtgcaggccagcgcccccgccgacgagagaatcttcgactactacagcgccagaaaggccagcttcgaggccgaggtgatccaggacaccatcggcgacaccggcaagaagcccgccagctggagccagagcccccagaaccaggagatgagaaagcacttcccccagaagttccagctgttcaacaccagccacatgcccgtgctggcccaggacgtgcagtacgagcacagccacctggagggcaccgagaaccacagcatggccggcgacagcggcatcgacagccccagaacccagagcctgggcagcaacaacagcgtgatcctggacggcctgaagagaagacagaacttcctgcagaacgtggagggcaccaagagcagccagcccctgaccagcaacagcctgctgcccctgacccccgtgatcaacgtgtag

SEQ ID NO: 47909 - DNA, 2640 bp, Artificial Sequence
  derived and/or modified sequence
atgaaccccatcacccagagccagttcgtgcccctgggcgaggtgctgtgctgcgccatcagcgacatgaacaccgcccagatcgtggtgacccaggagagcctgctggagagactgatgaagcactaccccggcatcgccatccccagcgaggacatcctgtacaccaccctgggcaccctgatcaaggagagaaagatctaccacaccggcgagggctacttcatcgtgaccccccagacctacttcatcaccaacaccaccacccaggagaacaagagaatgctgcccagcgacgagagcagactgatgcccgccagcatgacctacctggtgagcatggagagctgcgccgagagcgcccaggagaacgccgcccccatcagccactgccagagctgccagtgcttcagagacatgcacacccaggacgtgcaggaggcccccgtggccgccgaggtgaccagaaagagccacagaggcctgggcgagagcgtgagctgggtgcagaacggcgccgtgagcgtgagcgccgagcaccacatctgcgagagcaccaagcccctgccctacaccagagacaaggagaagggcaagaagttcggcttcagcctgctgtggagaagcctgagcagaaaggagaagcccaagaccgagcacagcagcttcagcgcccagttcccccccgaggagtggcccgtgagagacgaggacgacctggacaacatccccagagacgtggagcacgagatcatcaagagaatcaaccccatcctgaccgtggacaacctgatcaagcacaccgtgctgatgcagaagtacgaggagcagaagaagtacaacagccagggcaccagcaccgacatgctgaccatcggccacaagtaccccagcaaggagggcgtgaagaagagacagggcctgagcgccaagccccagggccagggccacagcagaagagacagacacaaggccagaaaccagggcagcgagttccagcccggcagcatcagactggagaagcaccccaagctgcccgccacccagcccatccccagaatcaagagccccaacgagatggtgggccagaagcccctgggcgagatcaccaccgtgctgggcagccacctgatctacaagaagagaatcagcaaccccttccagggcctgagccacagaggcagcaccatcagcaagggccacaagatccagaagaccagcgacctgaagcccagccagaccggccccaaggagaagcccttccagaagcccagaagcctggacagcagcagaatcttcgacggcaaggccaaggagccctacgccgagcagcccaacgacaagatggaggccgagagcatctacatcaacgaccccaccgtgaagcccatcaacgacgacttcagaggccacctgttcagccacccccagcagagcatgctgcagaacgacggcaagtgctgccccttcatggagagcatgctgagatacgaggtgtacggcggcgagaacgaggtgatccccgaggtgctgagaaagagccacagccacttcgacaagctgggcgagaccaagcagaccccccacagcctgcccagcagaggcgccagcttcagcgacagaacccccagcgcctgcagactggtggacaacaccatccaccagttccagaacctgggcctgctggactaccccgtgggcgtgaaccccctgagacaggccgccagacaggacaaggacagcgaggagctgctgagaaagggcttcgtgcaggacgccgagaccaccagcctggagaacgagcagctgagcaacgacgaccaggccctgtaccagaacgaggtggaggacgacgacggcgcctgcagcagcctgtacctggaggaggacgacatcagcgagaacgacgacctgagacagatgctgcccggccacagccagtacagcttcaccggcggcagccagggcaaccacctgggcaagcagaaggtgatcgagagaagcctgaccgagtacaacagcaccatggagagagtggagagccaggtgctgaagagaaacgagtgctacaagcccaccggcctgcacgccacccccggcgagagccaggagcccaacctgagcgccgagagctgcggcctgaacagcggcgcccagttcggcttcaactacgaggaggagcccagcgtggccaagtgcgtgcaggccagcgcccccgccgacgagagaatcttcgactactacagcgccagaaaggccagcttcgaggccgaggtgatccaggacaccatcggcgacaccggcaagaagcccgccagctggagccagagcccccagaaccaggagatgagaaagcacttcccccagaagttccagctgttcaacaccagccacatgcccgtgctggcccaggacgtgcagtacgagcacagccacctggagggcaccgagaaccacagcatggccggcgacagcggcatcgacagccccagaacccagagcctgggcagcaacaacagcgtgatcctggacggcctgaagagaagacagaacttcctgcagaacgtggagggcaccaagagcagccagcccctgaccagcaacagcctgctgcccctgacccccgtgatcaacgtgtag

SEQ ID NO: 47910 - DNA, 2970 bp, Artificial Sequence
  derived and/or modified sequence
atggcacgccctgtgcagctagcccccggctctctggccttggtgttgtgccggctggaagcacaaaaggcagctggagcagctgaggaacctgggggtagagccgtttttcgtgcttttcgaagggctaacgcaagatgcttctggaatgcacgactggcacgggccgccagccggctggcgtttcagggctggctccggcggggcgtacttctcgtaagagcgccccccgcttgcctgcaggtactccgcgatgcctggcgcagacgagcactgcgtccgccccgcggctttcggattcgtgcagtcggggatgtgtttccagttcagatgaatcccattacgcaaagccagtttgtgccactaggtgaagtgctgtgttgcgctatctccgatatgaacacagcccagattgtggtcactcaggagagcctgctggaacgcttgatgaagcactatcctggaatagccatccccagcgaagacatactctatactacgcttggaacactgataaaggagaggaagatctatcacaccggggagggatattttatcgttacccctcagacatacttcatcacgaacacgaccacgcaggagaacaaacgtatgctgccatctgacgaatcccgactcatgcccgcatctatgacatacctagtatccatggagtcatgtgccgaaagcgcacaggaaaacgcagcaccgatcagccattgccagtcctgtcagtgctttcgcgacatgcatacccaagacgtgcaagaggcccccgtcgccgccgaggttacccgtaaatcccacagaggtctcggtgagagcgtgtcgtgggtccaaaatggtgctgtgtctgtctctgctgaacaccacatctgtgagtctacgaagcctctcccttatacaagggataaagaaaagggcaagaagttcggattctccctgctctggaggtccctttcccgaaaagagaagccaaaaaccgagcactcctccttctcggcccagtttccccccgaagagtggcccgtacgcgatgaggatgatcttgataatatcccaagggacgttgagcacgagatcataaagcgtattaatccaatacttaccgtggataacttgatcaagcatacggtgttgatgcaaaaatatgaagaacaaaagaaatataatagccagggaactagtaccgatatgctgaccataggtcataaatatccatccaaggaaggcgtaaagaagagacagggcctcagtgctaaaccccagggtcagggacacagccgaagggataggcataaggctagaaaccagggttcagaattccagcctggctcaattcgactggaaaagcatcccaaattgcccgctacacaacccatccccaggataaaatcaccaaatgaaatggtcgggcagaaacctctaggcgagataacaaccgtgctgggctcacacctcatttataagaagcgcatctccaaccccttccagggcctctcacaccggggtagtaccatttccaagggacacaagatccagaagacaagtgatttgaaaccatcacagacgggaccgaaagaaaagccctttcagaagcccaggagcttggacagttccaggatttttgacggcaaagccaaggaaccttatgctgaacagcccaacgacaaaatggaggccgagtcaatctacattaacgatcctacagtgaagcctattaatgatgactttcgtggccacctattctctcatccacagcagtctatgctgcagaacgacggaaagtgctgcccctttatggagagcatgttgaggtatgaggtctacgggggcgaaaatgaggtcatccctgaagtgctgcgtaagtctcattcccatttcgacaaactcggcgaaaccaaacagacaccccactccctgccatccaggggagcctcctttagcgacagaaccccatccgcctgtagactggtggacaacactatccaccagttccaaaacctggggttacttgactacccagtgggggtgaacccattgcggcaggcagcacgccaggataaagactccgaagaactactgcggaagggattcgtccaggatgcagaaacgacatccctggagaacgagcagctgtcaaacgacgatcaggctttgtaccagaacgaagtggaggatgatgatggagcatgttcgagcctgtatctggaggaagatgatatttcagagaacgatgatctgcgtcaaatgctccctggccatagccaatattctttcacaggcggatcacaggggaaccacctcggcaagcagaaagtgatcgaaagaagtcttaccgagtataatagtaccatggaaagagtcgagtcccaggtgttgaagaggaacgagtgctataagcccacgggcctgcatgcaacccccggggagtcacaggagcccaacctatcagccgaaagctgcggattgaactccggagctcagtttggattcaattacgaggaggaaccaagcgtggctaaatgcgtgcaggctagtgcccctgccgatgagagaatctttgattactactctgcccggaaggcctcattcgaagctgaagttatccaggataccatcggcgacaccggaaaaaagcccgctagttggtcccagtcccctcagaatcaggagatgcggaagcacttcccacagaaatttcaactcttcaatacctctcacatgcccgttctggcacaggacgtgcagtacgagcacagccaccttgagggcactgaaaaccatagcatggcaggagactctggcattgattcacctcggacacagtctctgggcagcaataattccgtcatcctggatggcctcaaaagacgacagaacttcctccaaaatgtggagggaactaagagctcgcagcctctcacttctaattccctcttgcccctgacccccgtcattaacgtgtag

SEQ ID NO: 47911 - DNA, 2970 bp, Artificial Sequence
  derived and/or modified sequence
atggctaggccagtccagcttgccccaggtagtctggcattggtgctttgcagactggaggcccagaaggctgcaggcgccgccgaggaacccggtgggagggctgttttccgagcctttagaagggcaaatgcaaggtgtttctggaatgcccgcctggctcgggccgcttcaaggctggcattccagggttggttacgccgaggcgtgcttctggttagggctccacctgcctgcctacaggtgctgcgcgacgcttggcgtaggcgtgccctgcgcccaccccgcggcttccggatacgggccgtcggcgacgtgtttccggtgcagatgaatccgatcactcaaagtcaatttgtgcccctgggagaggtgctctgctgtgctattagcgacatgaatacagcccagatagtggtgacacaggagtctttgctagaaaggctgatgaagcactaccctggtattgctattccttctgaagatatcttgtatacaaccctcggcactctgattaaggagcgtaagatctatcacaccggcgagggatactttatcgtcacgccacagacctatttcatcactaatacaacaacccaggaaaataagaggatgttgccaagtgatgaatctaggcttatgccagcctccatgacatacctcgtgagcatggagtcctgcgccgagtccgcccaggagaacgctgcacctatctctcattgccagtcatgccagtgttttcgtgacatgcatacacaggacgtgcaggaagccccagtcgctgcagaagtcacacgcaagagtcatcgcggcctgggggaatccgtgtcctgggtgcagaacggagctgtaagcgtgtccgctgaacaccacatctgtgagtccaccaagccgctgccgtatacaagggacaaggagaagggcaagaagttcggcttctcactgttgtggcgctcattatcccgcaaagagaagcccaagaccgagcactcttccttcagtgctcaattcccccctgaggaatggccagtgcgggacgaagatgatctggataatattccgcgagatgttgaacacgaaattattaagcgcattaatcctattctcactgtagacaacctaattaagcacacagtgctgatgcaaaaatacgaagaacaaaagaagtacaacagccaggggaccagcactgatatgctcacgatcgggcataagtaccctagcaaggagggtgtcaagaaaagacagggactctccgcaaaaccccagggccagggccactcccgcagggaccgccacaaagcacgcaaccagggcagcgagttccagcccggaagtattagattggagaaacaccctaaattgccagcaactcagccaatccctaggattaagtctcccaatgagatggtcggtcagaaaccactgggggagatcaccacagtcctcggctcgcacctcatttacaagaaacgcatttcaaatcctttccagggcctgtcccacagaggcagtacaatcagcaaagggcataagatccagaaaacaagtgatctcaaaccttcacagacaggtcccaaggaaaagcctttccagaaaccccgctctctggactccagtagaatctttgatggcaaggccaaggaaccctacgccgaacaacccaatgacaaaatggaggcggagagcatttatatcaacgacccgacagtgaaacctatcaacgatgactttcgaggccacctgttctcccacccccaacaaagcatgctgcaaaatgacggtaagtgctgcccatttatggaaagtatgcttagatacgaagtctacgggggtgaaaacgaggttatacctgaagtgcttaggaagtcacacagccatttcgacaagctgggagaaaccaagcagaccccccactccttacctagccgtggcgcatcctttagcgatcgcacacccagtgcatgccggctggtggacaacaccatccaccagtttcagaacctggggctcctggattaccccgttggggtgaacccactgagacaggccgcaagacaggataaggattctgaggaactgctaaggaagggtttcgtacaggatgccgagaccacctcactggagaacgaacagctgtctaacgacgaccaggcactttaccagaatgaagtggaagacgatgatggtgcttgctcgagcttgtacttagaggaggacgacatatcggaaaatgatgacttgcgacagatgctccctggacacagtcaatattcgtttacaggggggagtcagggtaaccacttgggtaaacaaaaagtgatcgagcgctccctaactgaatacaacagcacaatggaaagggtcgagagccaggtcctcaagcgaaatgaatgttataagccaactggcctgcacgcaacgcccggagagagccaggagcccaatctgagcgccgaaagctgcggattaaattctggcgcccagttcggctttaattacgaagaggaaccctcagttgcaaagtgtgtccaggcctcagccccagctgatgagcggatctttgattactatagcgcccgcaaagctagctttgaggccgaagtgatccaggacacgatcggcgacactggaaagaaaccagcctcctggagtcagtctccccagaatcaagaaatgcggaagcatttcccacagaaatttcagctgtttaacacttcacacatgcctgttctcgcacaggatgtgcagtacgagcactcccacctagagggaaccgagaatcatagtatggccggtgatagcgggatcgacagccctcgtacacagtctttaggatccaacaactcggtgattcttgatgggctcaaaagaaggcagaactttctccagaatgtcgaaggaacaaagagctcacagcctctcacctcaaatagcctgctccctttgaccccagtaattaatgtgtag

SEQ ID NO: 47912 - DNA, 2640 bp, Artificial Sequence
  derived and/or modified sequence
atgaacccaattacacagtcccagtttgtgccccttggagaagtcctgtgctgcgccatcagtgatatgaacacagctcagatcgtggtcacccaggaatccctgctggagcggctcatgaaacattatccagggatcgccatcccctctgaggatatcctctacactaccctgggaacactgataaaggagcggaaaatctaccataccggagaaggctatttcatcgttacaccccagacctatttcattactaatacgactacacaagagaacaagagaatgttaccttccgacgaatcccgtctgatgcctgcatcaatgacatatttggtttccatggagtcttgtgccgaaagtgcccaggaaaatgcagctcccattagccattgccagtcctgtcaatgttttcgggacatgcacactcaggacgtccaagaagcccccgtggctgcagaagtcaccaggaaatcgcaccgcggcttaggagaaagtgttagctgggtccagaatggcgccgttagcgtgtccgcagaacaccatatctgcgaaagtacgaagccattgccgtatacacgggataaagagaaggggaagaagttcggattctccctcttgtggaggagtttgagccgcaaagaaaagcctaagaccgaacactcgtcattttccgctcagttccccccagaggagtggccagtccgggacgaggacgatctcgacaatattccacgggacgttgagcatgaaattataaagcggatcaacccgatcctgactgtagacaacctcatcaagcacactgtgctgatgcagaaatacgaagaacaaaaaaaatacaactctcagggaacctctaccgatatgttgaccattgggcataagtatccatccaaggaaggcgtgaagaagaggcagggcctgagtgctaagccccagggacagggccattcacgccgcgataggcacaaggcgaggaaccagggctccgaatttcagcctggtagtattcgcctggaaaagcatcccaaactgcccgctacccagcctataccaagaatcaagtcgccaaacgagatggtgggccaaaagcccctaggggagatcaccacagtactgggcagtcatctgatttataagaagcgaataagtaatccctttcagggtctgtcacatcgcgggagtaccatttcaaaggggcacaagatccagaaaaccagtgatctgaaaccgagccaaacaggcccaaaggagaaacccttccagaaacctaggtcactggacagctcccggatttttgacggcaaggccaaggaaccatacgcagaacagcctaacgacaagatggaggctgagtcaatttacattaatgacccgaccgtgaagccgatcaacgatgacttccggggacacctgttttcccacccccagcagtcaatgctgcagaacgacggcaaatgttgcccgtttatggaaagtatgctcagatatgaagtgtacgggggggaaaacgaggtcatccctgaggtccttcgcaaatcccattctcattttgacaagttgggagaaacaaaacagactcctcactctttgccatctcgcggtgcctccttttcagatagaacacccagcgcatgtaggctggtagacaacacaattcaccaatttcaaaacctgggtcttcttgactatcccgtcggggtcaaccccctgagacaagccgccagacaggataaggacagtgaggaactgctgaggaaaggctttgtgcaagacgccgagacgacatccttggagaacgagcaattgtctaatgacgaccaagcgctgtatcagaacgaggtggaggatgacgatggggcttgttcaagcctgtacctggaagaggacgatatctccgagaacgacgatctgcgccaaatgctacccggacactcccagtattctttcactgggggaagccaaggaaatcatttaggtaaacagaaggttatagagcgatccctcactgagtacaactccactatggaaagagtcgagtcccaggtgctgaagaggaatgaatgctataaacctaccggcttacacgccacacccggggagagccaggagccaaatctctcagctgaatcatgtggactgaactctggcgcacaatttgggtttaactatgaagaggagccctccgtggccaaatgcgtgcaggccagtgcacccgcggatgaacggatcttcgattattactcagccagaaaagcttccttcgaagcagaggtaattcaggacaccatcggcgacactggaaagaaaccggcctcctggagccagagcccccagaaccaggaaatgcgtaagcatttccctcagaagttccaattgtttaatacctcccatatgccagttttagcccaagacgttcaatatgagcactcccacctggaaggaacggaaaatcactccatggccggagacagtgggatagattccccccgtacccaaagtctcggctcaaacaacagtgtgatattagacgggcttaaacggcgccagaactttctccaaaatgtcgagggcactaaatctagccagcccttgacttcgaattccctgttgcctctgacaccagtcataaatgtatag

SEQ ID NO: 47913 - DNA, 2970 bp, Artificial Sequence
  derived and/or modified sequence
atggcccggcctgtgcagctggcccctggcagcctggccctggtgctgtgccgcctggaggcccagaaggctgctggagctgctgaggagcccggcggccgggctgtgttccgggccttcagaagagccaatgcccgctgcttctggaatgcccggctggcccgggccgccagccggctggccttccagggctggctgcggcggggcgtgctgctggtgcgggcccccccagcctgcctgcaggtgctgagagatgcctggaggagaagagccctgcggcccccccggggcttccgcatccgggctgtgggagatgtgtttcctgtgcagatgaaccccatcacccagagccagtttgtgcccctgggggaggtgctgtgctgtgccatcagtgacatgaacacagcccagatcgtggtgacccaggagagcctgctggagcggctgatgaagcactacccaggcatcgccatccccagcgaggacatcctgtacaccaccctgggcaccctcatcaaggagaggaagatctaccacactggagagggctacttcatcgtgaccccccagacctacttcatcaccaacaccaccacccaggagaacaagaggatgctgcccagtgatgagagccggctgatgcctgcctccatgacctacctggtgtccatggagagctgtgccgagagcgcccaggagaatgctgcccccatcagccactgccagagctgccagtgcttccgggacatgcacacccaggatgtgcaggaggcccctgtggccgctgaggtgaccaggaagagccaccggggcctgggggagagcgtgtcctgggtgcagaatggagctgtgtctgtgtctgctgagcaccacatctgtgagagcaccaagcccctgccctacacccgggacaaggagaagggcaagaagtttggcttcagcctgctgtggaggagcctgagcaggaaggagaagcccaagacagagcacagcagcttcagcgcccagttccccccagaggagtggcctgtgagagatgaagatgacctggacaacatccccagagatgtggagcacgagatcatcaagaggatcaaccccatcctgactgtggacaacctgatcaagcacacagtgctgatgcagaagtatgaggagcagaagaagtacaacagccagggcaccagcacagacatgctgaccatcggccacaagtaccccagcaaggagggcgtgaagaagaggcagggcctgagcgccaagccccagggccagggccacagcagaagagacagacacaaggccaggaaccagggcagcgagttccagcccggcagcatccggctggagaagcaccccaagctgcctgccacccagcccatcccccgcatcaagagccccaatgagatggtgggccagaagcccctgggggagatcaccaccgtgctgggcagccacctgatctacaagaagaggatcagcaaccccttccagggcctgagccaccggggcagcaccatcagcaagggccacaagatccagaagaccagtgacctgaagcccagccagacaggccccaaggagaagcccttccagaagcccaggagcctggacagcagccgcatctttgatggcaaggccaaggagccctatgcagagcagcccaatgacaagatggaggccgagagcatctacatcaatgaccccaccgtgaagcccatcaatgatgacttccggggccacctgttcagccacccccagcagagcatgctgcagaatgatggcaagtgctgccccttcatggagagcatgctgcgctatgaggtgtatggaggagaaaatgaggtgattcctgaggtgctgaggaagagccacagccactttgacaagctgggggagaccaagcagaccccccacagcctgcccagcagaggagccagcttcagtgacaggacccccagcgcctgccgcctggtggacaacaccatccaccagttccagaacctgggcctgctggactaccctgtgggcgtgaaccccctgcggcaggccgcccggcaggacaaggacagcgaggagctgctgaggaaaggatttgtgcaggatgctgagaccaccagcctggagaatgagcagctgagcaatgatgaccaggccctgtaccagaatgaggtggaggatgatgatggagcctgcagcagcctgtacctggaggaggatgacatcagtgaaaatgatgacctgcggcagatgctgcccggccacagccagtacagcttcaccggcggcagccagggcaaccacctgggcaagcagaaggtgattgaaagaagcctgacagagtacaacagcaccatggagcgggtggagagccaggtgctgaagagaaatgaatgctacaagcccaccggcctgcacgccaccccaggagagagccaggagcccaacctgtctgctgagagctgtggcctgaacagcggggcccagtttggcttcaactatgaggaggagcccagcgtggccaagtgtgtgcaggccagcgccccagcagatgagcgcatctttgactactacagcgccaggaaggccagctttgaagctgaggtgatccaggacaccatcggggacaccgggaagaagccagcctcctggagccagagcccccagaaccaggagatgaggaagcacttcccccagaagttccagctgttcaacaccagccacatgcctgtgctggcccaggatgtgcagtatgagcacagccacctggagggcacagagaaccacagcatggccggggacagcggcatcgacagccccaggacccagagcctgggcagcaacaacagcgtcatcctggatggcctgaagaggcggcagaacttcctgcagaatgtggagggcaccaagagcagccagcccctgaccagcaacagcctgctgcccctgacccctgtgatcaacgtgtag

SEQ ID NO: 47914 - DNA, 2640 bp, Artificial Sequence
  derived and/or modified sequence
atgaaccccatcacccagagccagtttgtgcccctgggggaggtgctgtgctgtgccatcagtgacatgaacacagcccagatcgtggtgacccaggagagcctgctggagcggctgatgaagcactacccaggcatcgccatccccagcgaggacatcctgtacaccaccctgggcaccctcatcaaggagaggaagatctaccacactggagagggctacttcatcgtgaccccccagacctacttcatcaccaacaccaccacccaggagaacaagaggatgctgcccagtgatgagagccggctgatgcctgcctccatgacctacctggtgtccatggagagctgtgccgagagcgcccaggagaatgctgcccccatcagccactgccagagctgccagtgcttccgggacatgcacacccaggatgtgcaggaggcccctgtggccgctgaggtgaccaggaagagccaccggggcctgggggagagcgtgtcctgggtgcagaatggagctgtgtctgtgtctgctgagcaccacatctgtgagagcaccaagcccctgccctacacccgggacaaggagaagggcaagaagtttggcttcagcctgctgtggaggagcctgagcaggaaggagaagcccaagacagagcacagcagcttcagcgcccagttccccccagaggagtggcctgtgagagatgaagatgacctggacaacatccccagagatgtggagcacgagatcatcaagaggatcaaccccatcctgactgtggacaacctgatcaagcacacagtgctgatgcagaagtatgaggagcagaagaagtacaacagccagggcaccagcacagacatgctgaccatcggccacaagtaccccagcaaggagggcgtgaagaagaggcagggcctgagcgccaagccccagggccagggccacagcagaagagacagacacaaggccaggaaccagggcagcgagttccagcccggcagcatccggctggagaagcaccccaagctgcctgccacccagcccatcccccgcatcaagagccccaatgagatggtgggccagaagcccctgggggagatcaccaccgtgctgggcagccacctgatctacaagaagaggatcagcaaccccttccagggcctgagccaccggggcagcaccatcagcaagggccacaagatccagaagaccagtgacctgaagcccagccagacaggccccaaggagaagcccttccagaagcccaggagcctggacagcagccgcatctttgatggcaaggccaaggagccctatgcagagcagcccaatgacaagatggaggccgagagcatctacatcaatgaccccaccgtgaagcccatcaatgatgacttccggggccacctgttcagccacccccagcagagcatgctgcagaatgatggcaagtgctgccccttcatggagagcatgctgcgctatgaggtgtatggaggagaaaatgaggtgattcctgaggtgctgaggaagagccacagccactttgacaagctgggggagaccaagcagaccccccacagcctgcccagcagaggagccagcttcagtgacaggacccccagcgcctgccgcctggtggacaacaccatccaccagttccagaacctgggcctgctggactaccctgtgggcgtgaaccccctgcggcaggccgcccggcaggacaaggacagcgaggagctgctgaggaaaggatttgtgcaggatgctgagaccaccagcctggagaatgagcagctgagcaatgatgaccaggccctgtaccagaatgaggtggaggatgatgatggagcctgcagcagcctgtacctggaggaggatgacatcagtgaaaatgatgacctgcggcagatgctgcccggccacagccagtacagcttcaccggcggcagccagggcaaccacctgggcaagcagaaggtgattgaaagaagcctgacagagtacaacagcaccatggagcgggtggagagccaggtgctgaagagaaatgaatgctacaagcccaccggcctgcacgccaccccaggagagagccaggagcccaacctgtctgctgagagctgtggcctgaacagcggggcccagtttggcttcaactatgaggaggagcccagcgtggccaagtgtgtgcaggccagcgccccagcagatgagcgcatctttgactactacagcgccaggaaggccagctttgaagctgaggtgatccaggacaccatcggggacaccgggaagaagccagcctcctggagccagagcccccagaaccaggagatgaggaagcacttcccccagaagttccagctgttcaacaccagccacatgcctgtgctggcccaggatgtgcagtatgagcacagccacctggagggcacagagaaccacagcatggccggggacagcggcatcgacagccccaggacccagagcctgggcagcaacaacagcgtcatcctggatggcctgaagaggcggcagaacttcctgcagaatgtggagggcaccaagagcagccagcccctgaccagcaacagcctgctgcccctgacccctgtgatcaacgtgtag

SEQ ID NO: 47915 - DNA, 2970 bp, Artificial Sequence
  derived and/or modified sequence
atggcccggcccgtgcagctggcccccggcagcctggccctggtgctatgtcgcctcgaggcccagaaagccgcaggcgccgctgaggaacccgggggacgggccgtcttccgagcatttagaagggcaaatgcacgttgtttttggaatgcaaggttggccagggccgcttctagactcgccttccagggatggctccgacggggagtcctattggttcgcgcacctcctgcttgtcttcaggttcttcgggacgcctggcgtcgccgggcactgcgacccccacggggatttcgtatacgggccgttggagacgtctttccagtccagatgaaccccattacccagagtcaattcgtgcccctgggcgaggtgctctgttgtgctatctctgatatgaacaccgcccagatcgtggtaacccaggaatccctgctggagagactgatgaagcactacccaggcattgctataccatccgaagatatactttatacaaccctggggaccctcatcaaggaacggaagatctatcatacgggcgaggggtacttcattgtcaccccacagacctactttattacaaacacaaccactcaggagaacaagcggatgctgccgagcgacgagagcaggctgatgcctgcgtcaatgacatacctggtgtcaatggagagctgtgccgagtccgcacaggagaatgcagctcccatcagccactgccaaagttgtcagtgcttcagggatatgcacacacaggacgtgcaagaggccccggttgcagccgaggttactcgcaaatcgcatcgcggcctgggcgaatctgtctcttgggtccagaatggtgcagtgtctgtctcagctgagcatcacatctgcgagtccactaagccacttccctatactcgtgataaagaaaagggaaaaaagtttgggttttcactcctgtggcgctctctatccaggaaggagaaacctaagacagagcatagttccttttcagcccagtttccaccagaggaatggcccgtgagagatgaagacgacctggacaatattcctagagacgtcgaacacgagatcataaaaaggatcaatccaatccttacagtcgataatctgatcaagcatactgtcctgatgcagaaatacgaagagcaaaaaaagtataatagccagggaacctccactgatatgctgactattggccataagtatcccagcaaagagggcgtgaagaaaagacaggggctctctgcgaagcctcaaggacagggccactcaaggcgcgacagacacaaggcacggaaccagggatcggaatttcagcctgggagcatcagattagaaaaacatccaaagctgcccgccacccagcctatacccagaattaaaagtcccaatgagatggtcggccagaagcctctgggggaaataacaactgttctggggtctcacctgatctataagaagaggatcagtaatccgtttcaggggttaagccacagaggtagcaccatctccaaaggccataagatacagaagactagcgacttaaagccaagtcagaccggtcctaaggaaaagccctttcagaaacctagaagcctcgactcaagtagaatcttcgatggcaaagccaaagagccatacgcggagcaaccaaatgataagatggaagcggagagcatctatatcaacgatcctacggtcaagccaattaacgatgacttccgcggacatttgttctcacacccacaacaatccatgttgcaaaatgatggcaagtgctgtcccttcatggaatctatgttgaggtacgaggtatacgggggcgagaacgaggttatccctgaggtcttgagaaagtcacattcacactttgataagcttggagagaccaaacagactccccattccttgccttcacgcggagcatcgttctccgaccggaccccgagcgcctgcagattagtggataataccattcatcaattccagaacctcggtttgctggactatccagtcggggtgaatccattgcggcaggctgcaagacaagacaaggactccgaggaactgctccgaaagggattcgtgcaggatgccgagactacctccctggaaaatgaacaattgagcaacgacgaccaagcactttaccagaatgaagtagaagacgatgatggagcctgtagctcactctaccttgaggaggacgatattagcgagaacgacgacctgagacagatgctcccaggccattcccagtactcttttacaggcggtagccagggcaatcaccttgggaaacaaaaggtaatcgagcgatccctaacagagtacaatagcactatggagagagtggagagccaggttttgaagagaaatgagtgttataagcccacgggcctgcacgccaccccaggcgagagccaggagcccaacctgtccgcagagtcttgcggcttaaactccggtgcccaatttggattcaattatgaggaggagcccagtgttgccaagtgcgtgcaagcaagcgcgccagcggacgagaggatatttgactattattctgctagaaaagcctcgttcgaggcagaggtcattcaggacaccataggagataccggcaagaagccggcctcctggtcccagtccccacaaaatcaagagatgagaaagcatttccctcagaagttccagctgtttaacacatcccacatgcccgtccttgcccaggacgttcagtatgagcactcacacttggaggggaccgagaaccactccatggccggagactcaggcatagactcccctagaactcagagtctcgggagcaacaacagcgtgattctggatggtctgaagcggcggcaaaattttctacaaaacgtcgaggggacaaaaagttcgcagccactcaccagcaactctctgctgcccctgacaccagttatcaatgtttag

SEQ ID NO: 47916 - DNA, 2970 bp, Artificial Sequence
  derived and/or modified sequence
atggcccggcccgtgcagctggcccccggcagcctggccctggtgttatgtcgtctggaagcccaaaaagctgctggcgctgcagaggaaccagggggcagggctgtctttcgcgccttcaggcgggcaaacgccaggtgcttttggaacgcccgactcgcgcgtgcagcgtccaggctggcttttcagggttggctgaggaggggggtcctcttggtgcgcgctccccctgcatgtctgcaagtgctgcgcgatgcctggcggcggagggccctgaggccacccagaggtttccgtattcgcgccgtgggtgatgtcttcccagtgcagatgaatccgattacccagagccagttcgtgcctcttggcgaagtactatgctgcgccatctcagacatgaatacagcccagatcgtggttactcaggaaagcctgctggagagattaatgaagcactatcctgggatcgctattccttcagaagacattctgtataccactctggggacattaattaaggaaaggaaaatataccataccggtgagggttactttattgttacgccccaaacctactttatcacaaacactacaacccaggagaacaaacgcatgctccccagcgacgaatcccgactgatgccagcctctatgacgtatctggtttcgatggaaagctgcgccgagagcgcccaagagaacgctgcccccatttcacactgtcaatcctgtcagtgttttcgggacatgcatactcaggatgtccaggaagcaccagtcgcagcagaagtcactcggaagagccacagagggctaggcgaaagtgtgagttgggttcaaaacggtgctgtgtcagtctctgccgaacatcacatctgtgaatcaaccaaacctttgccatataccagagataaggagaaaggtaaaaaatttggtttttccctcctatggcgcagtttatccaggaaggagaagccaaagaccgagcactcttccttctcagctcagttccctcctgaggagtggcctgtgcgagacgaggacgacttagacaacatcccaagggacgtggagcatgagatcatcaaaaggatcaatcctatcctgaccgttgataacctgattaaacacacggtgcttatgcagaagtatgaagagcagaaaaagtacaactctcaggggacgtcaacggatatgctgaccattggtcacaaatacccctccaaggagggtgttaagaagcggcagggcttatccgccaagccgcaaggacaagggcacagcaggcgagaccggcacaaggcccgcaatcaaggttctgagtttcagcctggaagcattcggcttgagaagcatccaaaactccccgcgacccagcccatacctcgcatcaagtctcccaacgagatggtcgggcaaaagccactcggcgagatcacgactgtgctgggctcacacctcatttacaaaaagagaatctctaatccttttcaaggactgagccatcgtgggagcaccatcagtaaagggcacaaaatccagaaaacgtcagacttgaagcctagccagaccgggccaaaggagaaaccatttcagaagccacggtccttagactccagcaggattttcgatggaaaggccaaggagccctatgccgagcagcccaacgacaagatggaggcggaaagcatctatatcaacgatcctaccgtgaagccaattaatgacgactttcggggacacctattctcccacccacagcagtcaatgctgcagaatgacggaaagtgttgtcctttcatggagtcaatgctgcgctacgaggtgtatggtggcgagaacgaagtgattccagaagtgcttagaaagagtcactcgcatttcgacaagcttggagaaaccaagcaaacccctcactcactcccgagccgcggggcatctttctctgaccggacgccgtccgcctgccgactcgtcgacaacacaatacatcaattccagaacctgggcctactggattaccccgtgggagtcaatccgctgcgacaggcggcgcggcaagacaaggactctgaagagctgctcaggaagggcttcgtccaggacgccgagacaacttctctggagaatgaacagttgagcaacgacgatcaggccctctaccaaaacgaggtggaggacgacgacggagcctgttcttctctttatctggaagaggatgatatttccgaaaacgatgacctgagacaaatgctaccaggacatagccaatacagtttcacggggggcagccaggggaaccacttgggcaagcagaaagttatagaaaggagtttaacagagtataacagtacaatggagagggttgaatcccaagtgcttaaacgcaacgaatgttacaagcctactggtcttcacgcaaccccaggcgagtctcaggagcccaatcttagcgcagaatcctgcggtctcaatagcggtgcccagttcggatttaattacgaggaagagccaagtgtggctaaatgtgtgcaagcctcggcccctgctgacgagcgcatattcgattactacagtgcccggaaagcctccttcgaagccgaagtaatccaggacactataggcgatactggtaagaagcctgccagctggtcccagtccccccagaatcaggagatgaggaaacatttcccgcagaagttccagctgtttaacaccagccatatgccggttctagcccaagatgtgcagtacgagcactcacacctcgaagggacagaaaatcactcaatggctggggattctggaatcgactcccctaggactcaatccctgggcagtaataactctgttatactcgatggcttaaagcgccgccagaactttcttcagaatgtggagggcaccaaaagcagtcaaccactgacctcgaatagtctgctgcctctaacacctgtaattaacgtgtag

SEQ ID NO: 47917 - DNA, 2640 bp, Artificial Sequence
  derived and/or modified sequence
atgaaccccatcacccagagccagttcgtgcccctgggcgaggtgctctgctgtgcaatttccgatatgaataccgcgcagatagtcgtgacacaggagagtctgctcgaacgcctcatgaagcattaccctggcatcgctatccccagtgaggatattctgtatacaactcttgggacgctgattaaggaacgaaagatctaccacaccggggaaggatacttcattgtgactccccagacctattttatcaccaatacaacgacccaagagaacaagagaatgctgccctccgatgagagtcgcttgatgcctgcaagcatgacatacttggtttctatggagtcttgtgctgagtcagctcaggagaacgcagctcccatttctcactgccaatcctgccagtgcttccgtgatatgcacacccaggatgtgcaggaggctcctgtggccgccgaagtaacgagaaagagccaccgtggcttaggtgaatctgtgagctgggtgcagaacggagctgtaagcgtttcagctgagcatcatatttgtgagtctaccaagccccttccctatacccgcgacaaagaaaagggcaaaaaattcgggttttcactcctgtggcggtctttgtcacgtaaagaaaaaccaaagactgagcactcgtcgtttagtgcacagtttccaccagaggaatggcctgttcgcgacgaggatgatttggataatatccctcgcgacgtggagcatgaaataatcaagcggatcaacccgatcttgacagtggacaatttgatcaagcacacggtccttatgcagaaatatgaggagcagaaaaaatacaactcacaaggtacaagtacagatatgcttacaatcgggcataagtacccgtccaaggaaggggtgaagaaacggcaaggtttgtctgctaagccacagggacaaggtcattcgcgtcgcgataggcacaaggcccgcaatcagggtagtgaattccagcctggttcaattagactagaaaagcaccctaagctcccggccacgcagcccatcccccgcattaaaagccctaatgaaatggtgggacagaagcccctcggggagatcacgaccgttctcggctcccacctaatctataaaaaacgaatatccaacccgtttcaggggttatctcaccgcggtagcaccattagtaaagggcacaagatccagaaaacctccgatcttaaaccgtcgcagaccgggccaaaagaaaagcctttccagaaaccacgctcacttgattcatctcgcatcttcgacggtaaggccaaggaaccctatgctgagcagcctaatgataagatggaagccgagagcatctacatcaatgacccaaccgttaaaccaatcaacgatgacttccgtggccacttgttcagccacccacaacagtccatgctccagaacgacggcaaatgctgtcccttcatggaatctatgctaaggtacgaggtgtacggaggcgagaacgaggtgattcctgaggttctgcgaaaaagccacagccatttcgataagctgggtgaaacaaagcagactccccattctttgcccagtaggggggcctccttctctgaccgaacgccgtcagcctgtagattagtggataacactatccatcagtttcagaacctggggctgctggactaccccgtcggggtgaaccccctaaggcaggcagccaggcaggataaagatagcgaggaactcctcagaaaagggtttgtgcaggacgccgagacaaccagcctagaaaacgagcaactctctaacgatgaccaggcactataccagaacgaagtggaggacgatgacggagcctgttccagcctatatctggaggaggatgacatctcagagaatgacgatctgagacagatgctgcccggacacagccagtacagttttacgggaggcagtcagggcaaccaccttggcaaacagaaagtgatcgagaggtctctgacggaatacaactctactatggagcgcgtcgagagccaagtgctcaaacgcaacgaatgctataaaccaactggacttcacgcgacccccggggagagccaagaaccaaacttgagtgccgaaagctgtggcctgaacagtggagcccagttcggatttaattacgaggaggagccttctgtggccaagtgtgtgcaggcttccgcaccagctgatgaacggatctttgactattactccgctaggaaagcaagctttgaagcggaagtcattcaggacacaatcggcgatactgggaagaaacctgcctcatggtctcagagtccccagaatcaggaaatgcggaaacattttccccagaagttccaactctttaatacttcccacatgccagttctggctcaggatgtacaatacgagcacagtcatctggaaggaacggagaatcattccatggctggggactccggcatcgatagcccccgcactcagtccctgggttctaacaacagtgtaattctggatggactaaagcggcgccaaaactttcttcagaacgtcgagggcaccaaatcctcacagcccctgacgtccaacagcctcctccccctgacgccagtgattaatgtgtag

SEQ ID NO: 47918 - DNA, 2970 bp, Artificial Sequence
  derived and/or modified sequence
atggcgcgtcctgtgcagttagcacccggttctctggcactggtgctgtgtcgtctggaggcccagaaggccgctggagccgcagaggagcccggtgggagagccgtgttccgagcgtttaggagggctaatgcccgatgtttctggaacgcgcgactggcacgggctgccagtaggttggcattccagggctggctgcggcgtggcgtactgctcgtgagagcaccccctgcatgtcttcaggtgctgcgagacgcgtggcgccgtcgggctttgcgaccccctcgcggatttaggattcgcgcagttggggatgttttccccgtgcaaatgaacccaatcactcaatcccagttcgtgccactcggcgaagtactctgttgtgcaattagcgacatgaacactgcccagattgttgtgactcaggagtccctacttgagaggctcatgaagcactaccccggtatcgccattccttctgaagacatactgtacaccactctcggtaccttaattaaggagagaaagatttaccatactggagaaggctactttatcgtgaccccacagacctacttcatcactaatacaaccacccaagagaataaacgcatgctgccctctgatgagagtcgcctaatgcccgctagcatgacctaccttgtgtctatggagtcttgcgctgaatcagcccaggaaaatgcggctccaattagccactgtcagtcctgccagtgctttcgggacatgcacacgcaagacgtgcaagaagctccagtggccgctgaagtgaccaggaaatctcaccgtggcctgggtgagtcagttagctgggtgcagaatggcgcagtctccgtcagtgcggagcaccacatttgcgaaagtacaaaacctctgccctacacccgcgataaggaaaaaggcaaaaaatttggattctcattgctgtggagaagcctaagccgaaaggaaaagcccaagacagaacactccagctttagtgcacagtttccccctgaagaatggccagtgagggatgaggacgacctggacaatattcctcgagatgtagagcacgaaattattaaaaggatcaaccctatcctaacagtggacaacctcatcaagcatacggtgctgatgcagaagtacgaggagcaaaagaagtataactcacagggcacctcaacagacatgttaacaatcggacacaagtacccatccaaagagggagtcaagaagaggcaggggctcagcgcaaagcctcagggccagggccattccagacgtgatcgacacaaagctagaaatcagggatccgagtttcagccaggaagcataaggctggagaagcatcccaagctccctgcaacacagcccattccacggattaagagccctaacgagatggtgggccaaaagcctttaggcgagatcacaactgtgctcggcagtcatcttatatacaagaagcgaatcagcaacccattccagggcttgagccacaggggttcaacaatcagcaaaggtcataaaatccagaagacttctgaccttaaaccctcccagactgggccaaaggagaagcctttccaaaaaccaagaagcttggactcaagccggatcttcgacggcaaagcaaaagaaccatacgccgagcaacccaatgataagatggaggccgagtctatctatatcaatgaccctacagtgaaaccaattaacgatgactttaggggacatcttttctcacatccccagcaaagcatgctccagaatgacggcaaatgctgtccctttatggagtccatgctacgctacgaggtttatggaggggaaaatgaggtgatccccgaggtgctgaggaaaagccattcccactttgataagctcggtgaaaccaaacagacaccccacagcctgcctagcagaggcgcaagtttctcagaccggaccccaagcgcttgtcgcctcgtggataacaccatccaccagttccaaaatctgggcctgctcgactacccagttggggtgaatccactgagacaggctgccaggcaggataaggattccgaagaattgctgaggaaaggattcgtgcaagacgcggagacaacatcactcgagaatgaacaactgtccaatgacgaccaggccctttaccagaatgaggtggaggacgacgacggtgcctgtagctcgctgtaccttgaggaagatgatatttcagagaatgacgacttacgccagatgctgcccggacactctcagtactcttttactggcggatcacagggaaaccacctgggaaagcagaaggtgatcgaacggtctctgactgagtataattcaacaatggaacgcgtagagtctcaggtgttgaaaagaaatgagtgctacaagcctaccgggctgcacgccacgcctggtgagtctcaggaacccaacctgagtgcagagtcctgcggactgaacagcggtgcccaatttggctttaattatgaggaagaaccttcagttgctaagtgcgtacaggcttcagccccagccgatgaaagaatctttgattactacagcgccaggaaggcttcatttgaggctgaggttatccaggataccattggggacacaggcaagaaaccagcttcttggagccagtctcctcagaaccaggagatgagaaagcacttcccccagaagtttcagttgttcaacaccagtcacatgccagtgttagcacaggacgttcagtatgagcacagtcacctcgagggcacggagaaccatagcatggccggtgactctggaatagactccccgaggactcaatctcttgggtccaacaacagcgttattttagatggccttaaacggcgtcagaatttcttgcagaatgtggagggaactaagtcatctcagcccctgacttcaaactccctcctgcccttgaccccagtgatcaacgtgtag

SEQ ID NO: 47919 - DNA, 2970 bp, Artificial Sequence
  derived and/or modified sequence
atggcacgccctgtccagctcgccccaggctcattggccttagtgctgtgtaggctggaggcccaaaaagctgcaggggctgccgaggaaccaggaggcagagcggtgttccgagccttcaggagggctaacgctcgttgtttttggaacgcccgactggctcgcgcagccagccgattagctttccaagggtggctgagacgtggcgttctgcttgtccgcgcacccccagcttgtctccaggtgctgagggatgcctggcgcaggcgagctctccggccaccgaggggctttaggatccgcgctgtaggggacgtcttccctgtgcagatgaaccccatcactcagagccagttcgtcccattgggagaagtgctctgttgtgccatatccgacatgaatactgctcagatcgtggtgacacaagagtctctgctcgagcggctaatgaagcactaccctgggatagcaataccttcagaagacatactgtacaccactctagggacactgatcaaagaacgcaagatttaccataccggagaagggtatttcatcgtgacaccccagacctatttcattaccaacacaaccacccaagaaaataagcggatgctgccctctgatgagagcaggcttatgccggcttcaatgacatatctcgtctccatggagtcatgcgccgagtccgcacaagagaatgccgcacccattagccattgccagtcttgccagtgttttagggatatgcacacgcaagacgtgcaagaggcccctgtggccgcagaggtgactcgcaagtcacacagggggctgggcgagtcagtatcctgggtccagaacggagccgtcagtgtgagcgccgaacatcatatttgcgagagtaccaagccactcccatacacaagggacaaggagaagggaaagaagttcgggttctctttgctttggaggtccttatcaaggaaagagaagccaaaaacggaacactccagcttttccgctcaattccctcctgaggaatggcctgtgcgagacgaggatgacctagataatatcccacgggatgtggagcacgagatcattaaaagaatcaatcccatcctgactgtcgacaaccttattaaacacacagtacttatgcagaaatatgaagaacagaaaaagtacaatagtcaagggacaagcactgacatgctgaccattgggcacaagtacccaagtaaggagggcgtgaaaaagaggcagggcctgtcagctaagccgcagggccaggggcactccaggagggatagacacaaggctcgtaaccaggggagtgaatttcaacccggtagtatccgcctagaaaagcacccgaagctccctgcgacccagcccatcccgcgtatcaagagccccaacgagatggtcggccaaaagccacttggtgagatcaccaccgtcctcggaagtcatctcatctacaaaaagcggataagcaacccatttcagggtctctcgcaccggggatccaccatctcaaaggggcataaaatccagaaaacatctgacctgaaaccctcccagacgggaccaaaagagaagccgttccagaaaccccgatcactcgacagctcccgcattttcgacggaaaagcaaaagagccttacgccgaacagcctaacgacaagatggaggcagagtccatctatattaacgaccccaccgtgaagcccattaacgacgactttagagggcatttgttctctcatccacagcagagcatgctgcagaacgacggaaaatgctgcccatttatggagagtatgttgcgatacgaagtctatggtggagagaatgaagtgatccccgaggtgcttcgtaagagccacagtcatttcgacaagcttggagaaaccaagcagacaccccactctctgcccagccggggtgcctcctttagcgatcggacaccttccgcctgccgccttgttgacaatacaatccaccagtttcagaaccttgggctactggattatcctgtcggcgtaaatccattgcggcaagctgctcgtcaggacaaggactccgaggaactgctccggaagggtttcgtccaagacgcagagacgacatcgctggaaaatgagcagttgtccaatgatgaccaggctctgtaccagaatgaggtcgaggacgacgatggcgcttgttcctctttatatctcgaggaggacgatatatcagagaatgacgacttgcgacagatgctccctggccactcccagtattccttcacagggggatcacagggcaaccatctgggcaagcagaaagtgattgaacggtccctgaccgaatacaactcaactatggaaagggtggaatctcaagtcctcaagcggaatgagtgctacaagcccacgggcctgcacgcgactcccggagaatcacaggagccgaatttgtcagctgagagctgcggcctgaattccggtgcacagtttggcttcaattatgaagaggaaccaagtgttgccaagtgtgttcaggcatccgcacctgctgacgaaagaatctttgactattacagtgccaggaaggctagcttcgaggcagaggttatccaggatacaattggagacacaggcaagaagcctgccagttggagtcagtcccctcaaaaccaggaaatgcgcaaacattttccacagaaattccagctcttcaatacttctcatatgccagtcctggcacaagatgtgcaatatgaacacagccatttggaggggaccgaaaatcattccatggctggagactcaggaatcgactcccccaggacacagtcactagggtccaacaacagcgtaatattggatggcctgaagagacgacagaatttccttcagaacgtagagggcaccaagtcatctcagcctcttacctccaactccctgttgcccttaacaccagttattaatgtctag

SEQ ID NO: 47920 - DNA, 2640 bp, Artificial Sequence
  derived and/or modified sequence
atgaaccccattacgcagtcccaatttgtcccgctgggcgaagtcttatgctgtgctatctctgacatgaatactgcacagattgtcgtaacccaggagtcacttctggagcggctcatgaagcactacccaggtatcgctattccaagcgaggatattctctacacaaccttgggtaccctgattaaggagcggaagatttaccacacgggggagggttacttcattgtcacgccccagacttactttatcaccaacacaactacccaggaaaacaaaagaatgctcccaagcgacgaatcccggctgatgccagctagcatgacttatctggtctccatggaaagctgcgccgagtctgcccaggaaaatgcggcacctatttctcactgccagagttgccagtgcttcagagacatgcacacccaagacgtgcaggaggcacctgtggccgctgaggtcactcggaagagtcataggggcttgggcgaatcagtgagttgggtacaaaacggcgcagtttccgtgagcgccgaacaccacatttgtgagtcaactaaaccattaccctacactcgggacaaggagaaaggaaaaaagttcggcttctctctgctctggcgcagtctgtctagaaaggaaaagcctaagactgagcactctagtttttctgctcaattccctcccgaggaatggcccgtgcgggacgaggacgacctcgacaatatccccagagatgtggagcacgagattatcaaacggattaacccaattctgactgtggataatctgataaagcatacggttctgatgcagaagtatgaggagcagaaaaagtacaattctcaagggactagcaccgacatgttaacaataggccataaataccctagcaaagagggcgtcaagaagagacaagggctgtccgccaaaccacaggggcaaggccattctagacgtgaccgtcataaagctcggaatcagggatctgaatttcaacccggaagtattcgtttggaaaagcatcctaagctaccagccacacagcctatcccaagaatcaagtctcccaacgagatggtcggtcaaaaacccctgggggaaatcaccactgtcctgggatcacatttgatctataagaagcgaatctcaaacccattccaggggctgtcccaccgaggctctaccattagtaaagggcataagatccaaaagacgtccgacctcaagccaagccagacaggacctaaggaaaaacctttccaaaagcccaggtcccttgattcaagcaggattttcgatggtaaagccaaagaaccttatgctgagcagcccaatgataagatggaggccgagagtatctacatcaatgaccccacagtgaaaccaatcaatgatgacttccggggacacttgttcagccatccacagcagtctatgttgcagaacgacggaaagtgctgcccatttatggaatccatgcttaggtacgaggtgtatgggggagagaacgaggttatcccagaagtgctgaggaagagccacagtcattttgacaaactcggcgagactaaacagactccacactcattgcctagtcgcggtgcttcgttttctgatcgcactccaagcgcctgtaggctggtcgacaacacaattcatcagttccagaatttaggactgcttgattaccccgtgggagtcaacccgttgcgtcaagccgcacggcaggataaggacagcgaagagcttcttcggaagggatttgtgcaagacgccgagactacaagcttggaaaatgaacaacttagcaacgacgaccaagccctatatcagaacgaggtggaggacgatgacggagcctgttccagtctgtatcttgaagaagatgacatttccgaaaatgatgatctgcgccagatgttgcccggtcattcccaatactcgttcactggcggttcccagggcaaccacctcggcaagcagaaggtgatcgagcggtctctgacagagtacaactccaccatggagagggtcgagtctcaagtccttaaacggaacgagtgctataaacccactggattgcatgccacaccgggagaatctcaggaacccaacctttctgccgaaagttgtgggctgaacagcggtgcacagttcggctttaactacgaagaagagccgtccgtggcaaaatgtgtgcaggcgtccgctccggctgatgagcgcatattcgactactattccgcacgaaaggcaagcttcgaagccgaggttattcaggacacaattggcgacacaggcaagaagcctgcaagttggagccagtccccgcagaaccaggagatgcggaaacactttccccagaaattccaattgttcaacacctctcacatgcccgtgttagcccaggacgtgcagtacgaacattcacacttagaaggcactgagaatcacagtatggccggtgacagtggcattgactcacccaggacccaatctttgggaagcaacaattctgtaatcctggatggactaaagagacggcagaacttcttgcagaatgttgaaggaaccaagtctagtcagcccctaacctccaattctttgctgcctctgacaccagtgattaatgtctag

SEQ ID NO: 47921 - DNA, 3377 bp, Artificial Sequence
  derived and/or modified sequence
gatcctcccgccgagcgagcggcgtcgtagccgccgcgctcgccgaggccctgcgttgcgggctcccggccgccggcgaaagcatggcccggcccgtgcagctggcgccgggctcgctggcgctagtgctgtgccggctggaggcgcagaaggcggcgggggccgcggaggagcctggtgggcgcgcggtgttccgcgctttccgtcgcgccaacgcgcgctgcttctggaacgcgcggctggcgcgcgccgcctcgcggctggccttccagggctggctgcggcggggggtgctgctggtgcgcgcgccccccgcctgcctgcaggtgctgcgcgatgcctggcggcgccgggccctgcggccgccgcgcggcttccgcatcagggcggtgggtgatgtctttccagtgcaaatgaatccaataactcaatctcagttcgtacctttgggtgaagttctttgctgtgctatatctgatatgaatacagctcagattgtagtaacgcaggaatcacttttggagcgtttgatgaaacattacccaggcattgcaattccatcggaagatattctttataccactctgggaacgctgattaaagaaaggaagatttatcacactggagaaggatacttcatagttactcctcagacttacttcattacaaatacaaccacccaggaaaataagagaatgctgccatcagatgaaagtcgcctgatgccagcttccatgacatatctggtgagcatggagagctgtgcagagtcagcccaagagaatgctgcccccatatcccactgtcagtcttgccagtgtttccgggacatgcacactcaggatgttcaggaagcaccagttgctgcagaagtgactaggaagagtcacagaggtcttggggaatccgtatcttgggtacagaatggggcagtttcagtgtctgcggagcaccacatttgtgagagcaccaaacctttaccatacacaagagataaagaaaaaggcaagaagtttggttttagtctcttatggcgcagcttatctagaaaggagaagcccaaaacagaacacagcagtttctctgctcagttcccacctgaagaatggcccgtccgagatgaagatgacttggacaatatccctcgagatgttgaacatgagataatcaaacgaattaaccccattttgactgttgacaatttaatcaaacacactgtcctaatgcaaaaatacgaagaacagaaaaaatataatagccagggcacttccactgacatgctgacaatcgggcataagtatccttcaaaagagggggttaagaaaaggcagggtctgtctgcaaaacctcaagggcagggccattctcgaagggatagacacaaagccaggaatcagggaagtgagtttcagccaggaagcattagactggagaaacaccccaagctccctgctacacagcccatccccagaattaaaagcccaaatgaaatggtaggtcagaaaccacttggtgagattacaacagtgctaggttcccatttgatttacaaaaagcgaatcagtaatcctttccagggtttgtctcaccgaggaagcacaatatccaaagggcacaaaattcagaagacgagtgatctgaaacccagccagactggaccaaaggaaaagcctttccaaaagcctaggtccttggattcctcaagaatctttgatggtaaagccaaagagccatatgctgaacaacctaatgataaaatggaagcagaatccatttacataaatgaccctactgtcaaacccatcaatgatgacttcagaggtcacctcttcagtcaccctcaacagagcatgttgcaaaatgatggtaaatgctgtccctttatggaaagcatgttgagatatgaagtgtatggtggagaaaatgaggtaattcctgaagtcttgaggaaaagtcattcccactttgacaaattaggggagaccaaacagactccgcatagtctgccatcacgaggtgcctccttttcagaccgaacaccctctgcttgtagattagtggataacacaatacaccagtttcaaaatcttggccttttggattacccagttggcgtgaaccctttaagacaagctgcaagacaagacaaagactcagaagaattattgagaaaaggatttgtccaggatgcagagactacaagcctagaaaatgaacagctttctaacgatgaccaggccttgtatcagaatgaagtggaagatgatgatggtgcctgtagttcattatatctagaggaggatgacatttctgagaatgacgacttacgtcaaatgctgcctggccacagtcagtattccttcacaggtggaagccagggaaatcatttaggaaaacaaaaagtgattgagagatctctgaccgagtacaacagcacaatggagagggttgagtctcaggtgcttaaaagaaatgaatgctacaaacccactgggctgcatgctaccccaggtgaaagccaagaacctaacctctctgctgaaagttgtggcctaaattcaggggcccagtttggttttaactacgaagaagaacccagtgttgctaaatgtgtacaggcctcagcacctgctgatgaaagaatctttgattactatagcgcaagaaaagccagttttgaagctgaagtcatacaagacactattggtgacacaggaaagaagccagctagctggagtcagagtcctcagaatcaggaaatgagaaaacatttcccacaaaagttccaacttttcaacacttcacatatgccagtgttggctcaggatgtccaatatgaacacagtcacttggaagggacagaaaatcacagcatggcaggagatagtggaatagattctccacggacacagagtctgggatctaataattcagtcattttggatggactaaaaagaagacagaattttctgcaaaatgtcgaaggcacaaagagcagtcaaccactcacatctaattccttactaccgctaactccagtcataaacgtttaattttcttttggaaacctacttttttctttataaaaaggtagagcattattacagaatctttcaatcatgtaagaattgagtatataagaattgtctaaaggcaagcatatctatactattaaccacattacacattttgttctaattactggctttttttcctcttttggtgtcttaaggctttttgaagcttattttactgtgagtttattgggagtatatagattattttcgattaaaaagtggaattattggtccccttccaattgtaattatcttgaatttttatacattagtttctcaaatatatagaatgccaattta

SEQ ID NO: 47922 - DNA, 3281 bp, Artificial Sequence
  derived and/or modified sequence
gatcctcccgccgagcgagcggcgtcgtagccgccgcgctcgccgaggccctgcgttgcgggctcccggccgccggcgaaagcatggcccggcccgtgcagctggcgccgggctcgctggcgctagtgctgtgccggctggaggcgcagaaggcggcgggggccgcggaggagcctggtgggcgcgcggtgttccgcgctttccgtcgcgccaacgcgcgctgcttctggaacgcgcggctggcgcgcgccgcctcgcggctggccttccagggctggctgcggcggggggtgctgctggtgcgcgcgccccccgcctgcctgcaggtgctgcgcgatgcctggcggcgccgggccctgcggccgccgcgcggcttccgcatcagggcggtgggtgatgtctttccagtgcaaatgaatccaataactcaatctcagttcgtacctttgggtgaagttctttgctgtgctatatctgatatgaatacagctcagattgtagtaacgcaggaatcacttttggagcgtttgatgaaacattacccaggcattgcaattccatcggaagatattctttataccactctgggaacgctgattaaagaaaggaagatttatcacactggagaaggatacttcatagttactcctcagacttacttcattacaaatacaaccacccaggaaaataagagaatgctgccatcagatgaaagtcgcctgatgccagcttccatgacatatctggtgagcatggagagctgtgcagagtcagcccaagagaatgctgcccccatatcccactgtcagtcttgccagtgtttccgggacatgcacactcaggatgttcaggaagcaccagttgctgcagaagtgactaggaagagtcacagaggtcttggggaatccgtatcttgggtacagaatggggcagtttcagtgtctgcggagcaccacatttgtgagagcaccaaacctttaccatacacaagagataaagaaaaaggcaagaagtttggttttagtctcttatggcgcagcttatctagaaaggagaagcccaaaacagaacacagcagtttctctgctcagttcccacctgaagaatggcccgtccgagatgaagatgacttggacaatatccctcgagatgttgaacatgagataatcaaacgaattaaccccattttgactgttgacaatttaatcaaacacactgtcctaatgcaaaaatacgaagaacagaaaaaatataatagccagggcacttccactgacatgctgacaatcgggcataagtatccttcaaaagagggggttaagaaaaggcagggtctgtctgcaaaacctcaagggcagggccattctcgaagggatagacacaaagccaggaatcagggaagtgagtttcagccaggaagcattagactggagaaacaccccaagctccctgctacacagcccatccccagaattaaaagcccaaatgaaatggtaggtcagaaaccacttggtgagattacaacagtgctaggttcccatttgatttacaaaaagcgaatcagtaatcctttccagggtttgtctcaccgaggaagcacaatatccaaagggcacaaaattcagaagacgagtgatctgaaacccagccagactggaccaaaggaaaagcctttccaaaagcctaggtccttggattcctcaagaatctttgatggtaaagccaaagagccatatgctgaacaacctaatgataaaatggaagcagaatccatttacataaatgaccctactgtcaaacccatcaatgatgacttcagaggtcacctcttcagtcaccctcaacagagcatgttgcaaaatgatggtaaatgctgtccctttatggaaagcatgttgagatatgaagtgtatggtggagaaaatgaggtaattcctgaagtcttgaggaaaagtcattcccactttgacaaattaggggagaccaaacagactccgcatagtctgccatcacgaggtgcctccttttcagaccgaacaccctctgcttgtagattagtggataacacaatacaccagtttcaaaatcttggccttttggattacccagttggcgtgaaccctttaagacaagctgcaagacaagacaaagactcagaagaattattgagaaaaggatttgtccaggatgcagagactacaagcctagaaaatgaacagctttctaacgatgaccaggccttgtatcagaatgaagtggaagatgatgatggtgcctgtagttcattatatctagaggaggatgacatttctgagaatgacgacttacgtcaaatgctgcctggccacagtcagtattccttcacaggtggaagccagggaaatcatttaggaaaacaaaaagtgattgagagatctctgaccgagtacaacagcacaatggagagggttgagtctcaggtgcttaaaagaaatgaatgctacaaacccactgggctgcatgctaccccaggtgaaagccaagaacctaacctctctgctgaaagttgtggcctaaattcaggggcccagtttggttttaactacgaagaagaacccagtgttgctaaatgtgtacaggcctcagcacctgctgatgaaagaatctttgattactatagcgcaagaaaagccagttttgaagctgaagtcatacaagacactattggtgacacaggaaagaagccagctagctggagtcagagtcctcagaatcaggaaatgagaaaacatttcccacaaaagttccaacttttcaacacttcacatatgccagtgttggctcaggatgtccaatatgaacacagtcacttggaagggacagaaaatcacagcatggcaggagatagtggaatagattctccacggacacagagtctgggatctaataattcagtcattttggatggactaaaaagaagacagaattttctgcaaaatgtcgaaggcacaaagagcagtcaaccactcacatctaattccttactaccgctaactccagtcataaacgtttaattttcttttggaaacctacttttttctttataaaaaggagatggggttttgccatgttgcgcaactaatgaagtccatctaattttgccactggatgcattatgacactctccctgttttaaaggaatgtattaaatgaatcaagctcattatgaaaccagtaaaattttctcctatgaaactcatcatataacacagacattaaagatgggaatatgtgcgattaaa

SEQ ID NO: 47923 - DNA, 3111 bp, Artificial Sequence
  derived and/or modified sequence
cttccagggctggctgcggcggggggtgctgctggtgcgcgcgccccccgcctgcctgcaggtgctgcgcgatgcctggcggcgccgggccctgcggccgccgcgcggcttccgcatcagggcggtgggtgatgtctttccagtgcaaatgaatccaataactcaatctcagttcgtacctttgggtgaagttctttgctgtgctatatctgatatgaatacagctcagattgtagtaacgcaggaatcacttttggagcgtttgatgaaacattacccaggcattgcaattccatcggaagatattctttataccactctgggaacgctgattaaagaaaggaagatttatcacactggagaaggatacttcatagttactcctcagacttacttcattacaaatacaaccacccaggaaaataagagaatgctgccatcagatgaaagtcgcctgatgccagcttccatgacatatctggtgagcatggagagctgtgcagagtcagcccaagagaatgctgcccccatatcccactgtcagtcttgccagtgtttccgggacatgcacactcaggatgttcaggaagcaccagttgctgcagaagtgactaggaagagtcacagaggtcttggggaatccgtatcttgggtacagaatggggcagtttcagtgtctgcggagcaccacatttgtgagagcaccaaacctttaccatacacaagagataaagaaaaaggcaagaagtttggttttagtctcttatggcgcagcttatctagaaaggagaagcccaaaacagaacacagcagtttctctgctcagttcccacctgaagaatggcccgtccgagatgaagatgacttggacaatatccctcgagatgttgaacatgagataatcaaacgaattaaccccattttgactgttgacaatttaatcaaacacactgtcctaatgcaaaaatacgaagaacagaaaaaatataatagccagggcacttccactgacatgctgacaatcgggcataagtatccttcaaaagagggggttaagaaaaggcagggtctgtctgcaaaacctcaagggcagggccattctcgaagggatagacacaaagccaggaatcagggaagtgagtttcagccaggaagcattagactggagaaacaccccaagctccctgctacacagcccatccccagaattaaaagcccaaatgaaatggtaggtcagaaaccacttggtgagattacaacagtgctaggttcccatttgatttacaaaaagcgaatcagtaatcctttccagggtttgtctcaccgaggaagcacaatatccaaagggcacaaaattcagaagacgagtgatctgaaacccagccagactggaccaaaggaaaagcctttccaaaagcctaggtccttggattcctcaagaatctttgatggtaaagccaaagagccatatgctgaacaacctaatgataaaatggaagcagaatccatttacataaatgaccctactgtcaaacccatcaatgatgacttcagaggtcacctcttcagtcaccctcaacagagcatgttgcaaaatgatggtaaatgctgtccctttatggaaagcatgttgagatatgaagtgtatggtggagaaaatgaggtaattcctgaagtcttgaggaaaagtcattcccactttgacaaattaggggagaccaaacagactccgcatagtctgccatcacgaggtgcctccttttcagaccgaacaccctctgcttgtagattagtggataacacaatacaccagtttcaaaatcttggccttttggattacccagttggcgtgaaccctttaagacaagctgcaagacaagacaaagactcagaagaattattgagaaaaggatttgtccaggatgcagagactacaagcctagaaaatgaacagctttctaacgatgaccaggccttgtatcagaatgaagtggaagatgatgatggtgcctgtagttcattatatctagaggaggatgacatttctgagaatgacgacttacgtcaaatgctgcctggccacagtcagtattccttcacaggtggaagccagggaaatcatttaggaaaacaaaaagtgattgagagatctctgaccgagtacaacagcacaatggagagggttgagtctcaggtgcttaaaagaaatgaatgctacaaacccactgggctgcatgctaccccaggtgaaagccaagaacctaacctctctgctgaaagttgtggcctaaattcaggggcccagtttggttttaactacgaagaagaacccagtgttgctaaatgtgtacaggcctcagcacctgctgatgaaagaatctttgattactatagcgcaagaaaagccagttttgaagctgaagtcatacaagacactattggtgacacaggaaagaagccagctagctggagtcagagtcctcagaatcaggaaatgagaaaacatttcccacaaaagttccaacttttcaacacttcacatatgccagtgttggctcaggatgtccaatatgaacacagtcacttggaagggacagaaaatcacagcatggcaggagatagtggaatagattctccacggacacagagtctgggatctaataattcagtcattttggatggactaaaaagaagacagaattttctgcaaaatgtcgaaggcacaaagagcagtcaaccactcacatctaattccttactaccgctaactccagtcataaacgtttaattttcttttggaaacctacttttttctttataaaaaggtagagcattattacagaatctttcaatcatgtaagaattgagtatataagaattgtctaaaggcaagcatatctatactattaaccacattacacattttgttctaattactggctttttttcctcttttggtgtcttaaggctttttgaagcttattttactgtgagtttattgggagtatatagattattttcgattaaaaagtggaattattggtccccttccaattgtaattatcttgaatttttatacattagtttctcaaatatatagaatgccaattt

SEQ ID NO: 47924 - protein, 419 aa, Artificial Sequence
  derived and/or modified sequence
MGLLSAPPCTQRITWKGLLLTASLLNFWNPPTTAQVTIEAQPTKVSEGKDVLLLVHNLPQNLTGYIWYKGQIRDLYHYITSYVVDGQIIIYGPAYSGRETIYSNASLLIQNVTQEDAGSYTLHIIMGGDENRGVTGHFTFTLYLETPKPSISSSKLNPREAMEAVSLTCDPETPDASYLWWMNGQSLPMSHRLQLSETNRTLFLLGVTKYTAGPYECEIRNPVSASRSDPFTLNLLPKLPKPYITINNLKPRENKDVLNFTCEPKSENYTYIWWLNGQSLPVSPRVKRPIENRILILPSVTRNETGPYQCEIRDQYGGIRSYPVTLNVLYGPDLPRIYPSFTYYRSGEVLYLSCSADSNPPAQYSWTINGKFQLSGQKLFIPQITTKHSGLYACSVRNSATGKESSKSMTVKVSDWTLP

SEQ ID NO: 47925 - DNA, 1260 bp, Artificial Sequence
  derived and/or modified sequence
atgggtctcctttctgccccaccttgtactcagcgaatcacgtggaaaggactgctcctcactgcctcattactaaatttttggaaccctccaactacggcacaggtgaccatagaagcacagcctaccaaggtgtcagagggaaaagatgttctgctgcttgttcacaatctgccgcagaacttgaccgggtacatatggtacaagggtcagattcgggatctgtatcattacatcactagctatgttgtggatggacagataataatctacgggcccgcttacagtgggagagagacgatttatagtaatgcttcactgctgatccagaatgttacgcaagaagacgccgggtcttacacactccatatcatcatgggcggtgacgagaaccgcggagttacgggtcattttacattcacattgtatttggaaaccccaaaaccctcgattagcagttcaaagctcaaccccagagaggcaatggaagcagtctcgcttacatgcgatcccgagacacctgacgcttcatacctgtggtggatgaatggccaatctttgccgatgtcccaccgattgcagcttagcgagactaatcgaacactatttctgcttggagttacgaagtacaccgctggaccttatgaatgcgaaatccgtaatcctgtcagcgcatcccgatcggacccattcacgctcaacctcctgcccaaattacccaagccatacatcactattaacaacctgaagcctcgcgagaataaggacgtgctcaatttcacgtgtgagccaaaatcggagaactatacatatatttggtggttgaatggtcagtcactgccagtgtcacccagggtgaagcggccaattgaaaacaggatactaatcctaccctcggtgactcggaatgaaaccggcccgtaccagtgcgagatccgagatcagtacggtggcatacgctcctatccggtgacactgaacgtgctgtacggaccagacttgcctcggatttacccttccttcacctactacaggtcaggagaggtcctgtatttgtcatgcagtgctgattcaaacccaccagcccaatacagctggacaattaatgggaagttccagttgagcggccagaagctgtttatcccccaaattactaccaaacacagcggcctgtatgcctgcagcgtacgcaactccgcgaccggcaaagagtcttcaaagtccatgacagtaaaagtatctgattggaccctgccttag

SEQ ID NO: 47926 - DNA, 1260 bp, Artificial Sequence
  derived and/or modified sequence
atgggcctgctgagcgccccaccctgcacccagaggatcacctggaagggcctgctgctgacagccagcctgctgaacttctggaacccccccaccacagcccaggtgaccatcgaggcccagcccaccaaggtgtctgagggcaaggatgtgctgctgctggtgcacaacctgccccagaacctgaccggctacatctggtacaagggccagatccgggacctgtaccactacatcaccagctatgtggtggatggccagatcatcatctacggccctgcctacagcggccgggagaccatctacagcaatgccagcctgctgatccagaatgtgacccaggaggatgctggcagctacaccctgcacatcatcatgggaggagatgagaacagaggagtgacaggccacttcaccttcaccctgtacctggagacccccaagcccagcatcagcagcagcaagctgaacccccgggaggccatggaggccgtgtccctgacctgtgaccctgagaccccagatgccagctacctgtggtggatgaatggccagagcctgcccatgagccaccggctgcagctgtctgagaccaacagaaccctcttcctgctgggcgtgaccaagtacacagctggcccctatgaatgtgagatccggaaccctgtgtctgccagcagaagtgaccccttcaccctgaacctgctgcccaagctgcccaagccctacatcaccatcaacaacctgaagccccgggagaacaaggatgtgctgaacttcacctgtgagcccaagtctgagaactacacctacatctggtggctgaatggccagagcctgcctgtgagcccccgggtgaagaggcccattgaaaatcgcatcctgatcctgcccagcgtgaccagaaatgaaacaggcccctaccagtgtgagatccgggaccagtatggaggcatccgcagctaccctgtgaccctgaatgtgctgtatggccctgacctgccccgcatctaccccagcttcacctactaccgcagcggggaggtgctgtacctgagctgcagcgctgacagcaaccccccagcccagtacagctggaccatcaatggcaagttccagctgagcggccagaagctgttcatcccccagatcaccaccaagcacagcggcctgtatgcctgcagcgtgagaaattctgccaccgggaaggagagcagcaagtccatgacagtgaaggtgtctgactggaccctgccctag

SEQ ID NO: 47927 - DNA, 1260 bp, Artificial Sequence
  derived and/or modified sequence
atgggcctgctgagcgcccccccctgcacccagcggatcacctggaagggactgcttcttacagcttcgctgctaaacttctggaatcctccaaccactgcccaggtgacaatcgaagcgcaaccgacaaaggttagtgaaggaaaggacgtgctgctcctggtccataacctgccccaaaatctcacaggatacatctggtataagggccagatccgcgacttgtatcattacatcacctcgtacgtggtcgacggccaaattattatctatggccccgcctattcagggagggagaccatctatagcaatgcatccctgttaatccaaaacgtcacacaagaagatgccggttcttataccttgcacataatcatggggggagacgagaacaggggggtgacgggccacttcacattcaccctgtatctcgaaacgcccaaaccgagcatctcttcaagcaagctgaatccccgagaggctatggaggctgtgtccctcacctgtgacccagagacccctgacgcttcctacctgtggtggatgaacggacagagccttcctatgagtcacaggttgcagttgtccgagacaaatagaactctcttcttgctaggcgtcactaaatacacagcaggcccctatgaatgcgaaatccgcaatcccgtaagtgcttcccgctccgaccctttcacactaaacctgctccccaagcttcctaaaccctatattaccattaataacctgaagccacgcgagaacaaagacgtgctcaactttacatgcgagccaaagagcgaaaattatacctacatttggtggctcaacggccagtccctacctgttagccccagagttaagaggcccatcgaaaatagaatcctcatcctgccaagcgtgaccagaaatgaaactgggccctaccagtgtgaaatccgggaccagtacggcggcattagatcctatccggtaacactcaacgtcctttacggcccagacctgcctagaatttaccctagcttcacctattatagatctggagaggtgctatatctgagctgcagcgccgatagtaatccccctgcccaatactcatggaccatcaatggcaagtttcagctgagtggccagaagctcttcatcccccagatcaccacaaaacactcggggctgtatgcatgtagtgtgcgaaactctgctacaggcaaggagagttcgaagagcatgacagtgaaagtctcagattggacactgccctag

SEQ ID NO: 47928 - DNA, 1379 bp, Artificial Sequence
  derived and/or modified sequence
cagaaggaggcaggacagcactgctgagagctgtgctcaggaagcttctggatcctaggctcatctccacagaggagaacacacagacagcagagaccatggggctcctctcagcccctccctgcacacagcgcatcacctggaaggggctcctgctcacagcatcacttttaaacttctggaacccacccacgactgcccaagtcacgattgaagcccagccaaccaaagtttctgaggggaaggatgttcttctacttgtccacaatttgccccagaatcttactggctacatctggtacaaagggcaaatcagggacctctaccattacattacatcatatgtagtagacggtcaaataattatatatgggcctgcatacagtggacgagaaacaatatattccaatgcatccctgctgatccagaatgtcacccaggaagacgcaggatcctacaccttacacatcataatgggaggtgatgagaatagaggagtaactggacatttcaccttcaccttatatctggagactcccaagccctccatctccagcagcaaattaaaccccagggaggccatggaggctgtgagcttaacctgtgatcctgagactccggacgcaagctacctgtggtggatgaatggtcagagcctccctatgtctcacaggttgcagttgtctgaaaccaacaggaccctctttctattgggtgtcacaaagtacactgcaggaccctatgaatgtgaaatacggaacccagtgagtgccagccgcagtgacccattcaccctgaatctcctcccgaagctgcccaagccctacatcaccatcaacaacttaaaacccagggagaataaggatgtcttaaacttcacctgtgaacctaagagtgagaactacacctacatttggtggctaaatggtcagagcctcccggtcagtcccagggtaaagcgacccattgaaaacaggatcctcattctacccagtgtcacgagaaatgaaacaggaccctatcaatgtgaaataagggaccaatatggtggcatccgcagttacccagtcaccctgaatgtcctctatggtccagacctccccagaatttacccttcattcacctattaccgttcaggagaagtcctctacttgtcctgttctgcggactctaacccaccggcacagtattcttggacaattaatgggaagtttcagctatcaggacaaaagctctttatcccccaaattactacaaagcatagcgggctctatgcttgctctgttcgtaactcagccactggcaaggaaagctccaaatccatgacagtaaaagtctctgcttatagcagttcaataaactataccgcagtttattga

SEQ ID NO: 47929 - DNA, 2031 bp, Artificial Sequence
  derived and/or modified sequence
agaaggaggcaggacagcactgctgagagctgtgctcaggaagcttctggatcctaggctcatctccacagaggagaacacacagacagcagagaccatggggctcctctcagcccctccctgcacacagcgcatcacctggaaggggctcctgctcacagcatcacttttaaacttctggaacccacccacgactgcccaagtcacgattgaagcccagccaaccaaagtttctgaggggaaggatgttcttctacttgtccacaatttgccccagaatcttactggctacatctggtacaaagggcaaatcagggacctctaccattacattacatcatatgtagtagacggtcaaataattatatatgggcctgcatacagtggacgagaaacaatatattccaatgcatccctgctgatccagaatgtcacccaggaagacgcaggatcctacaccttacacatcataatgggaggtgatgagaatagaggagtaactggacatttcaccttcaccttatatctggagactcccaagccctccatctccagcagcaaattaaaccccagggaggccatggaggctgtgagcttaacctgtgatcctgagactccggacgcaagctacctgtggtggatgaatggtcagagcctccctatgtctcacaggttgcagttgtctgaaaccaacaggaccctctttctattgggtgtcacaaagtacactgcaggaccctatgaatgtgaaatacggaacccagtgagtgccagccgcagtgacccattcaccctgaatctcctcccgaagctgcccaagccctacatcaccatcaacaacttaaaacccagggagaataaggatgtcttaaacttcacctgtgaacctaagagtgagaactacacctacatttggtggctaaatggtcagagcctcccggtcagtcccagggtaaagcgacccattgaaaacaggatcctcattctacccagtgtcacgagaaatgaaacaggaccctatcaatgtgaaataagggaccaatatggtggcatccgcagttacccagtcaccctgaatgtcctctatggtccagacctccccagaatttacccttcattcacctattaccgttcaggagaagtcctctacttgtcctgttctgcggactctaacccaccggcacagtattcttggacaattaatgggaagtttcagctatcaggacaaaagctctttatcccccaaattactacaaagcatagcgggctctatgcttgctctgttcgtaactcagccactggcaaggaaagctccaaatccatgacagtaaaagtctctgactggacattaccctgaattctactagttcctccaattccattttcttccatggaatcgctaagaaaaagacccactctgttccagaagccctataagctggaggtggacaactcaatgtaaatttcatgggaaaacccttgtacctgaagggtgagccactcagaactcactaaaatgttcgacaccataacaacagatgctcaaactgtaaaccaggacaacaagtggatgacttcacactgtggacagtttttcccaagatgtcagaacaagactccccatcatgatgaggctctcacccctcttaactgtccttgctcatgcctgcctctttcacttggcaggataatgcagtcattagaatttcacatgtagtagcttctgagggtaacaatagagtgtcagatatgtcatctcaacccaaacttttacataacatctcagggggaaatgtggctctctccaccttgcatacaggactcccaatagaaatgaacacagagatattgcccgtgtgtttgcagataagatggtttctatgaagaggtaggaaagctgaaattataatagagtcccctttaaatgcacattctgtggatggctctcgccatttcctaagagatacattgtaaaatgtgacagtaatactgattctagcagaataaaacatgtaccacatttgctaatac

SEQ ID NO: 47930 - DNA, 1260 bp, Artificial Sequence
  derived and/or modified sequence
atggggcttctctccgccccaccatgtacccagaggataacctggaaaggcctgctgttaaccgcatcattattgaacttctggaatccccctacgaccgcccaagtgacgattgaagcccagcccaccaaagtaagcgagggtaaggacgtgctgcttttagtgcacaatttgccccagaacctaacagggtatatttggtacaaggggcagattcgagatctttatcactacatcacatcttacgtcgtggacggccaaatcatcatctatggaccagcttattctggcagggaaactatctactctaacgcaagcttgcttatacagaatgtgacccaggaggatgccggatcttataccctgcacattatcatgggcggagacgagaacagaggcgttacaggccatttcacctttaccttgtacctggagacacctaagcctagcatatccagttccaagctaaatccacgagaggcgatggaggcagtcagcttgacatgtgatccagaaacccctgatgcctcatatttgtggtggatgaatggacagtccctgcccatgtcccaccggttgcagctgtctgaaacgaaccgcaccctgttcctcctgggcgtgacaaaatacaccgccggaccatatgagtgcgagatccgcaaccctgtgtcagcttcccggagcgatcctttcacccttaatcttttgcccaaactgcccaaaccatatatcactattaataatctgaagccacgagagaataaggacgtactcaactttacttgtgagccgaaatctgagaattatacttacatatggtggttgaacggccagagcctgcctgtcagcccgagggtcaagagacctattgaaaatagaattcttatattgccgtccgtcactagaaacgagactggcccatatcaatgcgaaattagagaccaatatgggggaatccggtcttatcctgtcaccctgaatgtcttatatgggcctgatttgccgagaatctacccatctttcacatattaccgttcaggggaggtcctgtatttatcttgcagcgccgattcaaaccccccagctcagtattcttggactataaatgggaaattccagctgtctggacaaaagttatttatcccccagattacaaccaagcacagcggcctttatgcctgttccgttcgaaactctgcaacaggcaaagagtcctcaaagtcgatgacggttaaggtctcagattggacgctaccctag

SEQ ID NO: 47931 - DNA, 1260 bp, Artificial Sequence
  derived and/or modified sequence
atgggcctgctgagcgcccccccctgcacccagagaatcacctggaagggcctgctgctgaccgccagcctgctgaacttctggaacccccccaccaccgcccaggtgaccatcgaggcccagcccaccaaggtgagcgagggcaaggacgtgctgctgctggtgcacaacctgccccagaacctgaccggctacatctggtacaagggccagatcagagacctgtaccactacatcaccagctacgtggtggacggccagatcatcatctacggccccgcctacagcggcagagagaccatctacagcaacgccagcctgctgatccagaacgtgacccaggaggacgccggcagctacaccctgcacatcatcatgggcggcgacgagaacagaggcgtgaccggccacttcaccttcaccctgtacctggagacccccaagcccagcatcagcagcagcaagctgaaccccagagaggccatggaggccgtgagcctgacctgcgaccccgagacccccgacgccagctacctgtggtggatgaacggccagagcctgcccatgagccacagactgcagctgagcgagaccaacagaaccctgttcctgctgggcgtgaccaagtacaccgccggcccctacgagtgcgagatcagaaaccccgtgagcgccagcagaagcgaccccttcaccctgaacctgctgcccaagctgcccaagccctacatcaccatcaacaacctgaagcccagagagaacaaggacgtgctgaacttcacctgcgagcccaagagcgagaactacacctacatctggtggctgaacggccagagcctgcccgtgagccccagagtgaagagacccatcgagaacagaatcctgatcctgcccagcgtgaccagaaacgagaccggcccctaccagtgcgagatcagagaccagtacggcggcatcagaagctaccccgtgaccctgaacgtgctgtacggccccgacctgcccagaatctaccccagcttcacctactacagaagcggcgaggtgctgtacctgagctgcagcgccgacagcaacccccccgcccagtacagctggaccatcaacggcaagttccagctgagcggccagaagctgttcatcccccagatcaccaccaagcacagcggcctgtacgcctgcagcgtgagaaacagcgccaccggcaaggagagcagcaagagcatgaccgtgaaggtgagcgactggaccctgccctag

SEQ ID NO: 47932 - protein, 297 aa, Artificial Sequence
  derived and/or modified sequence
MGLLSAPPCTQRITWKGLLLTVETPKPSISSSKLNPREAMEAVSLTCDPETPDASYLWWMNGQSLPMSHRLQLSETNRTLFLLGVTKYTAGPYECEIRNPVSASRSDPFTLNLLPKLPKPYITINNLKPRENKDVLNFTCEPKSENYTYIWWLNGQSLPVSPRVKRPIENRILILPSVTRNETGPYQCEIRDQYGGIRSYPVTLNVLYGPDLPRIYPSFTYYRSGEVLYLSCSADSNPPAQYSWTINGKFQLSGQKLFIPQITTKHSGLYACSVRNSATGKESSKSMTVKVSDWTLP

SEQ ID NO: 47933 - DNA, 894 bp, Artificial Sequence
  derived and/or modified sequence
atgggactactgtctgccccaccatgtactcagcggattacatggaaaggcctgttgttaacggtggagacaccaaaacccagcatttccagctcaaagctcaaccccagggaagcgatggaagcagtgagtcttacttgcgatccagagacaccagacgcgtcttatttatggtggatgaatggccagtctctgccaatgtcacacagacttcagctgagcgagacaaataggaccctttttttactgggggtcaccaaatacaccgctgggccatatgagtgcgagatccgcaaccctgtgtctgcatccagatcagacccctttacgctcaatctgctgcctaagttgcccaagccttatatcacgataaataatctaaagcctcgcgaaaacaaggatgtgttgaacttcacttgtgaaccgaagtcagaaaattacacttacatatggtggctgaacggacaatctcttccagttagccctcgcgtgaaaagacccatcgaaaacaggatcctgattctgcctagtgtcacaagaaacgagaccggcccgtatcagtgtgagataagggaccagtatggagggatcaggtcgtatccagttaccctaaatgtgctttatggccccgacttgcctagaatctatccttcattcacttactatcggagcggcgaagtcctctacctttcatgcagcgccgacagcaacccacccgcgcagtattcgtggactataaatgggaaattccaactctctggccagaagctgttcattcctcagattacgactaaacattctggcttatacgcgtgttcggtgcgaaactctgccacaggtaaagagtcctctaagagcatgactgttaaagtgtcagactggacactaccttag

SEQ ID NO: 47934 - DNA, 894 bp, Artificial Sequence
  derived and/or modified sequence
atgggcctgctgagcgccccaccctgcacccagaggatcacctggaagggcctgctgctgactgtggagacccccaagcccagcatcagcagcagcaagctgaacccccgggaggccatggaggccgtgtccctgacctgtgaccctgagaccccagatgccagctacctgtggtggatgaatggccagagcctgcccatgagccaccggctgcagctgtctgagaccaacagaaccctcttcctgctgggcgtgaccaagtacacagctggcccctatgaatgtgagatccggaaccctgtgtctgccagcagaagtgaccccttcaccctgaacctgctgcccaagctgcccaagccctacatcaccatcaacaacctgaagccccgggagaacaaggatgtgctgaacttcacctgtgagcccaagtctgagaactacacctacatctggtggctgaatggccagagcctgcctgtgagcccccgggtgaagaggcccattgaaaatcgcatcctgatcctgcccagcgtgaccagaaatgaaacaggcccctaccagtgtgagatccgggaccagtatggaggcatccgcagctaccctgtgaccctgaatgtgctgtatggccctgacctgccccgcatctaccccagcttcacctactaccgcagcggggaggtgctgtacctgagctgcagcgctgacagcaaccccccagcccagtacagctggaccatcaatggcaagttccagctgagcggccagaagctgttcatcccccagatcaccaccaagcacagcggcctgtatgcctgcagcgtgagaaattctgccaccgggaaggagagcagcaagtccatgacagtgaaggtgtctgactggaccctgccctag

SEQ ID NO: 47935 - DNA, 894 bp, Artificial Sequence
  derived and/or modified sequence
atgggcctgctgagcgcccccccctgcacccagcggatcacctggaagggcctgctactgaccgttgagacacccaagccatccatcagctctagcaagctgaatcctcgggaggccatggaggcagtttctctgacctgcgacccggaaacccccgacgcaagctatctgtggtggatgaacggccagtcgctgcccatgtctcacaggctgcagctgtcagaaaccaaccggacactcttcctacttggtgtcaccaaatacactgcgggaccttacgagtgtgaaatacgaaaccccgtgagcgcatcacggagcgacccgtttacgctgaacctcctgccaaagctcccgaagccttatattacgatcaacaaccttaagcctagggagaataaagacgtgctcaattttacctgtgaaccgaagagtgagaattatacgtacatctggtggttaaatgggcagtccctgcccgtaagccctagggttaagcgtccaatcgagaaccgaattctcatcttaccctctgtgacccgcaatgaaacaggtccttaccagtgcgaaataagagaccagtatgggggaattcgtagctaccccgtgacactgaatgtcctgtacggtccggatttgccccgcatctacccatcattcacctactatcgatctggagaggtcctttacttgtcctgctctgccgactccaacccccctgctcaatattcctggacaatcaacggcaagttccaattgtccgggcagaaactgttcataccacagattaccacaaagcacagcgggctttacgcctgcagcgtccgaaactctgccacaggaaaggagagcagtaagtctatgactgtgaaggtgagtgactggacattgccatag

SEQ ID NO: 47936 - DNA, 1610 bp, Artificial Sequence
  derived and/or modified sequence
gcactgctgagagctgtgctcaggaagcttctggatcctaggctcatctccacagaggagaacacacagacagcagagaccatggggctcctctcagcccctccctgcacacagcgcatcacctggaaggggctcctgctcacagtggagactcccaagccctccatctccagcagcaaattaaaccccagggaggccatggaggctgtgagcttaacctgtgatcctgagactccggacgcaagctacctgtggtggatgaatggtcagagcctccctatgtctcacaggttgcagttgtctgaaaccaacaggaccctctttctattgggtgtcacaaagtacactgcaggaccctatgaatgtgaaatacggaacccagtgagtgccagccgcagtgacccattcaccctgaatctcctcccgaagctgcccaagccctacatcaccatcaacaacttaaaacccagggagaataaggatgtcttaaacttcacctgtgaacctaagagtgagaactacacctacatttggtggctaaatggtcagagcctcccggtcagtcccagggtaaagcgacccattgaaaacaggatcctcattctacccagtgtcacgagaaatgaaacaggaccctatcaatgtgaaataagggaccaatatggtggcatccgcagttacccagtcaccctgaatgtcctctatggtccagacctccccagaatttacccttcattcacctattaccgttcaggagaagtcctctacttgtcctgttctgcggactctaacccaccggcacagtattcttggacaattaatgggaagtttcagctatcaggacaaaagctctttatcccccaaattactacaaagcatagcgggctctatgcttgctctgttcgtaactcagccactggcaaggaaagctccaaatccatgacagtaaaagtctctgactggacattaccctgaattctactagttcctccaattccattttcttccatggaatcgctaagaaaaagacccactctgttccagaagccctataagctggaggtggacaactcaatgtaaatttcatgggaaaacccttgtacctgaagggtgagccactcagaactcactaaaatgttcgacaccataacaacagatgctcaaactgtaaaccaggacaacaagtggatgacttcacactgtggacagtttttcccaagatgtcagaacaagactccccatcatgatgaggctctcacccctcttaactgtccttgctcatgcctgcctctttcacttggcaggataatgcagtcattagaatttcacatgtagtagcttctgagggtaacaatagagtgtcagatatgtcatctcaacccaaacttttacataacatctcagggggaaatgtggctctctccaccttgcatacaggactcccaatagaaatgaacacagagatattgcccgtgtgtttgcagataagatggtttctatgaagaggtaggaaagctgaaattataatagagtcccctttaaatgcacattctgtggatggctctcgccatttcctaagagatacattgtaaaatgtgacagtaatactg

SEQ ID NO: 47937 - DNA, 894 bp, Artificial Sequence
  derived and/or modified sequence
atggggctgctgtctgccccaccctgcacgcagcggatcacatggaaaggcctcctcttgacagttgagacacctaagccaagcatttcttcaagcaagctgaatcctagagaggcaatggaggctgtgagcctgacttgtgacccagagacgcccgatgcaagctacctttggtggatgaacggccagtcactgcctatgtcccacaggcttcagctgtcagaaacaaataggaccctttttttgcttggtgtgaccaagtacacggctggtccatacgaatgcgagatccggaatccggtttccgcctccaggtctgatccttttacactgaacctcttgccaaagttaccgaaaccctatattaccattaacaacctgaagccccgagagaataaagacgttctcaatttcacatgcgagcctaagagcgagaactacacctatatctggtggctgaacggacaatctctgccagtctctccacgtgtaaaacgtcctatcgagaaccgtatactgattctaccttctgtgacacgaaatgaaaccggcccttatcagtgtgagatcagagatcagtacggcggtattcgcagctaccctgtgactctgaatgtgctctatgggcctgatctacctaggatttacccaagtttcacatattaccgcagcggggaggtgctctatctctcatgctccgcggatagcaacccaccagctcaatactcatggacaataaacgggaaatttcaactgtccggccagaagctgttcattccccagattactactaaacacagcgggctgtatgcttgctctgttcgcaactcagctaccggcaaggagtcttctaaatccatgaccgttaaagtaagtgattggactttgccttag

SEQ ID NO: 47938 - DNA, 894 bp, Artificial Sequence
  derived and/or modified sequence
atgggcctgctgagcgcccccccctgcacccagagaatcacctggaagggcctgctgctgaccgtggagacccccaagcccagcatcagcagcagcaagctgaaccccagagaggccatggaggccgtgagcctgacctgcgaccccgagacccccgacgccagctacctgtggtggatgaacggccagagcctgcccatgagccacagactgcagctgagcgagaccaacagaaccctgttcctgctgggcgtgaccaagtacaccgccggcccctacgagtgcgagatcagaaaccccgtgagcgccagcagaagcgaccccttcaccctgaacctgctgcccaagctgcccaagccctacatcaccatcaacaacctgaagcccagagagaacaaggacgtgctgaacttcacctgcgagcccaagagcgagaactacacctacatctggtggctgaacggccagagcctgcccgtgagccccagagtgaagagacccatcgagaacagaatcctgatcctgcccagcgtgaccagaaacgagaccggcccctaccagtgcgagatcagagaccagtacggcggcatcagaagctaccccgtgaccctgaacgtgctgtacggccccgacctgcccagaatctaccccagcttcacctactacagaagcggcgaggtgctgtacctgagctgcagcgccgacagcaacccccccgcccagtacagctggaccatcaacggcaagttccagctgagcggccagaagctgttcatcccccagatcaccaccaagcacagcggcctgtacgcctgcagcgtgagaaacagcgccaccggcaaggagagcagcaagagcatgaccgtgaaggtgagcgactggaccctgccctag

SEQ ID NO: 47939 - protein, 637 aa, Artificial Sequence
  derived and/or modified sequence
MARRPRHSIYSSDEDDEDFEMCDHDYDGLLPKSGKRHLGKTRWTREEDEKLKKLVEQNGTDDWKVIANYLPNRTDVQCQHRWQKVLNPELIKGPWTKEEDQRVIELVQKYGPKRWSVIAKHLKGRIGKQCRERWHNHLNPEVKKTSWTEEEDRIIYQAHKRLGNRWAEIAKLLPGRTDNAIKNHWNSTMRRKVEQEGYLQESSKASQPAVATSFQKNSHLMGFAQAPPTAQLPATGQPTVNNDYSYYHISEAQNVSSHVPYPVALHVNIVNVPQPAAAAIQRHYNDEDPEKEKRIKELELLLMSTENELKGQQTQNHTCSYPGWHSTTIADHTRPHGDSAPVSCLGEHHSTPSLPADPGSLPEESASPARCMIVHQGTILDNVKNLLEFAETLQFIDSFLNTSSNHENSDLEMPSLTSTPLIGHKLTVTTPFHRDQTVKTQKENTVFRTPAIKRSILESSPRTPTPFKHALAAQEIKYGPLKMLPQTPSHLVEDLQDVIKQESDESGIVAEFQENGPPLLKKIKQEVESPTDKSGNFFCSHHWEGDSLNTQLFTQTSPVADAPNILTSSVLMAPASEDEDNVLKAFTVPKNRSLASPLQPCSSTWEPASCGKMEEQMTSSSQARKYVNAFSARTLVM

SEQ ID NO: 47940 - DNA, 1914 bp, Artificial Sequence
  derived and/or modified sequence
atggccagaagacccagacacagcatctacagcagcgacgaggacgacgaggacttcgagatgtgcgaccacgactacgacggcctgctgcccaagagcggcaagagacacctgggcaagaccagatggaccagagaggaggacgagaagctgaagaagctggtggagcagaacggcaccgacgactggaaggtgatcgccaactacctgcccaacagaaccgacgtgcagtgccagcacagatggcagaaggtgctgaaccccgagctgatcaagggcccctggaccaaggaggaggaccagagagtgatcgagctggtgcagaagtacggccccaagagatggagcgtgatcgccaagcacctgaagggcagaatcggcaagcagtgcagagagagatggcacaaccacctgaaccccgaggtgaagaagaccagctggaccgaggaggaggacagaatcatctaccaggcccacaagagactgggcaacagatgggccgagatcgccaagctgctgcccggcagaaccgacaacgccatcaagaaccactggaacagcaccatgagaagaaaggtggagcaggagggctacctgcaggagagcagcaaggccagccagcccgccgtggccaccagcttccagaagaacagccacctgatgggcttcgcccaggccccccccaccgcccagctgcccgccaccggccagcccaccgtgaacaacgactacagctactaccacatcagcgaggcccagaacgtgagcagccacgtgccctaccccgtggccctgcacgtgaacatcgtgaacgtgccccagcccgccgccgccgccatccagagacactacaacgacgaggaccccgagaaggagaagagaatcaaggagctggagctgctgctgatgagcaccgagaacgagctgaagggccagcagacccagaaccacacctgcagctaccccggctggcacagcaccaccatcgccgaccacaccagaccccacggcgacagcgcccccgtgagctgcctgggcgagcaccacagcacccccagcctgcccgccgaccccggcagcctgcccgaggagagcgccagccccgccagatgcatgatcgtgcaccagggcaccatcctggacaacgtgaagaacctgctggagttcgccgagaccctgcagttcatcgacagcttcctgaacaccagcagcaaccacgagaacagcgacctggagatgcccagcctgaccagcacccccctgatcggccacaagctgaccgtgaccacccccttccacagagaccagaccgtgaagacccagaaggagaacaccgtgttcagaacccccgccatcaagagaagcatcctggagagcagccccagaacccccacccccttcaagcacgccctggccgcccaggagatcaagtacggccccctgaagatgctgccccagacccccagccacctggtggaggacctgcaggacgtgatcaagcaggagagcgacgagagcggcatcgtggccgagttccaggagaacggcccccccctgctgaagaagatcaagcaggaggtggagagccccaccgacaagagcggcaacttcttctgcagccaccactgggagggcgacagcctgaacacccagctgttcacccagaccagccccgtggccgacgcccccaacatcctgaccagcagcgtgctgatggcccccgccagcgaggacgaggacaacgtgctgaaggccttcaccgtgcccaagaacagaagcctggccagccccctgcagccctgcagcagcacctgggagcccgccagctgcggcaagatggaggagcagatgaccagcagcagccaggccagaaagtacgtgaacgccttcagcgccagaaccctggtgatgtag

SEQ ID NO: 47941 - DNA, 1914 bp, Artificial Sequence
  derived and/or modified sequence
atggccaggcgccctaggcatagtatatatagttcagatgaggacgacgaagacttcgaaatgtgcgatcacgactatgatggactcctgccaaagtccggaaaacgtcacctaggcaagacacgctggacaagagaagaggacgaaaagctgaagaagctggttgagcagaacgggaccgacgattggaaggtaattgccaattacctgccgaacagaaccgatgtccagtgtcagcaccggtggcagaaggtgctgaaccccgagttaattaaagggccctggactaaggaggaggatcagcgggtgatagaattggtccaaaaatacgggcccaaacgctggtcagtcatcgctaaacacctgaagggtcggatcggtaaacagtgtagggaacgatggcacaatcatcttaatccggaggtgaagaagacctcctggactgaggaagaagatagaataatataccaagcccacaagagacttggtaaccgctgggccgaaatcgctaagctgctacctggtcggacagataatgctatcaaaaaccactggaactccacgatgcgccgaaaggtggagcaggagggctacctgcaggaatcatcgaaggcttcccagcccgcagttgctactagcttccagaaaaactcacatctgatgggttttgcccaggccccaccaaccgctcagctgccggctactggtcagccaactgttaataatgactactcttactaccacatctccgaagcccagaatgtctctagccacgtgccataccccgtcgcgctgcatgttaacatagtcaacgttcctcagccagcagcagccgctatccagcgccattacaacgatgaggacccagagaaggaaaagcgtatcaaagagctggagctcttgcttatgtctacggagaacgaactgaaaggacagcagacccaaaatcacacctgctcttaccccgggtggcacagcacaacaattgctgaccacacaaggcctcatggtgatagcgcacccgtatcctgccttggagagcatcattctaccccgagccttccagcagacccaggtagcctccctgaggagtccgcaagccctgctcgatgcatgatcgttcaccaggggaccattctcgataatgtaaaaaaccttttagagtttgccgagactcttcagtttatcgattcctttcttaacacatcctccaaccacgagaattctgatcttgaaatgccttctctgacatctacaccactcattggtcacaaattgacggttaccactcccttccatcgtgatcagaccgtaaaaacacagaaggaaaataccgtctttagaacccctgcaatcaagcgctcaattctggagagcagcccccggaccccaacaccctttaagcacgcgctcgctgctcaggaaattaagtacggacctctgaaaatgctcccgcagacgccctcccatctcgtggaggacctccaggatgtgatcaaacaagagagcgatgaaagcgggatcgttgcagaatttcaagaaaacggacctccactactgaagaagatcaagcaggaggttgagagtcccaccgataaatcaggcaacttcttctgttcccatcattgggagggcgactctcttaatacacagttattcacacaaacttccccagtcgcggacgcgcccaatatactgaccagtagcgtgctgatggctcctgcaagcgaagacgaggacaatgtccttaaggctttcactgtgcccaagaatagaagtctcgcgtcccccttacagccctgcagttctacttgggagcctgcgtcatgtgggaagatggaggaacagatgacaagcagctctcaggcaagaaagtacgttaatgctttttctgcgcgcacccttgtgatgtag

SEQ ID NO: 47942 - DNA, 1914 bp, Artificial Sequence
  derived and/or modified sequence
atggcccggcggcccaggcacagcatctacagcagtgatgaagatgatgaagattttgagatgtgtgaccatgactatgatggcctgctgcccaagagcggcaagaggcacctgggcaagacccgctggacccgggaggaggatgagaagctgaagaagctggtggagcagaatggaacagatgactggaaggtgattgccaactacctgcccaacagaacagatgtgcagtgccagcaccgctggcagaaggtgctgaaccctgagctgatcaagggcccctggaccaaggaggaggaccagagggtcatcgagctggtgcagaagtatggccccaagcgctggagcgtcatcgccaagcacctgaagggccgcatcggcaagcagtgccgggagcgctggcacaaccacctgaaccctgaggtgaagaagacctcctggacagaggaggaggaccgcatcatctaccaggcccacaagaggctgggcaaccgctgggccgagatcgccaagctgctgcccggccgcacagacaatgccatcaagaaccactggaacagcaccatgaggaggaaggtggagcaggagggctacctgcaggagagcagcaaggccagccagcctgctgtggccaccagcttccagaagaacagccacctgatgggctttgcccaggccccacccacagcccagctgcctgccaccggccagcccaccgtgaacaatgactacagctactaccacatcagcgaggcccagaatgtgagcagccacgtgccctaccctgtggccctgcacgtgaacatcgtgaatgtgccccagcctgctgctgctgccatccagaggcactacaatgatgaagatcctgagaaggagaagaggatcaaggagctggagctgctgctgatgagcacagaaaatgagctgaagggccagcagacccagaaccacacctgcagctacccaggctggcacagcaccaccatcgctgaccacacccggccccacggggacagcgcccctgtgtcctgcctgggggagcaccacagcacccccagcctgcctgctgaccccggcagcctgcctgaggagagcgccagccctgcccgctgcatgattgtgcaccagggcaccatcctggacaacgtgaagaacctgctggagtttgctgagaccctgcagttcatcgacagcttcctgaacaccagcagcaaccatgaaaattctgacctggagatgcccagcctgaccagcacccccctcatcggccacaagctgactgtgaccacccccttccaccgggaccagacagtgaagacccagaaggaaaatacagtgttccgcaccccagccatcaagaggagcatcctggagagcagccccaggacccccacccccttcaagcacgccctggccgcccaggagatcaagtatggccccctgaagatgctgccccagacccccagccacctggtggaggacctgcaggatgtgatcaagcaggagagtgatgagagcggcatcgtggccgagttccaggagaatggaccacccctgctgaagaagatcaagcaggaggtggagagccccacagacaagagcggcaacttcttctgcagccaccactgggagggggacagcctgaacacccagctgttcacccagaccagccctgtggctgatgcccccaacatcctgaccagctctgtgctgatggccccagcctctgaagatgaagataatgtgctgaaggccttcaccgtgcccaagaacagaagcctggccagccccctgcagccctgcagcagcacctgggagcccgccagctgtgggaagatggaggagcagatgaccagcagcagccaggccaggaaatatgtgaatgccttcagcgcccggaccctggtgatgtag

SEQ ID NO: 47943 - DNA, 1914 bp, Artificial Sequence
  derived and/or modified sequence
atggcccggcggccccggcacagcatctacagcagcgacgaggacgacgaggatttcgaaatgtgtgatcacgactacgatggactgctgccaaaatcaggaaagcggcacctgggcaagactagatggacacgggaagaagacgagaaactcaagaagctcgtggaacagaatggaacggatgactggaaagtaatagccaattatctacctaatcgtaccgacgttcagtgccagcataggtggcagaaagtgttgaaccctgaactgatcaaagggccatggaccaaagaagaggaccaaagagttatcgaactggtacagaagtacggccccaagcggtggagcgtgatcgccaaacatttgaagggtagaatcggcaaacagtgtcgcgaacggtggcacaatcaccttaatcctgaagtcaagaagacctcatggacagaggaggaggatagaataatttaccaggcacacaagaggctcggcaaccgctgggctgagatagccaaactgctacctggtagaacggacaatgctattaagaatcattggaattctaccatgagaaggaaggttgagcaagagggttatcttcaggaatcatcaaaagcatcacagcccgctgtggccacctcctttcagaagaactcgcatctgatgggattcgcccaagcacctcctaccgcccaactacctgcaacaggccagcctacagtcaacaacgactatagttactatcacatctccgaggctcaaaacgtgagctcccacgtgccctatcccgttgctctccacgttaacattgtgaatgtgccccaacctgctgcggccgccatacagaggcactacaacgacgaggatcctgaaaaagagaagcggatcaaagagctggagctattactgatgagtaccgagaacgagttaaagggccagcaaactcagaatcacacctgctcttaccccggctggcatagcaccaccatcgcagaccataccaggccccacggagattccgcccccgtgtcttgtctgggcgagcaccatagtaccccgtctcttcccgcagacccgggcagcctccctgaggaaagtgcttctcccgcaagatgcatgatcgtacaccaggggacaattttggacaacgttaagaatcttctggagttcgccgagacactccagttcatagactcatttctgaatacctcttccaatcatgagaatagcgatctggaaatgccaagccttacttcgacacccctgataggccataagctcacggtgacaacgccttttcaccgcgatcagacagtgaaaacacagaaggaaaatactgttttcagaacccccgctatcaaacgctcaattcttgaatccagtcctcggacccctacacccttcaagcatgccctcgccgctcaggagattaaatatggccctctgaagatgctgccacaaacccccagtcatctggtcgaggatctccaggatgtgataaagcaagaaagtgacgagtcaggtatagtcgccgagttccaggagaatggtcctcccttactgaagaaaatcaagcaggaggtagagtcccctacagataaatctggaaatttcttctgctctcaccactgggagggcgactcgctgaacacacagttattcacacagacttcaccagtcgccgacgctcctaacatccttaccagttctgtgctcatggccccggcatccgaagacgaagacaatgtgttgaaggccttcactgtaccgaaaaataggagtctggcaagccccctccaaccttgctcttccacttgggagcccgcctcctgtggaaagatggaggaacagatgaccagcagttcacaagcccgaaagtacgtgaatgccttcagtgcacgtactctggtgatgtag

SEQ ID NO: 47944 - DNA, 1914 bp, Artificial Sequence
  derived and/or modified sequence
atggccagaagaccccgacatagcatctacagctccgatgaagatgacgaagatttcgaaatgtgcgatcatgactatgatggactgctccccaagtctggtaagcgacacttaggcaagaccaggtggactagggaagaggatgaaaaacttaaaaagcttgttgaacagaatggcaccgacgactggaaggtgatcgccaattacttaccgaacagaacggatgttcagtgccagcatcgctggcaaaaggtgcttaacccggaattgataaaaggaccctggacaaaagaagaggaccaaagggttatcgagcttgttcaaaagtatggtcccaagcggtggtctgtgatcgccaaacatctcaagggccgtattggtaaacagtgcagggagcggtggcacaatcacctcaaccccgaagttaaaaagaccagttggacagaagaagaggacaggataatttatcaagcccataagcgacttggaaaccgttgggcagaaatcgccaaattgcttcccggtaggaccgataacgcaataaaaaaccactggaacagtacaatgcgtcgtaaggtggaacaggaagggtacctccaggagagttctaaagcgagccaaccggcagtagccacctcttttcagaagaacagtcatttgatgggattcgctcaggcgccaccaaccgcgcagctccctgccaccggtcagcctacggtaaacaatgactattcatattaccatatttcagaggctcagaatgtcagttcacacgtgccataccccgtggctctgcacgttaacattgtgaatgttccacagcctgcagcagccgctatccagcgtcattacaacgacgaggaccccgagaaggagaagagaattaaggaactggaattgctactgatgtctaccgaaaacgaactgaaaggccagcagacgcagaaccacacctgctcatatcccggttggcatagcaccacaatagccgaccacaccagacctcacggcgacagtgctcctgttagctgcttaggcgagcatcacagcacgccctccctcccagctgatccaggtagtctccccgaggagtcggcgtctcctgcgcgatgcatgattgtgcaccaaggcaccatcttggacaatgtcaagaacctgttagaattcgccgagacactccagtttatagactcattcttaaacacatcaagtaatcatgaaaactccgatctcgagatgccctctctgacttcaacccccttaatcggacataagctcactgtgaccacgcccttccacagggaccaaaccgtcaagacccagaaggaaaacacggtttttcgtaccccagccatcaaacgctctatcttggagtcctccccgcgtacccccacgccatttaagcacgccctggccgctcaggaaattaaatacggaccactgaagatgttgccacagacaccttcacatttggtggaggacctgcaggatgtgattaagcaagaatccgatgagtctggcatcgtcgccgaatttcaggaaaacggacctccactgctcaaaaagattaagcaggaagtggaatcacccaccgacaagtctggaaatttcttctgtagccaccactgggagggagactcattgaacacccagttgtttacacagactagccccgtcgctgatgctcctaacatccttacctcaagcgtcctcatggccccagccagtgaagatgaggacaatgttcttaaggctttcaccgtacctaagaataggtcgctagcttcccccctgcaaccctgttcctcgacttgggagccggcatcctgtggcaaaatggaagagcaaatgacaagctcttctcaggcaagaaagtacgtcaacgccttttctgccaggacactcgtgatgtag

SEQ ID NO: 47945 - DNA, 3304 bp, Artificial Sequence
  derived and/or modified sequence
aatatcaacctgtttcctcctcctccttctcctcctcctccgtgacctcctcctcctctttctcctgagaaacttcgccccagcggtgcggagcgccgctgcgcagccggggagggacgcaggcaggcggcgggcagcgggaggcggcagcccggtgcggtccccgcggctctcggcggagccccgcgcccgccgcgccatggcccgaagaccccggcacagcatatatagcagtgacgaggatgatgaggactttgagatgtgtgaccatgactatgatgggctgcttcccaagtctggaaagcgtcacttggggaaaacaaggtggacccgggaagaggatgaaaaactgaagaagctggtggaacagaatggaacagatgactggaaagttattgccaattatctcccgaatcgaacagatgtgcagtgccagcaccgatggcagaaagtactaaaccctgagctcatcaagggtccttggaccaaagaagaagatcagagagtgatagagcttgtacagaaatacggtccgaaacgttggtctgttattgccaagcacttaaaggggagaattggaaaacaatgtagggagaggtggcataaccacttgaatccagaagttaagaaaacctcctggacagaagaggaagacagaattatttaccaggcacacaagagactggggaacagatgggcagaaatcgcaaagctactgcctggacgaactgataatgctatcaagaaccactggaattctacaatgcgtcggaaggtcgaacaggaaggttatctgcaggagtcttcaaaagccagccagccagcagtggccacaagcttccagaagaacagtcatttgatgggttttgctcaggctccgcctacagctcaactccctgccactggccagcccactgttaacaacgactattcctattaccacatttctgaagcacaaaatgtctccagtcatgttccataccctgtagcgttacatgtaaatatagtcaatgtccctcagccagctgccgcagccattcagagacactataatgatgaagaccctgagaaggaaaagcgaataaaggaattagaattgctcctaatgtcaaccgagaatgagctaaaaggacagcagacacagaaccacacatgcagctaccccgggtggcacagcaccaccattgccgaccacaccagacctcatggagacagtgcacctgtttcctgtttgggagaacaccactccactccatctctgccagcggatcctggctccctacctgaagaaagcgcctcgccagcaaggtgcatgatcgtccaccagggcaccattctggataatgttaagaacctcttagaatttgcagaaacactccaatttatagattctttcttaaacacttccagtaaccatgaaaactcagacttggaaatgccttctttaacttccacccccctcattggtcacaaattgactgttacaacaccatttcatagagaccagactgtgaaaactcaaaaggaaaatactgtttttagaaccccagctatcaaaaggtcaatcttagaaagctctccaagaactcctacaccattcaaacatgcacttgcagctcaagaaattaaatacggtcccctgaagatgctacctcagacaccctctcatctagtagaagatctgcaggatgtgatcaaacaggaatctgatgaatctggaattgttgctgagtttcaagaaaatggaccacccttactgaagaaaatcaaacaagaggtggaatctccaactgataaatcaggaaacttcttctgctcacaccactgggaaggggacagtctgaatacccaactgttcacgcagacctcgcctgtggcagatgcaccgaatattcttacaagctccgttttaatggcaccagcatcagaagatgaagacaatgttctcaaagcatttacagtacctaaaaacaggtccctggcgagccccttgcagccttgtagcagtacctgggaacctgcatcctgtggaaagatggaggagcagatgacatcttccagtcaagctcgtaaatacgtgaatgcattctcagcccggacgctggtcatgtgagacatttccagaaaagcattatggttttcagaacacttcaagttgacttgggatatatcattcctcaacatgaaacttttcatgaatgggagaagaacctatttttgttgtggtacaacagttgagagcagcaccaagtgcatttagttgaatgaagtcttcttggatttcacccaactaaaaggatttttaaaaataaataacagtcttacctaaattattaggtaatgaattgtagccagttgttaatatcttaatgcagatttttttaaaaaaaacataaaatgatttatctgtattttaaaggatccaacagatcagtattttttcctgtgatgggttttttgaaatttgacacattaaaaggtactccagtatttcacttttctcgatcactaaacatatgcatatatttttaaaaatcagtaaaagcattactctaagtgtagacttaataccatgtgacatttaatccagattgtaaatgctcatttatggttaatgacattgaaggtacatttattgtaccaaaccattttatgagttttctgttagcttgctttaaaaattattactgtaagaaatagttttataaaaaattatatttttattcagtaatttaattttgtaaatgccaaatgaaaaacgttttttgctgctatggtcttagcctgtagacatgctgctagtatcagaggggcagtagagcttggacagaaagaaaagaaacttggtgttaggtaattgactatgcactagtatttcagactttttaattttatatatatatacattttttttccttctgcaatacatttgaaaacttgtttgggagactctgcattttttattgtggtttttttgttattgttggtttatacaagcatgcgttgcacttcttttttgggagatgtgtgttgttgatgttctatgttttgttttgagtgtagcctgactgttttataatttgggagttctgcatttgatccgcatcccctgtggtttctaagtgtatggtctcagaactgttgcatggatcctgtgtttgcaactggggagacagaaactgtggttgatagccagtcactgccttaagaacatttgatgcaagatggccagcactgaacttttgagatatgacggtgtacttactgccttgtagcaaaataaagatgtgcccttattttacct

SEQ ID NO: 47946 - protein, 761 aa, Artificial Sequence
  derived and/or modified sequence
MARRPRHSIYSSDEDDEDFEMCDHDYDGLLPKSGKRHLGKTRWTREEDEKLKKLVEQNGTDDWKVIANYLPNRTDVQCQHRWQKVLNPELIKGPWTKEEDQRVIELVQKYGPKRWSVIAKHLKGRIGKQCRERWHNHLNPEVKKTSWTEEEDRIIYQAHKRLGNRWAEIAKLLPGRTDNAIKNHWNSTMRRKVEQEGYLQESSKASQPAVATSFQKNSHLMGFAQAPPTAQLPATGQPTVNNDYSYYHISEAQNVSSHVPYPVALHVNIVNVPQPAAAAIQRHYNDEDPEKEKRIKELELLLMSTENELKGQQVLPTQNHTCSYPGWHSTTIADHTRPHGDSAPVSCLGEHHSTPSLPADPGSLPEESASPARCMIVHQGTILDNVKNLLEFAETLQFIDSDSSSWCDLSSFEFFEEADFSPSQHHTGKALQLQQREGNGTKPAGEPSPRVNKRMLSESSLDPPKVLPPARHSTIPLVILRKKRGQASPLATGDCSSFIFADVSSSTPKRSPVKSLPFSPSQFLNTSSNHENSDLEMPSLTSTPLIGHKLTVTTPFHRDQTVKTQKENTVFRTPAIKRSILESSPRTPTPFKHALAAQEIKYGPLKMLPQTPSHLVEDLQDVIKQESDESGIVAEFQENGPPLLKKIKQEVESPTDKSGNFFCSHHWEGDSLNTQLFTQTSPVADAPNILTSSVLMAPASEDEDNVLKAFTVPKNRSLASPLQPCSSTWEPASCGKMEEQMTSSSQARKYVNAFSARTLVM

SEQ ID NO: 47947 - protein, 79 aa, Artificial Sequence
  derived and/or modified sequence
MARRPRHSIYSSDEDDEDFEMCDHDYDGLLPKSGKRHLGKTRWTREENRTDVQCQHRWQKVLNPELIKGPWTKEEDQRN

SEQ ID NO: 47948 - protein, 103 aa, Artificial Sequence
  derived and/or modified sequence
MARRPRHSIYSSDEDDEDFEMCDHDYDGLLPKSGKRHLGKTRWTREEDEKLKKLVEQNGTDDWKVIANYLPNRTDVQCQHRWQKVLNPELIKGPWTKEEDQRN

SEQ ID NO: 47949 - DNA, 2286 bp, Artificial Sequence
  derived and/or modified sequence
atggccagaagacccagacacagcatctacagcagcgacgaggacgacgaggacttcgagatgtgcgaccacgactacgacggcctgctgcccaagagcggcaagagacacctgggcaagaccagatggaccagagaggaggacgagaagctgaagaagctggtggagcagaacggcaccgacgactggaaggtgatcgccaactacctgcccaacagaaccgacgtgcagtgccagcacagatggcagaaggtgctgaaccccgagctgatcaagggcccctggaccaaggaggaggaccagagagtgatcgagctggtgcagaagtacggccccaagagatggagcgtgatcgccaagcacctgaagggcagaatcggcaagcagtgcagagagagatggcacaaccacctgaaccccgaggtgaagaagaccagctggaccgaggaggaggacagaatcatctaccaggcccacaagagactgggcaacagatgggccgagatcgccaagctgctgcccggcagaaccgacaacgccatcaagaaccactggaacagcaccatgagaagaaaggtggagcaggagggctacctgcaggagagcagcaaggccagccagcccgccgtggccaccagcttccagaagaacagccacctgatgggcttcgcccaggccccccccaccgcccagctgcccgccaccggccagcccaccgtgaacaacgactacagctactaccacatcagcgaggcccagaacgtgagcagccacgtgccctaccccgtggccctgcacgtgaacatcgtgaacgtgccccagcccgccgccgccgccatccagagacactacaacgacgaggaccccgagaaggagaagagaatcaaggagctggagctgctgctgatgagcaccgagaacgagctgaagggccagcaggtgctgcccacccagaaccacacctgcagctaccccggctggcacagcaccaccatcgccgaccacaccagaccccacggcgacagcgcccccgtgagctgcctgggcgagcaccacagcacccccagcctgcccgccgaccccggcagcctgcccgaggagagcgccagccccgccagatgcatgatcgtgcaccagggcaccatcctggacaacgtgaagaacctgctggagttcgccgagaccctgcagttcatcgacagcgacagcagcagctggtgcgacctgagcagcttcgagttcttcgaggaggccgacttcagccccagccagcaccacaccggcaaggccctgcagctgcagcagagagagggcaacggcaccaagcccgccggcgagcccagccccagagtgaacaagagaatgctgagcgagagcagcctggacccccccaaggtgctgccccccgccagacacagcaccatccccctggtgatcctgagaaagaagagaggccaggccagccccctggccaccggcgactgcagcagcttcatcttcgccgacgtgagcagcagcacccccaagagaagccccgtgaagagcctgcccttcagccccagccagttcctgaacaccagcagcaaccacgagaacagcgacctggagatgcccagcctgaccagcacccccctgatcggccacaagctgaccgtgaccacccccttccacagagaccagaccgtgaagacccagaaggagaacaccgtgttcagaacccccgccatcaagagaagcatcctggagagcagccccagaacccccacccccttcaagcacgccctggccgcccaggagatcaagtacggccccctgaagatgctgccccagacccccagccacctggtggaggacctgcaggacgtgatcaagcaggagagcgacgagagcggcatcgtggccgagttccaggagaacggcccccccctgctgaagaagatcaagcaggaggtggagagccccaccgacaagagcggcaacttcttctgcagccaccactgggagggcgacagcctgaacacccagctgttcacccagaccagccccgtggccgacgcccccaacatcctgaccagcagcgtgctgatggcccccgccagcgaggacgaggacaacgtgctgaaggccttcaccgtgcccaagaacagaagcctggccagccccctgcagccctgcagcagcacctgggagcccgccagctgcggcaagatggaggagcagatgaccagcagcagccaggccagaaagtacgtgaacgccttcagcgccagaaccctggtgatgtag

SEQ ID NO: 47950 - DNA, 2286 bp, Artificial Sequence
  derived and/or modified sequence
atggcgagacgaccacgtcattcaatttattccagtgacgaagacgacgaagacttcgaaatgtgcgatcatgactatgacggcttgctgccgaaaagcgggaagagacatctgggaaaaaccaggtggactcgcgaagaagacgagaagctcaagaaactcgtggaacagaatggaacagatgattggaaagtgatcgccaattatctcccaaaccgcacagatgtgcagtgccaacatagatggcagaaggttctgaacccagagctcattaaaggaccttggactaaagaggaggaccagcgggtgattgagctggtgcagaagtatggccccaaacgatggagcgtcatcgctaagcatctaaagggcaggattggaaagcagtgcagggagcgctggcacaatcaccttaacccggaagtaaagaaaacttcctggaccgaggaggaagaccggattatctatcaggctcataagaggctaggtaaccgctgggctgaaattgccaaattgctgcccggccgcacagataacgcaattaagaaccactggaatagtacgatgcgccgtaaagtggaacaggagggctatctgcaagagagctcaaaggcgtcacaaccagccgtggccacctctttccagaaaaacagtcacctcatgggctttgctcaggcacctcctactgcacagctgccggccacagggcagcccacagtaaacaatgattactcctattatcatatatccgaagcacagaacgtgtcctcacatgtcccgtatccagtggcactgcacgtgaatattgtaaatgtccctcagccggctgcagctgccatacagcgacattacaacgatgaggacccggaaaaggaaaaacgcatcaaagaactggaacttttgttgatgagcacagagaatgaactgaaaggccagcaggtgctgcccacccagaatcacacctgtagctatccaggctggcattctacaaccattgctgaccatactcgaccccacggggacagcgctcccgtcagttgccttggcgagcaccactcaaccccaagtctgcctgccgatccaggatccctgccggaagagagtgccagtccagctcgatgtatgattgtgcaccagggcactatcctggataacgtgaaaaatttactggagtttgcagaaactcttcagttcatcgatagcgactcctcaagctggtgtgatctctcatctttcgaattcttcgaggaggctgacttcagcccgtctcagcatcacaccggcaaagctctgcagctgcagcagcgggagggtaacgggactaaaccagcaggtgaaccgagccctcgtgtgaataaacgcatgctctcagagtcttcactggacccgcccaaggttcttccgcccgctcggcactctactataccattggtcattcttaggaagaagaggggccaggcctcaccacttgccactggggactgcagctccttcatcttcgctgatgtcagtagcagcacacccaagcgatcgcccgtgaagagtctccctttctctcccagccaattcctgaacacttcttccaaccacgagaactctgatctcgagatgccttctctaacatccacacctcttatcggccacaaactcactgttactacaccctttcaccgagaccagacagtgaagacacagaaagagaatacagttttccgaactccagccatcaagcggtctatcctcgaatccagtccccgcactccaactccctttaagcatgccctggctgcacaggaaattaagtatgggccgctaaagatgttacctcagacacctagccatctggtggaggatctgcaggatgtgatcaaacaggagtcagacgagagtggcattgtcgcggagttccaggaaaacgggccccctctcctcaaaaagatcaagcaggaagtggagtcccctactgataaaagcggcaactttttctgttcccaccactgggaaggagactctctgaatactcagctctttacccagactagtcccgtggccgacgctccaaatatcctgacctctagtgtcttgatggcgcctgcttccgaggacgaggataacgtgctcaaagctttcacggtgccgaaaaacaggagcctggctagtcctctccagccttgctcttctacttgggaacccgcatcctgtggaaagatggaggaacagatgactagctctagccaggcccgaaaatatgtcaacgcgttctctgcccgcactcttgtaatgtag

SEQ ID NO: 47951 - DNA, 2286 bp, Artificial Sequence
  derived and/or modified sequence
atggcccggcggcccaggcacagcatctacagcagtgatgaagatgatgaagattttgagatgtgtgaccatgactatgatggcctgctgcccaagagcggcaagaggcacctgggcaagacccgctggacccgggaggaggatgagaagctgaagaagctggtggagcagaatggaacagatgactggaaggtgattgccaactacctgcccaacagaacagatgtgcagtgccagcaccgctggcagaaggtgctgaaccctgagctgatcaagggcccctggaccaaggaggaggaccagagggtcatcgagctggtgcagaagtatggccccaagcgctggagcgtcatcgccaagcacctgaagggccgcatcggcaagcagtgccgggagcgctggcacaaccacctgaaccctgaggtgaagaagacctcctggacagaggaggaggaccgcatcatctaccaggcccacaagaggctgggcaaccgctgggccgagatcgccaagctgctgcccggccgcacagacaatgccatcaagaaccactggaacagcaccatgaggaggaaggtggagcaggagggctacctgcaggagagcagcaaggccagccagcctgctgtggccaccagcttccagaagaacagccacctgatgggctttgcccaggccccacccacagcccagctgcctgccaccggccagcccaccgtgaacaatgactacagctactaccacatcagcgaggcccagaatgtgagcagccacgtgccctaccctgtggccctgcacgtgaacatcgtgaatgtgccccagcctgctgctgctgccatccagaggcactacaatgatgaagatcctgagaaggagaagaggatcaaggagctggagctgctgctgatgagcacagaaaatgagctgaagggccagcaggtgctgcccacccagaaccacacctgcagctacccaggctggcacagcaccaccatcgctgaccacacccggccccatggagacagcgcccctgtgtcctgcctgggggagcaccacagcacccccagcctgcctgctgaccccggcagcctgcctgaggagagcgccagccctgcccgctgcatgattgtgcaccagggcaccatcctggacaacgtgaagaacctgctggagtttgctgagaccctgcagttcatcgacagcgacagcagctcctggtgtgacctgagcagctttgagttctttgaggaggccgacttcagccccagccagcaccacacaggcaaggccctgcagctgcagcagcgggagggcaatggcaccaagccagctggggagcccagcccccgggtgaacaagaggatgctgtctgagagcagcctggacccccccaaggtgctgcccccagcccggcacagcaccatccccctggtgatcctgaggaagaagaggggccaggccagccccctggccaccggggactgcagcagcttcatctttgctgatgtgagcagcagcacccccaagaggagccctgtgaagagcctgcccttcagccccagccagttcctgaacaccagcagcaaccatgaaaattctgacctggagatgcccagcctgaccagcacccccctcatcggccacaagctgactgtgaccacccccttccaccgggaccagacagtgaagacccagaaggaaaatacagtgttccgcaccccagccatcaagaggagcatcctggagagcagccccaggacccccacccccttcaagcacgccctggccgcccaggagatcaagtatggccccctgaagatgctgccccagacccccagccacctggtggaggacctgcaggatgtgatcaagcaggagagtgatgagagcggcatcgtggccgagttccaggagaatggaccacccctgctgaagaagatcaagcaggaggtggagagccccacagacaagagcggcaacttcttctgcagccaccactgggagggggacagcctgaacacccagctgttcacccagaccagccctgtggctgatgcccccaacatcctgaccagctctgtgctgatggccccagcctctgaagatgaagataatgtgctgaaggccttcaccgtgcccaagaacagaagcctggccagccccctgcagccctgcagcagcacctgggagcccgccagctgtgggaagatggaggagcagatgaccagcagcagccaggccaggaaatatgtgaatgccttcagcgcccggaccctggtgatgtag

SEQ ID NO: 47952 - DNA, 2286 bp, Artificial Sequence
  derived and/or modified sequence
atggcccggcggccccggcacagcatctacagcagcgacgaggacgatgaggactttgagatgtgcgaccacgattacgacggcctgctgccaaaaagcggcaagcggcacctaggcaaaaccagatggacacgggaggaggacgagaaattgaaaaaattagttgaacagaatggtacagatgattggaaagtaatagcaaattacctacccaatcgtacagatgttcagtgccaacaccgctggcagaaggtgttgaaccctgaactcatcaaaggcccatggaccaaagaggaagaccagcgcgtaatagaattggtccagaagtatgggcctaaacggtggagtgttatcgctaaacacctgaagggccgaatcggaaagcagtgtcgggaacggtggcataaccaccttaatcccgaggttaagaagacctcgtggactgaggaggaggaccgaattatctatcaggctcataagcgcttagggaataggtgggcagaaatagccaagctgctgcccgggaggactgataacgccattaagaaccactggaattctaccatgcgcagaaaagtagagcaggagggctatctccaggagagctctaaggcaagtcagccggcagtggcaaccagcttccagaagaactcacatctaatggggttcgcccaggcacctccaactgcccagcttcccgctacagggcagccaacagtaaataacgattatagctactaccacatctcagaggcacagaacgtctccagccatgtaccgtatcctgtggcactgcatgttaatattgtgaacgttccccagcctgctgccgccgctatccaaaggcactataatgacgaggatcctgagaaggagaaacggatcaaggaactggagctgctgttgatgagtacagaaaacgaactcaagggccagcaagtccttccaacccagaaccacacttgctcttatccaggctggcactctacaaccatagccgaccacacacggccacatggcgattcagcccccgtgtcttgtctcggcgagcatcattccacgccaagtctgcccgcagacccgggtagcctccctgaggaatccgcctcaccagccaggtgtatgattgttcatcaaggcacaattctggataacgttaaaaatcttttagaattcgccgaaaccctgcagtttattgattcggacagctcctcctggtgcgacctgtcctccttcgagttcttcgaggaggctgacttcagcccttctcagcatcacaccggcaaggcccttcagttgcaacagcgtgaagggaacgggacgaagccagctggtgaaccctctcctcgcgtcaacaaacgaatgctgtcagagtcttctcttgatccccctaaggtgctgcccccagcacggcatagcaccattcctctggtgattttgcgcaagaagagagggcaagcgtcccctctcgctaccggcgactgctcaagctttattttcgccgatgtgtcctcttctaccccaaagcgctcgccagtaaaatcactacccttttcgcccagccagtttctaaacactagttctaaccacgagaactcagatctcgagatgccctcactcacctcgacccctctcatcggccacaagcttacagttacaactcctttccacagagaccaaaccgtaaaaacgcaaaaggagaataccgtcttccgcacccccgcgatcaaacgcagcatactggagtcatctccccggactcctaccccctttaagcacgcactagctgcccaagagattaaatacggcccactcaagatgttgccccagacaccctcgcacctcgttgaagacctgcaggacgtgataaaacaggagtccgacgaaagcggtattgtagctgaatttcaggaaaatgggccgcccctgctgaagaagattaagcaagaagttgagtctcccaccgataagtcagggaactttttctgttctcatcattgggagggagattcgttaaacacacaactattcacccagacttctcccgtcgctgacgctcccaacatcctaacttcctcagtgctcatggcgccagcctccgaagacgaggataacgtcttgaaagcctttacagtgccgaaaaaccgctctctggcctccccgctgcagccatgttcttccacttgggaacccgctagctgcggaaaaatggaagagcagatgacatctagcagtcaggcaagaaaatacgtaaatgcattctcagccagaactttagtgatgtag

SEQ ID NO: 47953 - DNA, 2286 bp, Artificial Sequence
  derived and/or modified sequence
atggcccgtcggcctcgacattcaatatatagtagcgacgaggacgatgaagacttcgaaatgtgcgaccacgattacgacggcttactccccaaaagtggcaagcggcacctcgggaagaccagatggaccagagaggaagacgagaaattaaagaagctggtggaacagaacggcacagacgactggaaagtgattgccaattatctgccgaatagaactgacgtgcaatgccagcaccgctggcagaaagtcctaaacccagaactgataaaagggccttggacaaaagaggaagatcaacgggtgatcgaattggtccagaagtatggtcctaagaggtggagtgtcattgcaaaacatctgaaaggacgcatcggaaagcagtgtcgcgagaggtggcacaaccacctgaaccctgaagtcaagaaaacttcctggacagaagaggaagaccgaattatttaccaggcccataagagactgggaaaccgctgggcagaaatcgcaaaacttctgcccggtcggaccgacaacgccatcaagaatcactggaattcaacaatgcggaggaaagtagagcaggagggttatttgcaggaatcctcaaaggcttctcaacctgctgttgccacttcattccagaaaaattctcatctgatgggattcgcgcaggcaccaccaaccgctcagctgccagccactggccagcccacagtcaacaatgactactcctactatcacatctccgaagctcagaacgtgagtagccacgtcccgtatcccgtggcgcttcacgtgaatatcgtgaacgttccacagccagctgctgctgccatacagcggcattacaacgacgaagatcctgagaaagagaaacggattaaagagttagagctgcttcttatgtctaccgagaacgagttaaagggacagcaggtgctgccaacacagaaccatacatgcagctaccccggttggcactccaccacaatcgcagatcacaccaggcctcacggtgactctgccccagtgagttgcctgggcgagcatcacagcacaccaagtctcccggcagaccccggaagcctgcctgaggagtccgctagccccgcacggtgcatgatcgtccatcaggggaccatcctggataatgttaagaacctgctggagtttgccgagacattgcaatttatagattctgattcatcctcctggtgtgacctatctagttttgaattttttgaagaggcagacttctccccaagtcagcaccatactggcaaggcattgcagctacagcagcgcgaaggaaacggtactaagcccgctggcgagccatctcctcgtgtaaacaagcgcatgctgtcagaaagcagtctcgatcctcccaaagtcctgccgcctgcccgacacagcaccatcccattggtgatcctgcgcaagaagagaggacaggctagtccacttgccacgggagattgttctagcttcatctttgccgacgtgtcctcatctacccctaagagatcacccgttaagtctttacccttctccccctcacagtttttgaacacatctagcaatcacgagaactccgacttggagatgccttcactgacctctactccactgatcggacataagctgacagtgacaaccccctttcatagggatcagacggtgaaaacacagaaagagaacactgtgtttagaacccccgcaattaaacgatcaattctggagagctctcccaggactcccaccccctttaagcacgccctggcagcccaggagattaaatacggccctctaaagatgctgccccaaactccttcccatttggttgaggatcttcaggatgtgataaagcaagagtccgatgaaagtggcattgtcgctgaattccaggaaaatggcccaccactcttaaaaaagataaaacaggaggtcgaaagccccaccgacaagtccgggaatttcttctgtagccaccactgggaaggcgacagtctaaatacccagttgttcactcagacctcacctgtcgcggacgcaccaaacattctaacgtctagtgttttgatggcccctgcttccgaggacgaggacaatgtacttaaggccttcaccgtccctaaaaacaggtcactggcctcacccttgcagccatgttcgtcaacttgggaacccgcatcctgcggcaagatggaggagcagatgacaagtagctcacaggctaggaaatatgtcaatgccttcagcgctaggaccttggtgatgtag

SEQ ID NO: 47954 - DNA, 3672 bp, Artificial Sequence
  derived and/or modified sequence
aatatcaacctgtttcctcctcctccttctcctcctcctccgtgacctcctcctcctctttctcctgagaaacttcgccccagcggtgcggagcgccgctgcgcagccggggagggacgcaggcaggcggcgggcagcgggaggcggcagcccggtgcggtccccgcggctctcggcggagccccgcgcccgccgcgccatggcccgaagaccccggcacagcatatatagcagtgacgaggatgatgaggactttgagatgtgtgaccatgactatgatgggctgcttcccaagtctggaaagcgtcacttggggaaaacaaggtggacccgggaagaggatgaaaaactgaagaagctggtggaacagaatggaacagatgactggaaagttattgccaattatctcccgaatcgaacagatgtgcagtgccagcaccgatggcagaaagtactaaaccctgagctcatcaagggtccttggaccaaagaagaagatcagagagtgatagagcttgtacagaaatacggtccgaaacgttggtctgttattgccaagcacttaaaggggagaattggaaaacaatgtagggagaggtggcataaccacttgaatccagaagttaagaaaacctcctggacagaagaggaagacagaattatttaccaggcacacaagagactggggaacagatgggcagaaatcgcaaagctactgcctggacgaactgataatgctatcaagaaccactggaattctacaatgcgtcggaaggtcgaacaggaaggttatctgcaggagtcttcaaaagccagccagccagcagtggccacaagcttccagaagaacagtcatttgatgggttttgctcaggctccgcctacagctcaactccctgccactggccagcccactgttaacaacgactattcctattaccacatttctgaagcacaaaatgtctccagtcatgttccataccctgtagcgttacatgtaaatatagtcaatgtccctcagccagctgccgcagccattcagagacactataatgatgaagaccctgagaaggaaaagcgaataaaggaattagaattgctcctaatgtcaaccgagaatgagctaaaaggacagcaggtgctaccaacacagaaccacacatgcagctaccccgggtggcacagcaccaccattgccgaccacaccagacctcatggagacagtgcacctgtttcctgtttgggagaacaccactccactccatctctgccagcggatcctggctccctacctgaagaaagcgcctcgccagcaaggtgcatgatcgtccaccagggcaccattctggataatgttaagaacctcttagaatttgcagaaacactccaatttatagattctgattcttcatcatggtgtgatctcagcagttttgaattctttgaagaagcagatttttcacctagccaacatcacacaggcaaagccctacagcttcagcaaagagagggcaatgggactaaacctgcaggagaacctagcccaagggtgaacaaacgtatgttgagtgagagttcacttgacccacccaaggtcttacctcctgcaaggcacagcacaattccactggtcatccttcgaaaaaaacggggccaggccagccccttagccactggagactgtagctccttcatatttgctgacgtcagcagttcaactcccaagcgttcccctgtcaaaagcctacccttctctccctcgcagttcttaaacacttccagtaaccatgaaaactcagacttggaaatgccttctttaacttccacccccctcattggtcacaaattgactgttacaacaccatttcatagagaccagactgtgaaaactcaaaaggaaaatactgtttttagaaccccagctatcaaaaggtcaatcttagaaagctctccaagaactcctacaccattcaaacatgcacttgcagctcaagaaattaaatacggtcccctgaagatgctacctcagacaccctctcatctagtagaagatctgcaggatgtgatcaaacaggaatctgatgaatctggaattgttgctgagtttcaagaaaatggaccacccttactgaagaaaatcaaacaagaggtggaatctccaactgataaatcaggaaacttcttctgctcacaccactgggaaggggacagtctgaatacccaactgttcacgcagacctcgcctgtggcagatgcaccgaatattcttacaagctccgttttaatggcaccagcatcagaagatgaagacaatgttctcaaagcatttacagtacctaaaaacaggtccctggcgagccccttgcagccttgtagcagtacctgggaacctgcatcctgtggaaagatggaggagcagatgacatcttccagtcaagctcgtaaatacgtgaatgcattctcagcccggacgctggtcatgtgagacatttccagaaaagcattatggttttcagaacacttcaagttgacttgggatatatcattcctcaacatgaaacttttcatgaatgggagaagaacctatttttgttgtggtacaacagttgagagcagcaccaagtgcatttagttgaatgaagtcttcttggatttcacccaactaaaaggatttttaaaaataaataacagtcttacctaaattattaggtaatgaattgtagccagttgttaatatcttaatgcagatttttttaaaaaaaacataaaatgatttatctgtattttaaaggatccaacagatcagtattttttcctgtgatgggttttttgaaatttgacacattaaaaggtactccagtatttcacttttctcgatcactaaacatatgcatatatttttaaaaatcagtaaaagcattactctaagtgtagacttaataccatgtgacatttaatccagattgtaaatgctcatttatggttaatgacattgaaggtacatttattgtaccaaaccattttatgagttttctgttagcttgctttaaaaattattactgtaagaaatagttttataaaaaattatatttttattcagtaatttaattttgtaaatgccaaatgaaaaacgttttttgctgctatggtcttagcctgtagacatgctgctagtatcagaggggcagtagagcttggacagaaagaaaagaaacttggtgttaggtaattgactatgcactagtatttcagactttttaattttatatatatatacattttttttccttctgcaatacatttgaaaacttgtttgggagactctgcattttttattgtggtttttttgttattgttggtttatacaagcatgcgttgcacttcttttttgggagatgtgtgttgttgatgttctatgttttgttttgagtgtagcctgactgttttataatttgggagttctgcatttgatccgcatcccctgtggtttctaagtgtatggtctcagaactgttgcatggatcctgtgtttgcaactggggagacagaaactgtggttgatagccagtcactgccttaagaacatttgatgcaagatggccagcactgaacttttgagatatgacggtgtacttactgccttgtagcaaaataaagatgtgcccttatttt

SEQ ID NO: 47955 - protein, 331 aa, Artificial Sequence
  derived and/or modified sequence
MQRLQVVLGHLRGPADSGWMPQAAPCLSGAPQASAADVVVVHGRRTAICRAGRGGFKDTTPDELLSAVMTAVLKDVNLRPEQLGDICVGNVLQPGAGAIMARIAQFLSDIPETVPLSTVNRQCSSGLQAVASIAGGIRNGSYDIGMACGITSENVAERFGISREKQDTFALASQQKAARAQSKGCFQAEIVPVTTTVHDDKGTKRSITVTQDEGIRPSTTMEGLAKLKPAFKKDGSTTAGLTVSDVDIFEINEAFASQAAYCVEKLRLPPEKVNPLGGAVALGHPLGCTGARQVITLLNELKRRGKRAYGVVSMCIGTGMGAAAVFEYPGN

SEQ ID NO: 47956 - DNA, 462 bp, Artificial Sequence
  derived and/or modified sequence
atgcagcgcctccaggtggtcctaggacacctccgaggaccagccgacagtggatggatgccccaggcagccccttgcctcagcggagctccacaggcgtctgccgccgacgtggtagtggtgcacgggcgacgcacggctatttgtcgggccgggaggggggggttcaaggacacaacccctgatgaactgctctctgctgtgatgaccgcagtgctcaaggacgtgaatttgagacccgagcagcttggcgatatctgcgttggcaacgtcctgcaaccgggcgctggcgccattatggccaggatcgcgcagttcctgtctgatatcccagagacggtgccgctgagcactgtgaaccgacagtgttcctccgggctgcaggccgtcgcatccatcgccggctggtccccatgcccgtggcttaccgaaggaaccctggagattttgctgcgagcctag

SEQ ID NO: 47957 - DNA, 996 bp, Artificial Sequence
  derived and/or modified sequence
atgcagcgactacaggtagtgcttggacacctccggggcccagccgattctggatggatgccccaggccgctccatgcctatccggagccccgcaagccagcgccgcagatgttgttgtggttcacggtcggcgcactgctatatgtcgagctggccgggggggattcaaggatacaacaccagatgagcttctgtccgctgtgatgacggccgtcctgaaagacgtgaatttacggcccgaacaattgggtgatatttgcgtgggaaacgttctccagcctggggccggggccattatggccaggatagctcagttcttgtctgacatacctgagacagtccccctgagcactgtgaatagacagtgcagctccggcctgcaggccgtggcaagcattgcaggaggcatcagaaacggatcctatgatatcggcatggcttgcggaatcaccagtgagaacgtggctgagcgattcggcataagtagggaaaaacaagacacatttgccctggctagccaacagaaggccgctcgggcccaaagtaaaggctgtttccaggctgagattgtacccgtgacgaccaccgtgcacgacgataaaggaaccaagcgctccattacagtaacacaagatgaggggattcgacctagcactaccatggagggtctggccaaactgaaacccgcctttaagaaggacgggtccaccaccgccggactcacagtaagcgacgtagacatctttgaaatcaacgaggcctttgcttcacaggccgcctactgtgtcgaaaagcttcgcttgcctccagagaaagtaaatccactgggaggagctgtcgccctcggccaccccctgggatgcacaggggccagacaggtgatcactctcttaaacgagcttaagagacgaggtaagagagcctatggggtggtgtctatgtgcattggcacagggatgggggccgccgcagtctttgagtaccctggtaattag

SEQ ID NO: 47958 - DNA, 462 bp, Artificial Sequence
  derived and/or modified sequence
atgcagaggctgcaggtggtgctgggccacctgcggggccctgctgacagcggctggatgccccaggccgccccctgcctgagcggggccccccaggccagcgctgctgatgtggtggtggtgcacggccgcaggacagccatctgcagagctggccggggcggcttcaaggacaccaccccagatgagctgctgtctgctgtgatgacagctgtgctgaaggatgtgaacctgcggcctgagcagctgggggacatctgtgtgggcaatgtgctgcagcccggggccggggccatcatggccagaattgcccagttcctgagtgacatccctgagaccgtgcccctgagcacagtgaaccggcagtgcagcagcggcctgcaggccgtggccagcattgctggctggagcccctgcccctggctgacagagggcaccctggagatcctgctgcgggcctag

SEQ ID NO: 47959 - DNA, 996 bp, Artificial Sequence
  derived and/or modified sequence
atgcagaggctgcaggtggtgctgggccacctgcggggccctgctgacagcggctggatgccccaggccgccccctgcctgagcggggccccccaggccagcgctgctgatgtggtggtggtgcacggccgcaggacagccatctgcagagctggccggggcggcttcaaggacaccaccccagatgagctgctgtctgctgtgatgacagctgtgctgaaggatgtgaacctgcggcctgagcagctgggggacatctgtgtgggcaatgtgctgcagcccggggccggggccatcatggccagaattgcccagttcctgagtgacatccctgagaccgtgcccctgagcacagtgaaccggcagtgcagcagcggcctgcaggccgtggccagcattgctgggggcatcagaaatggcagctatgacatcggcatggcctgtggcatcaccagtgaaaatgtggccgagagatttggcatcagccgggagaagcaggacacctttgccctggccagccagcagaaggccgcccgggcccagagcaagggctgcttccaggccgagatcgtgcctgtgaccaccaccgtgcatgatgacaagggcaccaagaggagcatcaccgtgacccaggatgagggcatccggcccagcaccaccatggagggcctggccaagctgaagccagccttcaagaaggatggcagcaccacagctggcctgactgtgtctgatgtggacatctttgagatcaatgaggcctttgccagccaggccgcctactgtgtggagaagctgcggctgcccccagagaaggtgaaccccctgggcggcgctgtggccctgggccaccccctgggctgcacaggagcccggcaggtgatcaccctgctgaatgagctgaagagaagaggcaagagggcctatggagtggtgtccatgtgcatcggcaccggcatgggcgctgctgctgtgtttgagtacccaggcaactag

SEQ ID NO: 47960 - DNA, 462 bp, Artificial Sequence
  derived and/or modified sequence
atgcagcggctgcaggtggtgctgggccacctgcggggccccgccgacagcgggtggatgccgcaggccgccccatgtttatcaggtgccccgcaagctagcgctgccgacgtggtggtcgtccatggcagaaggactgcgatttgccgcgccggtaggggaggttttaaggataccacccccgacgagctcctgtccgccgtcatgacagcggttctcaaagatgtgaacctgcgcccagagcagctcggcgacatctgcgttggtaacgtgctacaaccaggagccggcgcaatcatggctagaatcgctcagtttctgtctgatatacctgagactgtccccctgagcactgttaataggcaatgtagctctggcctgcaggccgttgcctccatagcagggtggtccccttgtccctggctgaccgagggtacactcgaaatacttctaagggcctag

SEQ ID NO: 47961 - DNA, 996 bp, Artificial Sequence
  derived and/or modified sequence
atgcagcggctgcaggtggtgctgggccacctgcggggccccgccgactcaggttggatgccccaggccgccccatgcctttcaggcgcgcctcaggcgagcgctgctgatgtcgtggtggttcacggaaggaggaccgccatttgccgcgcaggacgcggaggttttaaggatacaacaccagacgagctgctgtccgcagttatgacagcagtcctcaaggatgtgaacctgagacccgagcagctaggagacatatgcgtagggaatgtgctccagccaggcgcaggggctataatggcccgtattgcccagtttctttccgacatcccggagaccgtccccctgtccacagtgaaccgccagtgcagttctggactgcaggccgtggcttccatcgctggtggaataagaaacggttcctacgacatcggtatggcttgcggaatcaccagtgagaacgtggccgaacggtttggcataagcagagagaagcaggacacctttgcacttgcatctcagcaaaaagccgcacgtgcccagagtaagggctgcttccaggctgagatcgtccctgtcacgactactgtgcatgacgataaagggaccaaaagatccataacggttacacaggacgagggaatccggccgtctaccaccatggagggcctggccaagctgaagccggcgtttaaaaaagatggcagcactacagccggacttactgtcagtgatgtcgatatctttgagatcaacgaggcatttgcctcccaggccgcttattgcgtggagaagttaagactgcctccagaaaaggttaaccccctgggaggcgctgtcgcactgggccaccctctgggctgcaccggagcccgccaggtgataacactgttaaacgaactaaagcgccgtgggaagcgggcatacggagtggtcagcatgtgcataggcacgggaatgggcgccgccgccgtcttcgagtacccgggaaactag

SEQ ID NO: 47962 - DNA, 462 bp, Artificial Sequence
  derived and/or modified sequence
atgcagagactgcaggttgtcctcgggcacttgcgaggccctgccgacagtgggtggatgccacaggcagccccttgtttgagcggagctccacaggcctcggccgctgatgttgtggtggtgcacggcaggcggaccgcgatatgcagagccggtaggggaggatttaaggatactactccagatgaactgctctccgccgtgatgacagcggtattgaaggatgtaaaccttagacccgagcagttgggggatatatgcgtggggaacgtgcttcagccaggcgcaggtgccattatggctaggattgcgcagttcctttctgatatccccgaaacagtcccgttatccacagttaatagacagtgcagttccgggctgcaggcagtggccagcattgctgggtggtcaccttgcccttggcttaccgaaggtaccctcgaaatccttctgcgggcatag

SEQ ID NO: 47963 - DNA, 996 bp, Artificial Sequence
  derived and/or modified sequence
atgcaacgactgcaagtggtcctcggtcatctgaggggccctgcagacagcggctggatgccccaggcagctccttgcctctcaggcgcaccgcaggccagcgccgctgatgtagtcgtggtgcacggcaggagaactgccatctgtagggccggtagaggaggattcaaggataccaccccggatgaactgctgtctgccgttatgactgccgtgctgaaggatgtaaacctcaggccagagcaattgggtgatatctgtgtgggtaatgtgctgcagcccggagctggtgctatcatggcgcgaatcgctcaatttctctccgacattcccgaaaccgtgcccctgtctacagtgaaccgtcagtgttcatccggccttcaagccgtcgcgagcatcgccggtggtatccgaaacgggagctacgatataggtatggcctgcggcatcacgagcgagaatgtcgctgagcgctttggtataagtcgtgaaaaacaggatacattcgctctcgccagccaacaaaaggccgcaagggcacaatcgaagggatgttttcaggcagagattgtgcccgtcacaaccacagtgcatgacgacaaaggtacaaaacgcagcatcactgttacccaggatgagggtatacggccatcaacaactatggaaggcttagccaaactgaagcccgcattcaaaaaggatggcagcacaaccgcagggcttacagtttccgatgtggacatatttgagattaacgaagctttcgcgagccaagcggcatattgtgtggagaaactccggctccctccagaaaaagtgaaccccttgggtggggctgtcgcattggggcaccctttggggtgcactggcgctagacaggtgataacactgcttaacgagctgaaacgcaggggcaaacgggcatacggggtggttagtatgtgtatcgggacaggaatgggagcagcagccgtcttcgagtaccctgggaactag

SEQ ID NO: 47964 - DNA, 1009 bp, Artificial Sequence
  derived and/or modified sequence
gttaactccgcggtcagttcccggactggtggctggtctgcagggttgacctgcgcaatgcagaggctgcaggtagtgctgggccacctgaggggtccggccgattccggctggatgccgcaggccgcgccttgcctgagcggtgccccgcaggcctcggccgcggacgtggtggtggtgcacgggcggcgcacggccatctgccgggcgggccgcggcggcttcaaggacaccacccccgacgagcttctctcggcagtcatgaccgcggttctcaaggacgtgaatctgaggccggaacagctgggggacatctgtgtcggaaatgtgctgcagcctggggccggggcaatcatggcccgaatcgcccagtttctgagtgacatcccggagactgtgcctttgtccactgtcaatagacagtgttcgtcggggctacaggcagtggccagcatagcagggtggagtccatgtccctggctgacagagggaaccctggaaatattacttcgcgcttgatggagaaggagaaggccagagattgcctgattcctatggggataacctctgagaatgtggctgagcggtttggcatttcacgggagaagcaggatacctttgccctggcttcccagcagaaggcagcaagagcccagagcaagggctgtttccaagctgagattgtgcctgtgaccaccacggtccatgatgacaagggcaccaagaggagcatcactgtgacccaggatgagggtatccgccccagcaccaccatggagggcctggccaaactgaagcctgccttcaagaaagatggttctaccacagctggtgagactggtccggggtaggggtatgagaaagcaggccatggccatgctgggtgctgtactctgggaacctggaatagaccaggcccctctgcaaagtagaagtgggagggctgggatctcctcatccccaccccgatgccttcttaccccaacagtttgcccctaggaaactctag

SEQ ID NO: 47965 - DNA, 1268 bp, Artificial Sequence
  derived and/or modified sequence
aatgcagaggctgcaggtagtgctgggccacctgaggggtccggccgattccggctggatgccgcaggccgcgccttgcctgagcggtgccccgcaggcctcggccgcggacgtggtggtggtgcacgggcggcgcacggccatctgccgggcgggccgcggcggcttcaaggacaccacccccgacgagcttctctcggcagtcatgaccgcggttctcaaggacgtgaatctgaggccggaacagctgggggacatctgtgtcgatcaacatggagtttcttatgtcttccttttctacatacacacggaaatgtgctgcagcctggggccggggcaatcatggcccgaatcgcccagtttctgagtgacatcccggagactgtgcctttgtccactgtcaatagacagtgttcgtcggggctacaggcagtggccagcatagcagggtggagtccatgtccctggctgacagagggaaccctggaaatattacttcgcgcttgatggagaaggagaaggccagagattgcctgattcctatggggataacctctgagaatgtggctgagcggtttggcatttcacgggagaagcaggatacctttgccctggcttcccagcagaaggcagcaagagcccagagcaagggctgtttccaagctgagattgtgcctgtgaccaccacggtccatgatgacaagggcaccaagaggagcatcactgtgacccaggatgagggtatccgccccagcaccaccatggagggcctggccaaactgaagcctgccttcaagaaagatggttctaccacagctggtgagactggtccggggtaggggtatgagaaagcaggccatggccatgctgggtgctgtactctgggaacctggaatagaccaggcccctctgcaaagtagaagtgggagggctgggatctcctcatccccaccccgatgccttcttaccccaacagtttgcccctaggaaactctagccaggtgagtgatggggcagctgccatcctgctggcccggaggtccaaggcagaagagttgggccttcccatccttggggtcctgaggtcttatgcagtggttggggtcccacctgacatcatgggcattggacctgcctatgccatcccagtagctttgcaaaaagcaggtaaggtggctccttcatatagtatctgggtcccacctggatcctgcagctgccctgcatgctgttgccaggggcatgagggtggtcctgtgggtgctgca

SEQ ID NO: 47966 - DNA, 1540 bp, Artificial Sequence
  derived and/or modified sequence
gggttcccaggccgactctccttgtggttggctgaggctggaggtggacgggacttttggagggtcgctcgcgtctgttcgcagagctgtgggcggagttgaggccttggaggctgagatgtggttctgcgcgtgtgcggacggctgtctgttaactccgcggtcagttcccggactggtggctggtctgcagggttgacctgcgcaatgcagaggctgcaggtagtgctgggccacctgaggggtccggccgattccggctggatgccgcaggccgcgccttgcctgagcggtgccccgcaggcctcggccgcggacgtggtggtggtgcacgggcggcgcacggccatctgccgggcgggccgcggcggcttcaaggacaccacccccgacgagcttctctcggcagtcatgaccgcggttctcaaggacgtgaatctgaggccggaacagctgggggacatctgtgtcggaaatgtgctgcagcctggggccggggcaatcatggcccgaatcgcccagtttctgagtgacatcccggagactgtgcctttgtccactgtcaatagacagtgttcgtcggggctacaggcagtggccagcatagcaggtggcatcagaaatgggtcttatgacattggcatggcctgtgggataacctctgagaatgtggctgagcggtttggcatttcacgggagaagcaggatacctttgccctggcttcccagcagaaggcagcaagagcccagagcaagggctgtttccaagctgagattgtgcctgtgaccaccacggtccatgatgacaagggcaccaagaggagcatcactgtgacccaggatgagggtatccgccccagcaccaccatggagggcctggccaaactgaagcctgccttcaagaaagatggttctaccacagctgggctgacagtgagtgacgtggacatcttcgagatcaatgaggcctttgcaagccaggctgcctactgtgtggagaagctacgactcccccctgagaaggtgaaccccctggggggtgcagtggccttagggcacccactgggctgcactggggcacgacaggtcatcacgctgctcaatgagctgaagcgccgtgggaagagggcatacggagtggtgtccatgtgcatcgggactggaatgggagccgctgccgtctttgaataccctgggaactgagtgaggtcccaggctggaggcgctacgcagacagtcctgctgctctagcagcaaggcagtaacaccacaaaagcaaaaccacatgggaaaactcagcactggtggtggtggcagtggacagatcaaggcacttcaactcatttggaaaatgtgaacactgatgacatggtataggagtgggtggggtgttgagccacccatcagaccctctttagctgtgcaagataaaagcagcctgggtcacccaggccacaaggccatggttaattcttaaggcaaggcaaatccatggatgagaagtgcaatgggcatagtaaaagtgcatgaatttatctta

SEQ ID NO: 47967 - DNA, 462 bp, Artificial Sequence
  derived and/or modified sequence
atgcagagactgcaggtggtgctgggccacctgagaggccccgccgacagcggctggatgccccaggccgccccctgcctgagcggcgccccccaggccagcgccgccgacgtggtggtggtgcacggcagaagaaccgccatctgcagagccggcagaggcggcttcaaggacaccacccccgacgagctgctgagcgccgtgatgaccgccgtgctgaaggacgtgaacctgagacccgagcagctgggcgacatctgcgtgggcaacgtgctgcagcccggcgccggcgccatcatggccagaatcgcccagttcctgagcgacatccccgagaccgtgcccctgagcaccgtgaacagacagtgcagcagcggcctgcaggccgtggccagcatcgccggctggagcccctgcccctggctgaccgagggcaccctggagatcctgctgagagcctag

SEQ ID NO: 47968 - DNA, 996 bp, Artificial Sequence
  derived and/or modified sequence
atgcagagactgcaggtggtgctgggccacctgagaggccccgccgacagcggctggatgccccaggccgccccctgcctgagcggcgccccccaggccagcgccgccgacgtggtggtggtgcacggcagaagaaccgccatctgcagagccggcagaggcggcttcaaggacaccacccccgacgagctgctgagcgccgtgatgaccgccgtgctgaaggacgtgaacctgagacccgagcagctgggcgacatctgcgtgggcaacgtgctgcagcccggcgccggcgccatcatggccagaatcgcccagttcctgagcgacatccccgagaccgtgcccctgagcaccgtgaacagacagtgcagcagcggcctgcaggccgtggccagcatcgccggcggcatcagaaacggcagctacgacatcggcatggcctgcggcatcaccagcgagaacgtggccgagagattcggcatcagcagagagaagcaggacaccttcgccctggccagccagcagaaggccgccagagcccagagcaagggctgcttccaggccgagatcgtgcccgtgaccaccaccgtgcacgacgacaagggcaccaagagaagcatcaccgtgacccaggacgagggcatcagacccagcaccaccatggagggcctggccaagctgaagcccgccttcaagaaggacggcagcaccaccgccggcctgaccgtgagcgacgtggacatcttcgagatcaacgaggccttcgccagccaggccgcctactgcgtggagaagctgagactgccccccgagaaggtgaaccccctgggcggcgccgtggccctgggccaccccctgggctgcaccggcgccagacaggtgatcaccctgctgaacgagctgaagagaagaggcaagagagcctacggcgtggtgagcatgtgcatcggcaccggcatgggcgccgccgccgtgttcgagtaccccggcaactag

SEQ ID NO: 47969 - protein, 279 aa, Artificial Sequence
  derived and/or modified sequence
MFRAPCHRLRARGTRKARAGAWRGCTFPCLGKGMERPAAREPHGPDALRRFQGLLLDRRGRLHGQVLRLREVARRLERLRRRSLVANVAGSSLSATGALAAIVGLSLSPVTLGTSLLVSAVGLGVATAGGAVTITSDLSLIFCNSRELRRVQEIAATCQDQMREILSCLEFFCRWQGCGDRQLLQCGRNASIALYNSVYFIVFFGSRGFLIPRRAEGDTKVSQAVLKAKIQKLAESLESCTGALDELSEQLESRVQLCTKSSRGHDLKISADQRAGLFF

SEQ ID NO: 47970 - DNA, 840 bp, Artificial Sequence
  derived and/or modified sequence
atgtttcgagctccctgtcacagactgagggctcggggtactaggaaagctagagcaggggcctggcgtggatgcacgtttccctgtctggggaaaggaatggagcgacccgcagctcgggaaccacatggccctgacgctctgagacgctttcagggactcctgctggatcgccggggcagactgcacggccaggtactgcgcttgcgcgaagtagcccgtaggctggaacgtctcagacgtcgatcactggtggcaaatgtcgccgggtctagcctgtcggcgacgggcgccctcgccgcaatcgttggtctcagcctgagcccggtaacattgggcacctctctgctggtgtctgcagtcggtctgggtgtggccacggccggtggagccgtgaccatcaccagcgatctgtcccttatcttttgcaactccagggagctaagaagggtgcaggagatcgccgccacatgtcaggatcagatgagagaaatcctgagctgtctggagttcttctgccgatggcaggggtgcggggaccgacagctgttgcaatgtggaaggaacgcttccatcgctctctacaattcagtgtatttcattgtctttttcggaagccggggattcctaattcctaggcgagccgagggtgacacaaaagtgtcccaggctgtgttgaaggcgaagattcagaaattagcggaaagcctggagagttgcaccggggcacttgacgagttaagcgagcagcttgaatctcgggttcagctgtgtaccaagtcatcccgaggtcatgacctgaagataagcgctgatcaacgtgcaggcctgtttttttag

SEQ ID NO: 47971 - DNA, 840 bp, Artificial Sequence
  derived and/or modified sequence
atgttccgggccccctgccaccggctgcgggcccggggcaccaggaaggcccgggccggggcctggaggggctgcaccttcccctgcctgggcaagggcatggagaggcctgctgcccgggagccccacggcccagatgccctgcggcgcttccagggcctgctgctggaccggcggggccgcctgcacggccaggtgctgcggctgcgggaggtggcccggcggctggagcggctgcggcggcgcagcctggtggccaacgtggccggcagcagcctgagcgccaccggggccctggccgccatcgtgggcctgagcctgagccctgtgaccctgggcaccagcctgctggtgtctgctgtgggcctgggcgtggccacagctgggggcgctgtgaccatcaccagtgacctgagcctcatcttctgcaacagccgggagctgcggcgggtgcaggagattgctgccacctgccaggaccagatgagggagatcctgagctgcctggagttcttctgccgctggcagggctgtggggaccggcagctgctgcagtgtggcagaaatgccagcatcgccctgtacaacagcgtgtacttcatcgtgttcttcggcagccggggcttcctgatccccaggagagctgagggggacaccaaggtgtcccaggccgtgctgaaggccaagatccagaagctggccgagagcctggagagctgcacaggagccctggatgagctgtctgagcagctggagagccgggtgcagctgtgcaccaagagcagccggggccatgacctgaagatctctgctgaccagagagctggcctcttcttctag

SEQ ID NO: 47972 - DNA, 840 bp, Artificial Sequence
  derived and/or modified sequence
atgttccgggccccctgccaccggctgcgggcccggggcacccggaaagccagggccggcgcttggcgcggatgcacttttccatgcctggggaaagggatggaacggcctgccgctcgggaaccccacgggcccgacgctctccgccgctttcagggcctcctcctggatcgaagaggcagactccatgggcaggtgctccggctacgggaggtggcgcggcgccttgaacgcctgaggaggcgttctctcgtggctaatgtggccggctcctctctgtccgctaccggagctctggcagcaattgtggggctgagtctctcacccgtgaccttgggaacatccctcctggtctccgccgttggcctcggtgttgccaccgccgggggggcagtgacgattacctccgacttgtcgctcatcttttgtaactctcgcgagctgcgaagagtgcaggaaatagcagcaacatgtcaggaccagatgcgggagatcctctcctgtcttgaattcttttgtcgatggcagggctgcggggacagacagttactgcagtgcggacgtaacgcaagcattgcattgtacaacagcgtgtacttcattgtattttttggatccagaggctttctcatcccaaggcgggcagagggcgacaccaaggtgtctcaggccgtacttaaggcaaagatacagaagctcgccgagtccctggagtcctgtacgggcgctctcgacgagctgagtgagcagctggagtctagggtgcagctgtgcacaaagtccagtcgaggacacgatctgaagattagtgcagaccagcgggccggactgtttttttag

SEQ ID NO: 47973 - DNA, 840 bp, Artificial Sequence
  derived and/or modified sequence
atgtttcgagccccatgtcaccggttaagagcgaggggtacgcgcaaggccagggccggtgcctggaggggttgcacattcccctgtctgggtaaaggaatggaaagacctgctgcaagagagccacacggcccagatgccctgagacggttccaaggattgctgctggaccgacggggtcgactccatggccaagtcctgcgcttgcgggaagtagccaggagactggagcggctaaggcgtaggtctctggtggctaacgtcgcaggtagcagcctctccgccacgggagccttagcagctatagttggcctgagtctgagtcccgtgacgttgggtaccagcctgctggtctccgccgtgggtctcggagttgctacagccggtggggcagtaactattactagcgacctgagtttaatcttctgcaactcccgggaacttcgcagagtccaggagattgcagctacctgtcaagaccagatgcgcgagatcctgtcatgcttagaatttttttgtaggtggcaaggctgtggggatcgacagctcctccagtgcgggaggaacgccagcatcgccctctataactccgtgtattttatcgtcttttttggctcccgaggctttctgatacccagacgagccgagggcgacaccaaagtaagccaggccgtcctcaaggccaaaattcaaaagctcgctgaatccttggagtcttgtacaggcgctttggacgaattgtcagagcagctggaaagccgcgtgcaactgtgtacaaaatcttcgagaggacacgacctgaaaatcagcgccgatcaacgagcagggctgttcttttag

SEQ ID NO: 47974 - DNA, 4640 bp, Artificial Sequence
  derived and/or modified sequence
cgggggtgcgcggggcggtcagcgatctgcagcttcgcggggacagagatgtaacccaactcgttcacggatgttccgcgcgccgtgtcaccggctgcgggccaggggtactcggaaggcgcgggcaggagcctggcgaggatgcaccttcccctgccttggaaagggaatggagaggccggcggcccgggagccgcatgggcccgacgcgctgcggcgcttccagggactgctgctggaccgccgaggccggctgcacggccaggtgctgcgcctgcgcgaggtggcccggcgcctggagcgcctgcgcaggcgctccctcgtagccaacgtggccggcagctcgctgagcgcaacgggcgccctcgccgccatcgtggggctctcgctcagcccggtcaccctggggacctcgctgctggtgtcggccgtggggctgggggtggccacagccggaggggccgtcaccatcacgtccgatctctcgctgatcttctgcaactcccgggagctgcggagggtgcaggagatcgcggccacctgccaggaccagatgcgagagatcctgagctgcctcgagtttttctgccgctggcagggctgcggggaccgccagctgctgcagtgcgggaggaacgcctccatcgccctgtacaattctgtctacttcatcgtcttctttggctcacgtggcttcctcatccccaggcgggcggagggggacaccaaggttagccaggccgtgctgaaggccaagattcagaaactggccgagagcctggagtcctgcaccggggctctggacgaactcagcgagcagctggagtctcgggttcagctctgcaccaagtccagtcgtggccacgacctcaagatctctgctgaccagcgtgcagggctgtttttctgagaacatcctttccccctaatgaccgaggccagcaaatcatcctcatgggatgctccagaatttgtagctcccttaggaaaacaccaagctgggttaggagccgaaggcaaaggatgagaaaaactgtttttgaagtgggcaggtccccaaagcccttcttttcccatcactgtgacatctgcctgggcttgagtgctacggacttttcagtcttcctagtggaaaaatgtgacccaaaaactctttttcctttatcaaaaactttctgtctaaacacagctgggcaggcactcctgttttaaagttatttcggggtccctgaccctgccctggtggcttggcctgagactggagagagtgccatcctctgggtcctctccaagtcctactagtctttgaagtcctcaaaatgtgcgtgaggaaggcgtttgcctctattccagaatttctgatacaaagaactccagaatccagagcaaatcagcccttctctgaacgttgtaggatggttcagaacccagagaggaccctggtgctgatatctcctcctcttccctttcccctcagcttacttactcccagatgcggcctgggtatgaagtaggcctttcctgagtggctcccaatccagtcctccaagtactcagaggggaagcccgtgaagccgtcatctaagtcctgctccctcacatgaagctgagggccagatagatggagcgactgccaacttcatttcccgacatcattgtgttcagaagagagtgatgggttttgagttagacagtcctgggcttgagacaggctttgtcactactgtgtgagtgtagccacctaatctctctgagactgtgtaaaacaaagatgataaaatctcaccctgttgtgagatattaaatgagccaaagtgcctagcatgatggtgctggctcatatagtgtagtccctggaatggcaaattaacatcacccaggaacttgttagaaaggcaaattcttggacacaaccctcctgatttatggaatcagaaactctggctgtggggcccagcaacctgagtttaaacaatttctctgggtggttctgcggcacactaaggtttgaaaatcactgcaacaaatgctaacttctaatccccttgatgagctttcacgaagtctcacggcttctctagggactccatggtcttcagagtcgttcacagatgaccaaggacagactgtgtcccagaagccaaaatgagagagagagagagagagcacgcgtacgtgcaccctggggcagtgtctcaccgtatgaacaagggatgtaacactaaaagcccattagggggcagtgtttcccgcctgttgtagaaactggtacagaaaggaatatgaagttcctgaaactgacctttgtctattattaccttctctgaaaagtgccagtccatgtattttttatttattttaagtttgtaatttaatttttaattattgtttagtgtttgcatttaattttatttaatcaccacatttagaaaataataagagcaagtttctaaatgggagactgctgaggctctttgcaagagatgagattaagtttgagtttctaaggcagggcatgagctggaaatagcattgctttccttgattgtctctctccttcagggagattctttttctctagtgttttaagtgatcctttgaagtaagtgtggagagtcttgaatggcaagaccaggagctgagtttaagcttgtaatggaagcttgcattgtgggatatataactgaggaagcatatttatcctgaaggtattttgccagaaggtatcacttgacctggaaaaggaatctatttagttcaggaaagataaaaagtttagaggtatgtgaaggaagcacttagaacttgcaagcctgatgtcctatcaagttatgtcttctgggtgacagacaaaatcgcttgtcttatggtggtgatgtgttgcattttcactttggggtctgtaagaaactgtcagtgaaaatatgtacaattccttcaatttccattcttaacaactgtaatgttgaaaaataagttgaaaagtctttgggaccatacatgcaaaaacggtgcctctgttacttaattatttaatattctataaatgtacccaatctgtccgcacccttcccagtgatggggcagtatgtctgaggaagtataatttcagtactggggtcggggagaggaggtgatgtttctacatttttattttttctataaattgcaattggtctgtatgctggtttattttgaaatttatattggtttcttttcaagctggtgtcatctcctagactgtttcacccagatgctagcattttttttttttttttgagacagagtctcactctgtcacctaggctggagttgcagtggtttgatctcggctcactgcaacctccgactcctgggttcaagcaattcttctgcctcagcctcctgagtagctgggattacagatgtgcaccagcacacccggctaattttttgtatttttagtagagacagggtttcgccatgttggccaggctggtcttgaactcctggccttatgtgatccgcccaccttggcttcccaaagtgctgggattacaggcatgagccacctcgcctggccagatgctagcattttagatcaaacaattcattttagatgaattgttttgtttcacaatcattttaaatcattttagaatgtacttcacattattagttgtgttatggcataaaggtacaaccattccctaactccatcttttattaatgcttaagtttaaattatattcttccaatgcctaagctattccctagaattaaactgggcacttttggaagcagcaacagtaacagcagcagcaaacttttcctctcatattttgggtgtatcaaaagttctagacttttgaagttatgatttcagtggcccactttatttctaaggaagagtgtctactttggaacgatactttgcacatagtaggaactcaagaaatacatttgaataattataattaactgtttagctatcttaatgagaatttgttgacaacaaaagatcatccatcgccttatgtgtgagtaagattggagcctctatcaagatttagtcaagttcagttagattgattctagaaacaaatatttatttctttcttttacggggatgtgaataaggcttttccttaaggccttcattctttaaacaaacaggttgaaatggtatgttgtaaaagagaagacgggagagaggtatttagatgataagtgtacttcacaaaaatgccaaagtttgaaaaataggtatgtttgttctaaatgtttaagtgcttctctgttaggttctggggcttgcaatcatttgaattgttctgtttcacaataaaggagattcactgggttctgcattttcaggattcaatagaactgctccattaaaaaaataatccttagcaagcattcgaatcctaactgctttgatgcacttgccctcgggcacctgtcatttccaatatggtaggtgtcaaagtcaaaagtatttactgggagaaaaaagagaggagtggttgtagaagtctccctaaatcagacatgtcaagcaatcagccaacgtggtgtatttctcattcaatattttagtgtgaattgagacactgagataaagacatcgtgcagagataaatggggatacagttaaa

SEQ ID NO: 47975 - DNA, 840 bp, Artificial Sequence
  derived and/or modified sequence
atgttcagagccccctgccacagactgagagccagaggcaccagaaaggccagagccggcgcctggagaggctgcaccttcccctgcctgggcaagggcatggagagacccgccgccagagagccccacggccccgacgccctgagaagattccagggcctgctgctggacagaagaggcagactgcacggccaggtgctgagactgagagaggtggccagaagactggagagactgagaagaagaagcctggtggccaacgtggccggcagcagcctgagcgccaccggcgccctggccgccatcgtgggcctgagcctgagccccgtgaccctgggcaccagcctgctggtgagcgccgtgggcctgggcgtggccaccgccggcggcgccgtgaccatcaccagcgacctgagcctgatcttctgcaacagcagagagctgagaagagtgcaggagatcgccgccacctgccaggaccagatgagagagatcctgagctgcctggagttcttctgcagatggcagggctgcggcgacagacagctgctgcagtgcggcagaaacgccagcatcgccctgtacaacagcgtgtacttcatcgtgttcttcggcagcagaggcttcctgatccccagaagagccgagggcgacaccaaggtgagccaggccgtgctgaaggccaagatccagaagctggccgagagcctggagagctgcaccggcgccctggacgagctgagcgagcagctggagagcagagtgcagctgtgcaccaagagcagcagaggccacgacctgaagatcagcgccgaccagagagccggcctgttcttctag

SEQ ID NO: 47976 - DNA, 2622 bp, Artificial Sequence
  derived and/or modified sequence
cgaaaacctagggaatgacagctagaggcatccagacgataactggcagccaggagggtggataagtcaaaggaaggggtcaaggaaagaggggaaggaaagggaaccatcacttgctgagcctgctgcctgtgctttctcatgtcacccgcacgacaacccaatgtgaatgttatcatctccaggtaactgctgaagaaacggaagctcaaagagatgtgacagacaggaagctgactatggaagaagaggaggccaagaggatagcagagatgggaaagccagtattgggtgaacaccccaaactagaagtcatcattgaagagtcctatgagttcaagactacggtggacaaactgatcaagaagacaaacctggccttggttgtggggacccattcctggagggaccagttcatggaggccatcaccgtcagtgcagcaggggatgaggatgaggatgaatccggggaggagaggctgccctcctgctttgactacgtcatgcacttcctgactgtcttctggaaggtgctgtttgcctgtgtgccccccacagagtactgccacggctgggcctgcttcgccgtctccatcctcatcattggcatgctcaccgccatcattggggacctggcctcgcacttcggctgcaccattggtctcaaagattcagtcacagctgttgttttcgtggcatttggcacctctgtcccagatacgtttgccagcaaagctgctgccctccaggatgtatatgcagacgcctccattggcaacgtgacgggcagcaacgccgtcaatgtcttcctgggcatcggcctggcctggtccgtggccgccatctactgggctctgcagggacaggagttccacgtgtcggccggcacactggccttctccgtcaccctcttcaccatctttgcatttgtctgcatcagcgtgctcttgtaccgaaggcggccgcacctgggaggggagcttggtggcccccgtggctgcaagctcgccacaacatggctctttgtgagcctgtggctcctctacatactctttgccacactagaggcctattgctacatcaaggggttctaagccacacaacagagcctccagcagggcaggcctaggacttctcctaagagaagggcacttccccaccagtgatctctcccgactgcactgccctggagaggcagcatcaggacctaagccccaggaacttcacccaacttaggccctggcaattaactgaaagggcaaagtcttaatcaatcaaacaatggaggaatcaccgactttacacagtatttaattgaatacaaacaagcaacagcaacaaatccacctccaccccatctccccctcatatccctgacccaaagcaaaggtcagagcctttcgcctccttctattccatcttttgattattcctttgcctctcatttctttggaagcagggtttctcctctctgcccaattccatatgtccctattatctcactcagctgacaagacgtgaaaatgagtcacattcatgtggctggggtggggttcttttttcattgtaatcattattgtggttgctttcgttttgccattaggttttgcttattattttgttttgtcttttttttctgaagtgagtgaaaaaggtgccacaaaggaattccaggtccgagccaacagagagaaacatgaatttttagacacatgctctcctgccacctcttggctccatcaagatccagttccccatctcactgttttctctgagttcttgggaggagtgatggtgttggggtagaaataagctcactcacccacgcagggtactaaagatcttacaggagcttcaactggagcaggaggagctttttatgcttatgttgaatcaagtcagatacaaaaagcaattgtccctctttgcccaagcctttccaattctgtgtgtcttgttgtgtcagtgtccacttgtgtatccttctgcaggaagacccgccaaatagaagagatgggacaaaaataggaatggtgtgtgacgacaaagggctactggaagaacaaaagggatacaggccttcttgattatctttggctttgtacctgaggcaggagagaagagatgtccaaccagtgagatctttaagagaaaagtttgtattttaaatgtcaatgtgcctgagaaatgtcagcttcaccacgctcttgcttcctaatgctctatacaaagagggctgactatatttcttgaagtggtgtaaaaacttagagattttataagagaaccaggggctcccttcacctctcctggtccctcaggtcacatatgaaagcatttttacaagataggaactggaattcctcatttctcccatgttcctgcttgttcttaaacttcatgaagctatttttccagcctatggggtagttcttgctccagtaagaggaatcttagttgtcataatcccttggagcctgggtttttggagaaagagatctccgtgccctacagaccttttctcaacgaatgtgggaaggacctggctttaaaacacgcacacaaacacacaaataaacagacataagatgtcatcacgaaactgcccacggatctttaggc

SEQ ID NO: 47977 - DNA, 897 bp, Artificial Sequence
  derived and/or modified sequence
atggagagaggcatcagcgacgtgaccgacagaaagctgaccatggaggaggaggaggccaagagaatcgccgagatgggcaagcccgtgctgggcgagcaccccaagctggaggtgatcatcgaggagagctacgagttcaagaccaccgtggacaagctgatcaagaagaccaacctggccctggtggtgggcacccacagctggagagaccagttcatggaggccatcaccgtgagcgccgccggcgacgaggacgaggacgagagcggcgaggagagactgcccagctgcttcgactacgtgatgcacttcctgaccgtgttctggaaggtgctgttcgcctgcgtgccccccaccgagtactgccacggctgggcctgcttcgccgtgagcatcctgatcatcggcatgctgaccgccatcatcggcgacctggccagccacttcggctgcaccatcggcctgaaggacagcgtgaccgccgtggtgttcgtggccttcggcaccagcgtgcccgacaccttcgccagcaaggccgccgccctgcaggacgtgtacgccgacgccagcatcggcaacgtgaccggcagcaacgccgtgaacgtgttcctgggcatcggcctggcctggagcgtggccgccatctactgggccctgcagggccaggagttccacgtgagcgccggcaccctggccttcagcgtgaccctgttcaccatcttcgccttcgtgtgcatcagcgtgctgctgtacagaagaagaccccacctgggcggcgagctgggcggccccagaggctgcaagctggccaccacctggctgttcgtgagcctgtggctgctgtacatcctgttcgccaccctggaggcctactgctacatcaagggcttctag

SEQ ID NO: 47978 - DNA, 897 bp, Artificial Sequence
  derived and/or modified sequence
atggaacgcgggatttcagacgtcaccgaccgcaagttgacaatggaggaggaggaggcgaaacgaattgctgaaatgggaaagccagtgcttggggaacacccaaagctggaggtcattatagaagaaagctatgagttcaagaccaccgtcgacaaactgattaagaagacaaatttggctttggtagtcgggactcattcttggcgcgatcagttcatggaggctattaccgtttctgcagcgggcgatgaggacgaggatgaatccggagaggagaggctcccgtcttgcttcgactacgtgatgcacttcctgacagtgttctggaaggtcttgtttgcatgcgtccctccaaccgagtactgtcatggatgggcctgttttgccgtgtcaatcctcattatagggatgctgacagccatcataggggatcttgcctctcactttggctgcaccattggcctaaaggatagcgtcacggcagtggtcttcgttgccttcggcacatccgtcccggacacgtttgcttccaaggccgccgctctgcaggatgtctatgctgatgcctccatcggaaatgttaccgggtccaacgccgttaatgtgtttctgggaattggcctcgcctggtccgtggccgccatctattgggcattgcaggggcaggagtttcacgtgagcgccgggacactcgctttttctgtgaccttgtttacgatcttcgcctttgtgtgtatttcagtgctactttatcggaggagaccgcacctgggaggtgaactgggaggcccacgcggatgtaagctggcaaccacatggctcttcgtgtcactttggctgctatatatattattcgccacgctggaagcttattgctatataaaggggttttag

SEQ ID NO: 47979 - DNA, 897 bp, Artificial Sequence
  derived and/or modified sequence
atggagcggggcatcagtgatgtgacagacaggaagctgaccatggaggaggaggaggccaagagaattgctgagatgggcaagcctgtgctgggggagcaccccaagctggaggtgatcatcgaggagagctatgagttcaagaccaccgtggacaagctgatcaagaagaccaacctggccctggtggtgggcacccacagctggagggaccagttcatggaggccatcaccgtgtctgctgctggagatgaagatgaagatgagagcggggaggagcggctgcccagctgctttgattatgtgatgcacttcctgactgtgttctggaaggtgctgtttgcctgtgtgcccccaacagagtactgccacggctgggcctgctttgctgtgtccatcctgatcatcggcatgctgacagccatcattggagacctggccagccacttcggctgcaccatcggcctgaaggacagcgtgacagctgtggtgtttgtggccttcggcacctctgtgcctgacacctttgccagcaaggctgctgccctgcaggatgtgtatgcagatgccagcattggaaatgtgacaggcagcaatgctgtgaatgtgttcctgggcatcggcctggcctggagcgtggccgccatctactgggccctgcagggccaggagttccacgtgtctgctggcaccctggccttctctgtgaccctcttcaccatctttgcctttgtgtgcatctctgtgctgctgtacagaagaagaccccacctgggcggggagctgggcggcccccggggctgcaagctggccaccacctggctgtttgtgtccctgtggctgctgtacatcctgtttgccaccctggaggcctactgctacatcaagggcttctag

SEQ ID NO: 47980 - DNA, 897 bp, Artificial Sequence
  derived and/or modified sequence
atggagcggggcatcagcgacgtgaccgaccggaagctgaccatggaggaggaagaggccaaacgtatcgctgagatgggcaagcctgtgctgggggaacacccaaagctggaggtaattatcgaagagtcgtacgagttcaagactaccgtagataagctcattaaaaaaaccaatctcgctctggtggtgggcacgcattcctggagggaccagtttatggaagctataacagtctccgccgccggagacgaggacgaagatgagtcaggtgaggaaaggttacccagctgcttcgattatgtgatgcacttcctgacggttttttggaaggtgcttttcgcttgcgtgccccccacagagtattgtcacggctgggcctgctttgctgtatcaattctcatcatcggcatgttaacagctatcattggagacttagcctcacactttgggtgtacaattgggctgaaggactctgttaccgcggtggttttcgtggcatttggcacctccgttcccgacacattcgccagtaaggctgctgccctgcaagatgtgtatgcagatgcatctattggcaatgtgacagggtctaacgccgtcaacgtctttctcgggattggactggcctggtctgttgcagcaatttactgggccttgcaaggccaagagttccacgtctctgccgggacattggctttttctgtcaccctattcacaatcttcgcatttgtctgcatctccgtccttctgtacaggcggcgccctcacttgggcggtgagctcggaggaccacggggctgcaaactcgccaccacctggctcttcgtgtctctgtggctgctctatatcctcttcgctacactcgaggcctattgctatatcaaaggtttctag

SEQ ID NO: 47981 - DNA, 897 bp, Artificial Sequence
  derived and/or modified sequence
atggaaagaggcatttctgatgtcacggataggaaactaactatggaagaggaggaggctaaacggatagcagagatgggtaagccagtattgggagaacacccaaagttggaggtgatcatcgaggagtcatacgaattcaagacgactgtagacaaactgatcaaaaaaacgaacttagccctcgtagtgggaacccattcctggcgagaccagtttatggaggccatcaccgtgagtgcagctggggatgaggatgaagacgaaagcggagaggaacggctcccctcttgttttgattatgtgatgcattttctgaccgtgttctggaaagtcctcttcgcatgcgtccctcccacagagtattgtcatggctgggcctgtttcgccgtgagtatcctgattatcgggatgctgactgcaattatcggcgatctggcctctcacttcgggtgcaccatcggacttaaggactcagtgacagctgtggttttcgttgcatttggtacgagcgtcccggacacattcgcctcgaaagccgcagccctacaggatgtgtacgccgatgcttcaatcggcaacgttactggctctaacgccgttaatgtattcttaggcattgggctcgcctggtccgtggccgcaatttactgggccctgcaggggcaggaatttcatgtttctgcaggcaccttagctttttcggtcactctctttacaatatttgcattcgtttgtattagtgtcctactctacagacgcagaccccaccttggcggagaattgggaggcccaagaggatgcaagctggccacaacttggctcttcgtatccctgtggcttctctatatcctctttgccactctggaggcctattgttacatcaagggcttctag

SEQ ID NO: 47982 - protein, 1152 aa, Artificial Sequence
  derived and/or modified sequence
MAVRKKDGGPNVKYYEAADTVTQFDNVRLWLGKNYKKYIQAEPPTNKSLSSLVVQLLQFQEEVFGKHVSNAPLTKLPIKCFLDFKAGGSLCHILAAAYKFKSDQGWRRYDFQNPSRMDRNVEMFMTIEKSLVQNNCLSRPNIFLCPEIEPKLLGKLKDIIKRHQGTVTEDKNNASHVVYPVPGNLEEEEWVRPVMKRDKQVLLHWGYYPDSYDTWIPASEIEASVEDAPTPEKPRKVHAKWILDTDTFNEWMNEEDYEVNDDKNPVSRRKKISAKTLTDEVNSPDSDRRDKKGGNYKKRKRSPSPSPTPEAKKKNAKKGPSTPYTKSKRGHREEEQEDLTKDMDEPSPVPNVEEVTLPKTVNTKKDSESAPVKGGTMTDLDEQEDESMETTGKDEDENSTGNKGEQTKNPDLHEDNVTEQTHHIIIPSYAAWFDYNSVHAIERRALPEFFNGKNKSKTPEIYLAYRNFMIDTYRLNPQEYLTSTACRRNLAGDVCAIMRVHAFLEQWGLINYQVDAESRPTPMGPPPTSHFHVLADTPSGLVPLQPKTPQGRQVDADTKAGRKGKELDDLVPETAKGKPELQTSASQQMLNFPDKGKEKPTDMQNFGLRTDMYTKKNVPSKSKAAASATREWTEQETLLLLEALEMYKDDWNKVSEHVGSRTQDECILHFLRLPIEDPYLEDSEASLGPLAYQPIPFSQSGNPVMSTVAFLASVVDPRVASAAAKSALEEFSKMKEEVPTALVEAHVRKVEEAAKVTGKADPAFGLESSGIAGTTSDEPERIEESGNDEARVEGQATDEKKEPKEPREGGGAIEEEAKEKTSEAPKKDEEKGKEGDSEKESEKSDGDPIVDPEKEKEPKEGQEEVLKEVVESEGERKTKVERDIGEGNLSTAAAAALAAAAVKAKHLAAVEERKIKSLVALLVETQMKKLEIKLRHFEELETIMDREREALEYQRQQLLADRQAFHMEQLKYAEMRARQQHFQQMHQQQQQPPPALPPGSQPIPPTGAAGPPAVHGLAVAPASVVPAPAGSGAPPGSLGPSEQIGQAGSTAGPQQQQPAGAPQPGAVPPGVPPPGPHGPSPFPNQQTPPSMMPGAVPGSGHPGVAAQSPAIVAAVQGNLLPSASPLPDPGTPLPPDPTAPSPGTVTPVPPPQ

SEQ ID NO: 47983 - protein, 2477 aa, Artificial Sequence
  derived and/or modified sequence
MDPSGVKVLETAEDIQERRQQVLDRYHRFKELSTLRRQKLEDSYRFQFFQRDAEELEKWIQEKLQIASDENYKDPTNLQGKLQKHQAFEAEVQANSGAIVKLDETGNLMISEGHFASETIRTRLMELHRQWELLLEKMREKGIKLLQAQKLVQYLRECEDVMDWINDKEAIVTSEELGQDLEHVEVLQKKFEEFQTDMAAHEERVNEVNQFAAKLIQEQHPEEELIKTKQDEVNAAWQRLKGLALQRQGKLFGAAEVQRFNRDVDETISWIKEKEQLMASDDFGRDLASVQALLRKHEGLERDLAALEDKVKALCAEADRLQQSHPLSATQIQVKREELITNWEQIRTLAAERHARLNDSYRLQRFLADFRDLTSWVTEMKALINADELASDVAGAEALLDRHQEHKGEIDAHEDSFKSADESGQALLAAGHYASDEVREKLTVLSEERAALLELWELRRQQYEQCMDLQLFYRDTEQVDNWMSKQEAFLLNEDLGDSLDSVEALLKKHEDFEKSLSAQEEKITALDEFATKLIQNNHYAMEDVATRRDALLSRRNALHERAMRRRAQLADSFHLQQFFRDSDELKSWVNEKMKTATDEAYKDPSNLQGKVQKHQAFEAELSANQSRIDALEKAGQKLIDVNHYAKDEVAARMNEVISLWKKLLEATELKGIKLREANQQQQFNRNVEDIELWLYEVEGHLASDDYGKDLTNVQNLQKKHALLEADVAAHQDRIDGITIQARQFQDAGHFDAENIKKKQEALVARYEALKEPMVARKQKLADSLRLQQLFRDVEDEETWIREKEPIAASTNRGKDLIGVQNLLKKHQALQAEIAGHEPRIKAVTQKGNAMVEEGHFAAEDVKAKLHELNQKWEALKAKASQRRQDLEDSLQAQQYFADANEAESWMREKEPIVGSTDYGKDEDSAEALLKKHEALMSDLSAYGSSIQALREQAQSCRQQVAPTDDETGKELVLALYDYQEKSPREVTMKKGDILTLLNSTNKDWWKVEVNDRQGFVPAAYVKKLDPAQSASRENLLEEQGSIALRQEQIDNQTRITKEAGSVSLRMKQVEELYHSLLELGEKRKGMLEKSCKKFMLFREANELQQWINEKEAALTSEEVGADLEQVEVLQKKFDDFQKDLKANESRLKDINKVAEDLESEGLMAEEVQAVQQQEVYGMMPRDETDSKTASPWKSARLMVHTVATFNSIKELNERWRSLQQLAEERSQLLGSAHEVQRFHRDADETKEWIEEKNQALNTDNYGHDLASVQALQRKHEGFERDLAALGDKVNSLGETAERLIQSHPESAEDLQEKCTELNQAWSSLGKRADQRKAKLGDSHDLQRFLSDFRDLMSWINGIRGLVSSDELAKDVTGAEALLERHQEHRTEIDARAGTFQAFEQFGQQLLAHGHYASPEIKQKLDILDQERADLEKAWVQRRMMLDQCLELQLFHRDCEQAENWMAAREAFLNTEDKGDSLDSVEALIKKHEDFDKAINVQEEKIAALQAFADQLIAAGHYAKGDISSRRNEVLDRWRRLKAQMIEKRSKLGESQTLQQFSRDVDEIEAWISEKLQTASDESYKDPTNIQLSKLLSKHQKHQAFEAELHANADRIRGVIDMGNSLIERGACAGSEDAVKARLAALADQWQFLVQKSAEKSQKLKEANKQQNFNTGIKDFDFWLSEVEALLASEDYGKDLASVNNLLKKHQLLEADISAHEDRLKDLNSQADSLMTSSAFDTSQVKDKRDTINGRFQKIKSMAASRRAKLNESHRLHQFFRDMDDEESWIKEKKLLVGSEDYGRDLTGVQNLRKKHKRLEAELAAHEPAIQGVLDTGKKLSDDNTIGKEEIQQRLAQFVEHWKELKQLAAARGQRLEESLEYQQFVANVEEEEAWINEKMTLVASEDYGDTLAAIQGLLKKHEAFETDFTVHKDRVNDVCTNGQDLIKKNNHHEENISSKMKGLNGKVSDLEKAAAQRKAKLDENSAFLQFNWKADVVESWIGEKENSLKTDDYGRDLSSVQTLLTKQETFDAGLQAFQQEGIANITALKDQLLAAKHVQSKAIEARHASLMKRWSQLLANSAARKKKLLEAQSHFRKVEDLFLTFAKKASAFNSWFENAEEDLTDPVRCNSLEEIKALREAHDAFRSSLSSAQADFNQLAELDRQIKSFRVASNPYTWFTMEALEETWRNLQKIIKERELELQKEQRRQEENDKLRQEFAQHANAFHQWIQETRTYLLDGSCMVEESGTLESQLEATKRKHQEIRAMRSQLKKIEDLGAAMEEALILDNKYTEHSTVGLAQQWDQLDQLGMRMQHNLEQQIQARNTTGVTEEALKEFSMMFKHFDKDKSGRLNHQEFKSCLRSLGYDLPMVEEGEPDPEFEAILDTVDPNRDGHVSLQEYMAFMISRETENVKSSEEIESAFRALSSEGKPYVTKEELYQNLTREQADYCVSHMKPYVDGKGRELPTAFDYVEFTRSLFVN

SEQ ID NO: 47984 - protein, 82 aa, Artificial Sequence
  derived and/or modified sequence
MPQYQTWEEFSRAAEKLYLADPMKARVVLKYRHSDGNLCVKVTDDLVRQCLALLLRLQCSGMIIAHCILDLLGSSGPLASAS

SEQ ID NO: 47985 - DNA, 201 bp, Artificial Sequence
  derived and/or modified sequence
atgccccagtaccagacctgggaggagttcagcagagccgccgagaagctgtacctggccgaccccatgaaggccagagtggtgctgaagtacagacacagcgacggcaacctgtgcgtgaaggtgaccgacgacctggtgcagtggcacctgaactactgcaccctgagacacggcatcgccggcggcctggagacctag

SEQ ID NO: 47986 - DNA, 249 bp, Artificial Sequence
  derived and/or modified sequence
atgccccagtaccagacctgggaggagttcagcagagccgccgagaagctgtacctggccgaccccatgaaggccagagtggtgctgaagtacagacacagcgacggcaacctgtgcgtgaaggtgaccgacgacctggtgagacagtgcctggccctgctgctgagactgcagtgcagcggcatgatcatcgcccactgcatcctggacctgctgggcagcagcggccccctggccagcgccagctag

SEQ ID NO: 47987 - DNA, 201 bp, Artificial Sequence
  derived and/or modified sequence
atgccacagtatcagacgtgggaggagtttagccgggctgctgaaaaactttatctggcagatcccatgaaggctcgggtggttctgaaatacaggcactctgacgggaatctttgcgttaaggtgaccgatgacttggtccagtggcacctgaattactgcacactgcggcatggaattgccggcggtctcgaaacatag

SEQ ID NO: 47988 - DNA, 249 bp, Artificial Sequence
  derived and/or modified sequence
atgccacagtaccagacgtgggaggagtttagcagggccgccgagaaactctacctcgccgatccgatgaaggcccgtgtggtgctcaaataccggcactcggatgggaacctctgtgttaaggtgactgacgacttagtgaggcaatgtcttgcattgcttctgaggctgcaatgttcaggcatgattattgcacattgcatactcgatctcctggggtcttccggacccctggcatccgcttcttag

SEQ ID NO: 47989 - DNA, 1596 bp, Artificial Sequence
  derived and/or modified sequence
ggggctgctgggactcgcgtcggttggcgactcccggacgtaggtagtttgttgggccgggttctgaggccttgcttctctttacttttccactctaggccacgatgccgcagtaccagacctgggaggagttcagccgcgctgccgagaagctttacctcgctgaccctatgaaggcacgtgtggttctcaaatataggcattctgatgggaacttgtgtgttaaagtaacagatgatttagttagacagtgtcttgctctattgctcaggctgcagtgcagtggcatgatcatagctcactgcatcctcgacctcctgggctcaagcggtcctcttgcttcagcctcctgaatagcagagactacagtgtttggtgtataaaacagaccaagctcaagatgtaaagaagattgagaaattccacagtcaactaatgcgacttatggtagccaaggaagcccgcaatgttaccatggaaactgagtgaatggtttgaaatgaagactttgtcgtgtacttaggaagtaaatatcttttgaattagagaaagtgttgggacagaaagtactttatgtaactaagtgggctgttcagaagcttagaggtcattttttgtaattttctttttaattactttagagagctagggatgcaaatgttttcagttagaaagcctttatttacttttggaaattgaacaagaaatgcatctgtcttagaaactggagattatttgatgttaggtaaaacatgtaattgtttctctggcaaatttgtatcagtaatttgaaaatgagatattaggaaaaaccaattcttcttaaatttagttcatctttctttaaaagaacattaaatgtaaccattttgtcagatccatgtattttggagcataaaatgtatgctgttgtgaccaataaatataaaatatggtaattggaattaactccacaccatagtatgcattgttatacatactgtgtacctaattatgtatagcagtgtagtctcaattatatctgaaagtaattgtgactaacaagtatgctttgccttatttccacatttaaactacctgttaatataagggatttgtagtatcagcttgttgagcaatgactttgaatctagttttcagtgatcagaagcagcagttatttgagtgtatgaatggaatgatgatcactgtgctataatgtactgaaaccaccatattacagaaatatttactacatattttccatctgtagtttctcagaagggctatggattagtttgaactgtcaaatccttgcatacttctgtgacacccctgcccattttctgtctttaattaaccaaggtgttaggtgtgactgtcacaactgttatgttttccagtaaactagaagtacgatatttgataattatatttgtatttcaccacctaaatgtaatgttgattcctcaagaatgaaatgaaggcactacattgaaatatgttttgtataaatttgtcatgttgaacagcattttagcatggtaagttcccttagctatatgaattttggcatgtttcagagagatcagtaaataaaatattagataaaatata

SEQ ID NO: 47990 - DNA, 201 bp, Artificial Sequence
  derived and/or modified sequence
atgccccagtaccagacctgggaggagttcagcagagctgctgagaagctgtacctggccgaccccatgaaggcccgggtggtgctgaagtaccgccacagtgatggcaacctgtgtgtgaaggtgacagatgacctggtgcagtggcacctgaactactgcaccctgcggcacggcattgctgggggcctggagacctag

SEQ ID NO: 47991 - DNA, 249 bp, Artificial Sequence
  derived and/or modified sequence
atgccccagtaccagacctgggaggagttcagcagagctgctgagaagctgtacctggccgaccccatgaaggcccgggtggtgctgaagtaccgccacagtgatggcaacctgtgtgtgaaggtgacagatgacctggtgcggcagtgcctggccctgctgctgcggctgcagtgcagcggcatgatcatcgcccactgcatcctggacctgctgggcagcagcggccccctggccagcgccagctag

SEQ ID NO: 47992 - DNA, 201 bp, Artificial Sequence
  derived and/or modified sequence
atgccccagtaccagacctgggaggagttcagccgggccgccgagaagctgtacctagccgacccaatgaaagctagggtagtgttaaaataccgccattccgacgggaatctctgcgtaaaggtcactgacgacctagtacaatggcatctgaactattgcaccctcagacatggcatcgctggtgggctggagacttag

SEQ ID NO: 47993 - DNA, 249 bp, Artificial Sequence
  derived and/or modified sequence
atgccccagtaccagacctgggaggagttcagccgggccgccgagaagctctatttggccgaccccatgaaagcaagggtcgttctcaaatatcgccactctgatggaaacctttgtgtcaaggtgaccgatgacttggtccggcaatgcttagccctgctgttgcgcctgcagtgctctgggatgataatcgcccactgcatcctggatctcctcggatctagcggcccactggcctccgcatcttag

SEQ ID NO: 47994 - DNA, 201 bp, Artificial Sequence
  derived and/or modified sequence
atgccccagtatcagacctgggaggagttttccagagccgctgagaaactctacttggctgatcccatgaaggcccgagtggtactaaagtatcgacactccgacggaaacctctgcgtgaaagtcacagacgatcttgtgcaatggcatctcaactactgcaccctgcgccatggcattgctgggggattggaaacatag

SEQ ID NO: 47995 - DNA, 249 bp, Artificial Sequence
  derived and/or modified sequence
atgcctcagtaccagacgtgggaggaattcagcagggcagcagagaaactgtaccttgcagatccgatgaaggctcgggtagtgcttaagtaccggcatagcgacgggaacttgtgcgttaaggtgacagacgatctggtgcgccagtgtctggccctgcttctaagactgcaatgcagtggcatgataattgctcactgtattcttgacctactggggtctagcgggcctttggcttcagccagctag

SEQ ID NO: 47996 - protein, 189 aa, Artificial Sequence
  derived and/or modified sequence
MTEYKLVVVGAGGVGKSALTIQLIQNHFVDEYDPTIEDSYRKQVVIDGETCLLDILDTAGQEEYSAMRDQYMRTGEGFLCVFAINNTKSFEDIHQYREQIKRVKDSDDVPMVLVGNKCDLAARTVESRQAQDLARSYGIPYIETSAKTRQGVEDAFYTLVREIRQHKLRKLNPPDESGPGCMSCKCVLS

SEQ ID NO: 47997 - DNA, 570 bp, Artificial Sequence
  derived and/or modified sequence
atgaccgagtacaagctggtggtggtgggcgccggcggcgtgggcaagagcgccctgaccatccagctgatccagaaccacttcgtggacgagtacgaccccaccatcgaggacagctacagaaagcaggtggtgatcgacggcgagacctgcctgctggacatcctggacaccgccggccaggaggagtacagcgccatgagagaccagtacatgagaaccggcgagggcttcctgtgcgtgttcgccatcaacaacaccaagagcttcgaggacatccaccagtacagagagcagatcaagagagtgaaggacagcgacgacgtgcccatggtgctggtgggcaacaagtgcgacctggccgccagaaccgtggagagcagacaggcccaggacctggccagaagctacggcatcccctacatcgagaccagcgccaagaccagacagggcgtggaggacgccttctacaccctggtgagagagatcagacagcacaagctgagaaagctgaacccccccgacgagagcggccccggctgcatgagctgcaagtgcgtgctgagctag

SEQ ID NO: 47998 - DNA, 570 bp, Artificial Sequence
  derived and/or modified sequence
atgacagagtacaaacttgtagtcgtcggagctggcggcgtcggcaagtccgccctgacaatacaacttatccagaatcacttcgtagacgaatacgaccctacaatagaggactcctacagaaagcaagtggttattgacggggagacttgcctgctggatatcttagacacagcagggcaagaagagtactctgccatgcgcgaccaatacatgcggacaggagaaggtttcctttgtgtgtttgcgatcaacaatacgaagagttttgaagacatacaccaatatcgcgaacaaataaagagggtaaaggatagcgatgatgtccctatggtgttggtggggaacaaatgcgatctcgctgcccgcaccgtcgagtctcggcaagcgcaggatctggcccggagctacggcattccatacattgagacctcagctaaaaccagacagggggtggaagatgccttttataccctggtgagggagatccgtcaacataaattacgaaagctcaacccccctgatgaatcaggcccaggctgtatgtcttgcaagtgtgtcctgagctag

SEQ ID NO: 47999 - DNA, 570 bp, Artificial Sequence
  derived and/or modified sequence
atgaccgaatacaagctggttgtggtgggtgctgggggtgtgggaaagagcgctctcactattcagctcatacagaaccatttcgttgacgagtacgatccaaccattgaagacagctatcgcaaacaggtcgtgatcgatggagagacttgcctgctagatatattggacacagctggacaggaagagtactccgcaatgagggatcagtacatgcgcactggggagggctttctctgtgtttttgccataaacaataccaagtccttcgaagacattcatcagtatagggagcagatcaagagagtcaaagactccgacgacgtgcctatggttcttgtgggaaataaatgtgacctcgcagcgagaaccgtagaatcccggcaggcccaggacctggctcgttcttacggcataccgtacatagaaacgtcggctaaaaccagacagggagttgaggacgccttttataccctggttcgcgaaatcaggcagcacaaactaaggaagctcaaccctccagacgagagcggccccggttgcatgagttgtaagtgcgtcttgtcctag

SEQ ID NO: 48000 - DNA, 570 bp, Artificial Sequence
  derived and/or modified sequence
atgacagagtataaactggttgtagtcggggcgggcggagtgggtaaatcagccctaacaattcaactcattcagaaccacttcgtggacgagtacgatccaaccatcgaagactcataccgaaaacaggtggtgattgacggggagacctgccttctggatatcctggacactgcaggccaggaagaatacagcgctatgcgcgatcagtatatgagaacgggcgagggttttctgtgtgttttcgctatcaataacacaaaatcctttgaggatatccaccaataccgtgaacagataaagagggtgaaggattctgatgacgttcccatggtcctagtgggaaataaatgtgatctggccgcccggacagtggaatctcgccaggcacaggacctggccagatcctacggcatcccatacattgaaacttccgccaaaactcggcagggagtcgaggatgccttctataccctcgtaagggagataagacagcacaaactccgcaagctcaatccccctgacgaaagtggccccgggtgcatgtcttgtaaatgcgttctatcttag

SEQ ID NO: 48001 - DNA, 570 bp, Artificial Sequence
  derived and/or modified sequence
atgacagagtacaagctggtggtggtgggcgctgggggcgtgggcaagagcgccctgaccatccagctgatccagaaccactttgtggatgaatatgaccccaccattgaagattcctacaggaagcaggtggtgattgatggagagacctgcctgctggacatcctggacacagctggccaggaggagtacagcgccatgagggaccagtacatgaggactggagagggcttcctgtgtgtgtttgccatcaacaacaccaagagctttgaggacatccaccagtaccgggagcagatcaagagggtgaaggacagtgatgatgtgcccatggtgctggtgggcaacaagtgtgacctggccgccaggacagtggagagccggcaggcccaggacctggcccggagctatggcatcccctacatcgagaccagcgccaagacccggcagggcgtggaggatgccttctacaccctggtgcgggagatccggcagcacaagctgaggaagctgaaccccccagatgaaagtggccctggctgcatgagctgcaagtgtgtgctgtcctag

SEQ ID NO: 48002 - DNA, 570 bp, Artificial Sequence
  derived and/or modified sequence
atgaccgagtacaagctggtggtggtgggcgccggcggcgtgggcaagagtgccctgacaattcagctgattcagaaccacttcgtagatgagtatgatccgactatcgaagactcctatcgcaaacaagtggtgatcgacggagagacatgtttgttggacatacttgacacagcaggccaggaggaatacagcgccatgcgcgatcagtacatgagaacaggcgaggggttcctgtgtgtattcgcaatcaataatacaaagagcttcgaagacatccaccagtatcgagaacagataaaacgcgtgaaagacagtgatgacgtaccaatggtgctggtggggaataagtgcgacctggcagcacggactgtggaatcgcggcaggctcaggacttggcccgatcgtatggaatcccctacatcgagacatctgccaagactagacagggtgtcgaagacgcattctacacactcgtaagggagattcgccagcacaagttacgaaagttgaacccgcctgacgagtcaggccctggctgtatgagctgcaaatgtgtgctgagctag

SEQ ID NO: 48003 - DNA, 570 bp, Artificial Sequence
  derived and/or modified sequence
atgaccgagtacaagctggtggtggtgggcgccggcggcgtgggcaagtctgcactaacgatccagctgattcagaatcactttgttgatgagtacgaccccactatcgaggatagctacagaaaacaggtggtgattgatggcgaaacctgcctgttagatatcttagacaccgccgggcaagaggagtattccgctatgagggaccagtacatgcgaacgggagaggggttcctttgcgtatttgccattaataataccaagtcatttgaagatatacaccagtaccgggagcagattaagagagtaaaggacagcgatgacgtgcccatggtcctcgtggggaacaagtgcgatctggctgcccgtacggtggagtcgagacaggcgcaagatctggccagaagttacggaatcccttatatagaaacaagtgctaagacccgacaaggggtcgaggacgctttttatacccttgtgcgggagatccgccaacacaagttaagaaagctcaaccctcctgacgagagtggaccaggctgtatgtcatgcaagtgcgtgttgagctag

SEQ ID NO: 48004 - DNA, 570 bp, Artificial Sequence
  derived and/or modified sequence
atgaccgagtacaagctggtggtggtgggcgccggcggcgtgggcaaatcagcactaacaatccaattaatacagaatcacttcgtcgatgagtatgaccctaccattgaggacagctacaggaagcaggtcgtgattgacggggagacctgtctgttggatattttagacactgccgggcaggaggagtacagcgcgatgagggatcagtacatgcgcactggcgagggtttcctttgcgtgtttgccatcaacaacactaagtcctttgaggatatccatcagtacagggagcaaataaagagagttaaggactctgatgatgtgcccatggtccttgtcggcaacaaatgcgacttagcagctagaaccgtcgaaagccggcaggcacaggatctggcccgcagctacggaataccttatattgagacatctgccaagactcgacagggggtggaagatgctttctatactctggtgcgggagatccgacaacacaagcttagaaaactgaacccacctgatgagagcggaccaggatgcatgtcatgtaaatgcgttctgagttag

SEQ ID NO: 48005 - DNA, 570 bp, Artificial Sequence
  derived and/or modified sequence
atgacagagtataagctggttgtggttggggctgggggtgtaggcaagagcgccctgactattcagctgattcagaaccactttgtcgacgaatacgaccctactattgaggacagttatcgcaaacaggtggtgatcgacggtgagacctgcctcctggatatcctggataccgcaggacaagaggaatacagcgcaatgagggatcagtatatgcgtacaggcgaagggttcctgtgcgtcttcgccatcaataatactaagagcttcgaagatatacaccagtacagagaacagatcaagagggtcaaagattcggacgacgtgcccatggttctcgtcggcaacaagtgcgacttggctgcacggaccgtagagagccgccaggctcaggacttggcacgctcgtatggcattccctacattgaaacttccgccaagacacgtcagggcgtagaggacgcattctacacactggtgcgggagataaggcagcacaagctccgcaagcttaacccccctgatgaaagtgggcctggctgtatgagctgtaagtgcgtgctgtcctag

SEQ ID NO: 48006 - DNA, 570 bp, Artificial Sequence
  derived and/or modified sequence
atgactgagtacaagttggtagtcgtcggcgcagggggagttggtaagtcagcactcacgattcagttgatccagaatcacttcgtagatgagtatgatccgacaatagaggacagctaccggaagcaggtggtgattgacggagagacatgccttctggatatcctggatactgccggacaggaagaatacagcgcgatgagagatcagtacatgaggacgggtgaaggctttctttgcgtttttgcaataaacaatacgaaaagtttcgaagatatccaccaataccgcgagcaaatcaaaagggtgaaagattcagacgacgtgcccatggttctcgtggggaataaatgtgaccttgccgcaagaactgttgagtctcggcaggcacaggatctggcaaggtcttatggtatcccctatattgaaacaagcgccaagacacggcagggagtcgaggacgcattttatacactggtgcgggaaatcagacagcataaattgcgcaagcttaaccccccagatgaatccggcccagggtgtatgtcgtgcaagtgtgtgctgtcttag

SEQ ID NO: 48007 - DNA, 570 bp, Artificial Sequence
  derived and/or modified sequence
atgacagagtacaaattggttgtcgtaggtgccggaggagtcggtaagtctgctttgaccatacagttaatacaaaaccacttcgtggacgaatatgatcctaccattgaggacagctaccggaagcaggtagtaatcgacggggagacatgcctcctggatatcctcgatactgctgggcaggaggagtactccgccatgagagaccagtacatgaggacaggcgaggggtttctatgtgtcttcgctatcaacaatacgaagtcttttgaagatatccaccagtaccgcgaacagataaaacgcgtcaaggattcggatgacgtaccaatggtcttggtgggtaataagtgtgaccttgccgcacggacagtcgagtccaggcaggcacaggatttggccagaagctatggcatcccctatattgaaaccagtgctaagacgcggcagggggtcgaagacgccttttataccttagtgagagagatacgtcaacataaactgcgcaaactgaatcctccagacgaatctggcccagggtgcatgtcttgcaagtgtgtcctctcctag

SEQ ID NO: 48008 - DNA, 894 bp, Artificial Sequence
  derived and/or modified sequence
cccgagccgcacccgccgcggacggagcccatgcgcggggcgaaccgcgcgcccccgcccccgccccgccccggcctcggccccggccctggccccgggggcagtcgcgcctgtgaacggtggggcaggagaccctgtaggaggaccccgggccgcaggcccctgaggagcgatgacggaatataagctggtggtggtgggcgccggcggtgtgggcaagagtgcgctgaccatccagctgatccagaaccattttgtggacgaatacgaccccactatagaggattcctaccggaagcaggtggtcattgatggggagacgtgcctgttggacatcctggataccgccggccaggaggagtacagcgccatgcgggaccagtacatgcgcaccggggagggcttcctgtgtgtgtttgccatcaacaacaccaagtcttttgaggacatccaccagtacagggagcagatcaaacgggtgaaggactcggatgacgtgcccatggtgctggtggggaacaagtgtgacctggctgcacgcactgtggaatctcggcaggctcaggacctcgcccgaagctacggcatcccctacatcgagacctcggccaagacccggcagggagtggaggatgccttctacacgttggtgcgtgagatccggcagcacaagctgcggaagctgaaccctcctgatgagagtggccccggctgcatgagctgcaagtgtgtgctctcctgacgcagcacaagctcaggacatggaggtgccggatgcaggaaggaggtgcagacggaaggaggaggaaggaaggacggaagcaaggaaggaaggaagggctgctggagcccagtcaccccgggaccgtgggccgaggtgactgcagaccctcc

SEQ ID NO: 48009 - DNA, 1100 bp, Artificial Sequence
  derived and/or modified sequence
gggggcgcggggccggcgggcgtaagcggcggcggcggcggcggcggcgggtgggtggggccgggcggggcccgcgggcacaggtggggcaggagaccctgtaggaggaccccgggccgcaggcccctgaggagcgatgacggaatataagctggtggtggtgggcgccggcggtgtgggcaagagtgcgctgaccatccagctgatccagaaccattttgtggacgaatacgaccccactatagaggattcctaccggaagcaggtggtcattgatggggagacgtgcctgttggacatcctggataccgccggccaggaggagtacagcgccatgcgggaccagtacatgcgcaccggggagggcttcctgtgtgtgtttgccatcaacaacaccaagtcttttgaggacatccaccagtacagggagcagatcaaacgggtgaaggactcggatgacgtgcccatggtgctggtggggaacaagtgtgacctggctgcacgcactgtggaatctcggcaggctcaggacctcgcccgaagctacggcatcccctacatcgagacctcggccaagacccggcagggagtggaggatgccttctacacgttggtgcgtgagatccggcagcacaagctgcggaagctgaaccctcctgatgagagtggccccggctgcatgagctgcaagtgtgtgctctcctgacgcaggtgagggggactcccagggcggccgccacgcccaccggatgaccccggctccccgcccctgccggtctcctggcctgcggtcagcagcctcccttgtgccccgcccagcacaagctcaggacatggaggtgccggatgcaggaaggaggtgcagacggaaggaggaggaaggaaggacggaagcaaggaaggaaggaagggctgctggagcccagtcaccccgggaccgtgggccgaggtgactgcagaccctcccagggaggctgtgcacagactgtcttgaacatcccaaatgccaccggaaccccagcccttagctcccctcccaggcctctgtgggcccttgtcgggcacagatgggatcacagtaaattattggatggtcttga

SEQ ID NO: 48010 - DNA, 1151 bp, Artificial Sequence
  derived and/or modified sequence
tgccctgcgcccgcaacccgagccgcacccgccgcggacggagcccatgcgcggggcgaaccgcgcgcccccgcccccgccccgccccggcctcggccccggccctggccccgggggcagtcgcgcctgtgaacggtggggcaggagaccctgtaggaggaccccgggccgcaggcccctgaggagcgatgacggaatataagctggtggtggtgggcgccggcggtgtgggcaagagtgcgctgaccatccagctgatccagaaccattttgtggacgaatacgaccccactatagaggattcctaccggaagcaggtggtcattgatggggagacgtgcctgttggacatcctggataccgccggccaggaggagtacagcgccatgcgggaccagtacatgcgcaccggggagggcttcctgtgtgtgtttgccatcaacaacaccaagtcttttgaggacatccaccagtacagggagcagatcaaacgggtgaaggactcggatgacgtgcccatggtgctggtggggaacaagtgtgacctggctgcacgcactgtggaatctcggcaggctcaggacctcgcccgaagctacggcatcccctacatcgagacctcggccaagacccggcagggagtggaggatgccttctacacgttggtgcgtgagatccggcagcacaagctgcggaagctgaaccctcctgatgagagtggccccggctgcatgagctgcaagtgtgtgctctcctgacgcaggtgagggggactcccagggcggccgccacgcccaccggatgaccccggctccccgcccctgccggtctcctggcctgcggtcagcagcctcccttgtgccccgcccagcacaagctcaggacatggaggtgccggatgcaggaaggaggtgcagacggaaggaggaggaaggaaggacggaagcaaggaaggaaggaagggctgctggagcccagtcaccccgggaccgtgggccgaggtgactgcagaccctcccagggaggctgtgcacagactgtcttgaacatcccaaatgccaccggaaccccagcccttagctcccctcccaggcctctgtgggcccttgtcgggcacagatgggatcacagtaaattattggatggtcttg

SEQ ID NO: 48011 - protein, 1259 aa, Artificial Sequence
  derived and/or modified sequence
MDRPLSSSAEAEEELEWQVASRRRKAWAKCRSSWQASETEDLSTEATTQDEEEDEEEDLPGAQLPAAGGRGNVPNEKIAIWLKDCRTPLGASLDEQSSSTLKGVLVRNGGSFEDDLSLGAEANHLHESDAQIENCNNILAKERRLQFHQKGRSMNSTGSGKSSGTVSSVSELLELYEEDPEEILYNLGFGRDEPDIASKIPSRFFNSSSFAKGIDIKVFLSAQMQRMEVENPNYALTSRFRQIEVLTTVANAFSSLYSQVSGTPLQRIGSMSSVTSNKETDPPPPLTRSNTANRLMKTLSKLNLCVDKTEKGESSSPSPSAEKGKILNVSVIEESGNKNDQKSQKIMKKKESSSMLATVKEEVSGSSAAVTENADSDRISDEANSNFNQGTENEQSKETQSHESKLGEESGIVESKLDSDFNISSHSELENSSELKSVHISTPEKEPCAPLTIPSIRNIMTQQKDSFEMEEVQSTEGEAPHVPATYQLGLTKSKRDHLLRTASQHSDSSGFAEDSTDCLSLNHLQVQESLQAMGSSADSCDSETTVTSLGEDLATPTAQDQPYFNESEEESLVPLQKGLEKAAAVADKRKSGSQDFPQCNTIENTGTKQSTCSPGDHIIEITEVEEDLFPAETVELLREASAESDVGKSSESEFTQYTTHHILKSLASIEAKCSDMSSENTTGPPSSMDRVNTALQRAQMKVCSLSNQRMGRSLLKSKDLLKQRYLFAKAGYPLRRSQSLPTTLLSPVRVVSSVNVRLSPGKETRCSPPSFTYKYTPEEEQELEKRVMEHDGQSLVKSTIFISPSSVKKEEAPQSEAPRVEECHHGRTPTCSRLAPPPMSQSTCSLHSIHSEWQERPLCEHTRTLSTHSVPNISGATCSAFASPFGCPYSHRHATYPYRVCSVNPPSAIEMQLRRVLHDIRNSLQNLSQYPMMRGPDPAAAPYSTQKSSVLPLYENTFQELQVMRRSLNLFRTQMMDLELAMLRQQTMVYHHMTEEERFEVDQLQGLRNSVRMELQDLELQLEERLLGLEEQLRAVRMPSPFRSSALMGMCGSRSADNLSCPSPLNVMEPVTELMQEQSYLKSELGLGLGEMGFEIPPGESSESVFSQATSESSSVCSGPSHANRRTGVPSTASVGKSKTPLVARKKVFRASVALTPTAPSRTGSVQTPPDLESSEEVDAAEGAPEVVGPKSEVEEGHGKLPSMPAAEEMHKNVEQDELQQVIREIKESIVGEIRREIVSGLLAAVSSSKASNSKQDYH

SEQ ID NO: 48012 - DNA, 3780 bp, Artificial Sequence
  derived and/or modified sequence
atggacagacccctgagcagcagcgccgaggccgaggaggagctggagtggcaggtggccagcagaagaagaaaggcctgggccaagtgcagaagcagctggcaggccagcgagaccgaggacctgagcaccgaggccaccacccaggacgaggaggaggacgaggaggaggacctgcccggcgcccagctgcccgccgccggcggcagaggcaacgtgcccaacgagaagatcgccatctggctgaaggactgcagaacccccctgggcgccagcctggacgagcagagcagcagcaccctgaagggcgtgctggtgagaaacggcggcagcttcgaggacgacctgagcctgggcgccgaggccaaccacctgcacgagagcgacgcccagatcgagaactgcaacaacatcctggccaaggagagaagactgcagttccaccagaagggcagaagcatgaacagcaccggcagcggcaagagcagcggcaccgtgagcagcgtgagcgagctgctggagctgtacgaggaggaccccgaggagatcctgtacaacctgggcttcggcagagacgagcccgacatcgccagcaagatccccagcagattcttcaacagcagcagcttcgccaagggcatcgacatcaaggtgttcctgagcgcccagatgcagagaatggaggtggagaaccccaactacgccctgaccagcagattcagacagatcgaggtgctgaccaccgtggccaacgccttcagcagcctgtacagccaggtgagcggcacccccctgcagagaatcggcagcatgagcagcgtgaccagcaacaaggagaccgacccccccccccccctgaccagaagcaacaccgccaacagactgatgaagaccctgagcaagctgaacctgtgcgtggacaagaccgagaagggcgagagcagcagccccagccccagcgccgagaagggcaagatcctgaacgtgagcgtgatcgaggagagcggcaacaagaacgaccagaagagccagaagatcatgaagaagaaggagagcagcagcatgctggccaccgtgaaggaggaggtgagcggcagcagcgccgccgtgaccgagaacgccgacagcgacagaatcagcgacgaggccaacagcaacttcaaccagggcaccgagaacgagcagagcaaggagacccagagccacgagagcaagctgggcgaggagagcggcatcgtggagagcaagctggacagcgacttcaacatcagcagccacagcgagctggagaacagcagcgagctgaagagcgtgcacatcagcacccccgagaaggagccctgcgcccccctgaccatccccagcatcagaaacatcatgacccagcagaaggacagcttcgagatggaggaggtgcagagcaccgagggcgaggccccccacgtgcccgccacctaccagctgggcctgaccaagagcaagagagaccacctgctgagaaccgccagccagcacagcgacagcagcggcttcgccgaggacagcaccgactgcctgagcctgaaccacctgcaggtgcaggagagcctgcaggccatgggcagcagcgccgacagctgcgacagcgagaccaccgtgaccagcctgggcgaggacctggccacccccaccgcccaggaccagccctacttcaacgagagcgaggaggagagcctggtgcccctgcagaagggcctggagaaggccgccgccgtggccgacaagagaaagagcggcagccaggacttcccccagtgcaacaccatcgagaacaccggcaccaagcagagcacctgcagccccggcgaccacatcatcgagatcaccgaggtggaggaggacctgttccccgccgagaccgtggagctgctgagagaggccagcgccgagagcgacgtgggcaagagcagcgagagcgagttcacccagtacaccacccaccacatcctgaagagcctggccagcatcgaggccaagtgcagcgacatgagcagcgagaacaccaccggcccccccagcagcatggacagagtgaacaccgccctgcagagagcccagatgaaggtgtgcagcctgagcaaccagagaatgggcagaagcctgctgaagagcaaggacctgctgaagcagagatacctgttcgccaaggccggctaccccctgagaagaagccagagcctgcccaccaccctgctgagccccgtgagagtggtgagcagcgtgaacgtgagactgagccccggcaaggagaccagatgcagcccccccagcttcacctacaagtacacccccgaggaggagcaggagctggagaagagagtgatggagcacgacggccagagcctggtgaagagcaccatcttcatcagccccagcagcgtgaagaaggaggaggccccccagagcgaggcccccagagtggaggagtgccaccacggcagaacccccacctgcagcagactggcccccccccccatgagccagagcacctgcagcctgcacagcatccacagcgagtggcaggagagacccctgtgcgagcacaccagaaccctgagcacccacagcgtgcccaacatcagcggcgccacctgcagcgccttcgccagccccttcggctgcccctacagccacagacacgccacctacccctacagagtgtgcagcgtgaacccccccagcgccatcgagatgcagctgagaagagtgctgcacgacatcagaaacagcctgcagaacctgagccagtaccccatgatgagaggccccgaccccgccgccgccccctacagcacccagaagagcagcgtgctgcccctgtacgagaacaccttccaggagctgcaggtgatgagaagaagcctgaacctgttcagaacccagatgatggacctggagctggccatgctgagacagcagaccatggtgtaccaccacatgaccgaggaggagagattcgaggtggaccagctgcagggcctgagaaacagcgtgagaatggagctgcaggacctggagctgcagctggaggagagactgctgggcctggaggagcagctgagagccgtgagaatgcccagccccttcagaagcagcgccctgatgggcatgtgcggcagcagaagcgccgacaacctgagctgccccagccccctgaacgtgatggagcccgtgaccgagctgatgcaggagcagagctacctgaagagcgagctgggcctgggcctgggcgagatgggcttcgagatcccccccggcgagagcagcgagagcgtgttcagccaggccaccagcgagagcagcagcgtgtgcagcggccccagccacgccaacagaagaaccggcgtgcccagcaccgccagcgtgggcaagagcaagacccccctggtggccagaaagaaggtgttcagagccagcgtggccctgacccccaccgcccccagcagaaccggcagcgtgcagaccccccccgacctggagagcagcgaggaggtggacgccgccgagggcgcccccgaggtggtgggccccaagagcgaggtggaggagggccacggcaagctgcccagcatgcccgccgccgaggagatgcacaagaacgtggagcaggacgagctgcagcaggtgatcagagagatcaaggagagcatcgtgggcgagatcagaagagagatcgtgagcggcctgctggccgccgtgagcagcagcaaggccagcaacagcaagcaggactaccactag

SEQ ID NO: 48013 - DNA, 3780 bp, Artificial Sequence
  derived and/or modified sequence
atggacagaccactgtctagttcagctgaagccgaagaagagctcgagtggcaggtggcttcacgtcgcagaaaggcctgggccaagtgccgcagtagctggcaggcgagcgagaccgaagacctgagcaccgaggcaaccacccaagatgaggaagaagacgaggaggaagatctgcccggggcacagctccctgcagcgggaggtcgtggaaatgtgcccaatgaaaaaatagccatttggcttaaggactgtcgcactcccctgggagctagcttagatgagcagagcagctcgaccttgaagggcgtgctcgtccgcaacggaggtagtttcgaggacgatttgtcactgggagctgaggccaatcaccttcacgagtccgacgcccaaatcgaaaattgtaacaatattttggctaaagagcgtaggctgcagtttcatcaaaagggtcgatcaatgaactcgacaggatccggcaaaagctctggcaccgtttcgtctgtgagcgaactgctggagctctatgaagaggacccggaggagatcctgtataacctgggcttcggccgggacgaacccgacatcgcctcaaaaattccctctcgattctttaactccagttcattcgccaaagggattgatatcaaagtgttcttaagtgcacagatgcagcgaatggaagttgagaacccaaattatgccctgacttcacggttccggcagattgaagtgctgacaacagtcgccaacgcattctcctcactgtatagtcaggtgtccggcacccctttgcagcgaatcggatccatgtcctccgtgacctccaataaggagactgatcctccccctccactcacaagatccaatactgctaacaggctgatgaagacactgagcaagctcaacctgtgcgtggataagacagagaagggggagagcagttctccatcaccctccgcagagaagggaaagatacttaacgtctctgtgatcgaagagagtggaaacaagaatgaccaaaaatcccagaagattatgaagaaaaaagaaagctctagcatgctggcaactgttaaggaggaggtgtctgggagtagcgcagctgtaaccgaaaacgctgactccgaccgaatttctgatgaagctaactccaatttcaatcaaggtactgaaaatgagcaaagcaaggaaacacagtcccacgagtccaagctcggggaggagagcgggattgtggaatcgaagctcgattcagattttaacatcagttcccatagtgaacttgagaattcatccgaactgaagagcgtccatatctccacacccgaaaaagaaccctgtgctccgttaacaattccctctattcgcaatattatgacgcaacagaaagacagttttgagatggaggaggtgcaaagcactgagggcgaggccccacacgtcccagcaacataccagttaggtttaacgaagagcaagcgcgatcatttgctgcggacggcatcacagcactctgattcaagtggattcgctgaagattccacggattgtctctcactcaaccacctacaggttcaggaatcactccaggccatgggctccagcgccgactcctgcgattccgagaccacagtcaccagtctgggtgaagacttggcaacccccacagcccaagaccagccatactttaatgagtcggaggaggagtctctggtgcctttgcaaaaagggctggaaaaggcagcagccgtggccgataagagaaagtcaggatctcaggactttccacaatgcaacacgatagaaaatacaggaacgaagcaaagcacctgttcaccaggagaccacatcatcgaaatcacggaagtcgaggaggatctgttcccagcagaaacggtagaactactccgggaagctagcgccgagtcggacgtcggaaagtcctctgaaagcgagttcacccagtacactacccaccacatcttaaaatctcttgcttcaatagaagcgaagtgtagcgatatgtcttctgaaaatacaactggccccccatcgagcatggaccgcgtcaatacagccctgcagagagctcaaatgaaggtgtgctccctctccaaccagcgtatggggaggagcttattgaaatctaaagatctccttaaacagcgatacttgttcgcaaaagccggttaccctctgcgcaggtcgcaatccctgcccaccacactcctgtcccctgttagggtggtgtcctctgtgaacgtgcggttgagccctgggaaggaaaccagatgcagcccacccagcttcacctataagtacacccccgaggaggagcaggagctcgagaaacgtgtcatggagcatgatgggcaatccttagtgaagagcaccatttttattagtccatcctcagtgaaaaaagaagaggccccccagtccgaggcgccccgggtggaagagtgtcaccacggaagaactcctacgtgtagccggctggcacccccccctatgtcccagagcacatgtagcctacatagcatccactcagaatggcaggagagacccctgtgcgagcacacaagaacgttaagcacacattctgtgccaaatatttcgggcgccacttgctccgccttcgccagcccgtttggatgtccgtatagccaccggcatgccacctatccctaccgagtgtgttcagttaatcccccctcggccatagagatgcaattaagaagggtgcttcatgatatcaggaactcattgcagaatctgtcccaataccctatgatgagaggccctgacccagcggcggccccctattccactcaaaagagtagcgttctccccctttatgagaatacctttcaggaactccaagtgatgcgccggtccttgaatcttttccgcacccaaatgatggatctggaactggccatgctccgccagcagaccatggtataccaccatatgactgaagaagagaggtttgaagtggaccaactgcagggactcagaaattctgtgagaatggagctgcaggacttagaactccagctggaagaaagactccttgggcttgaagagcagctgagagccgtgcggatgccttccccttttagatcttctgcattgatgggaatgtgcggcagtcgatcagctgacaatttgagttgcccatccccactgaacgttatggaaccagtgaccgaactaatgcaggaacagagctacttgaagtcagagctcgggctgggcctcggcgaaatgggatttgagattccacctggtgagtctagcgaaagcgttttctcccaagccacctcagaatcatcatctgtgtgtagcggacctagtcatgccaatagacgcacaggggtgccttccactgcatcagttggcaagagtaagactcccctcgttgccaggaaaaaagtgtttcgagctagcgttgcactgacacctaccgctccatcgcggactgggtccgtgcagactcctccagacttggagagctccgaagaagtggacgcggctgagggcgcccccgaagtggttgggcccaaatctgaggttgaagagggccatggtaaactgccaagtatgcccgctgcggaggaaatgcacaaaaacgtggaacaggacgagcttcagcaggtgattagggaaatcaaagagagcatcgtgggtgaaattaggcgcgaaatcgtttcgggactcttagccgccgtttctagcagcaaagcatcgaatagcaaacaggactaccactag

SEQ ID NO: 48014 - DNA, 3780 bp, Artificial Sequence
  derived and/or modified sequence
atggaccggcccctgagcagcagcgctgaggccgaggaggagctggagtggcaggtggccagcagaagaaggaaggcctgggccaagtgccgcagctcctggcaggccagcgagacagaggacctgagcacagaggccaccacccaggatgaggaggaggatgaggaggaggacctgcccggggcccagctgcctgctgctgggggcagaggaaatgtgcccaatgagaagatcgccatctggctgaaggactgcaggacccccctgggcgccagcctggatgagcagagcagcagcaccctgaagggcgtgctggtgagaaatggaggcagctttgaagatgacctgagcctgggcgctgaggccaaccacctgcacgagagtgatgcccagatcgagaactgcaacaacatcctggccaaggagcggcggctgcagttccaccagaagggccgctccatgaacagcactggaagtggcaagagcagcggcaccgtgtcctctgtgtctgagctgctggagctgtatgaggaggaccctgaggagatcctgtacaacctgggcttcggcagagatgagccagacatcgccagcaagatccccagccgcttcttcaacagcagcagctttgccaagggcatcgacatcaaggtgttcctgagcgcccagatgcagaggatggaggtggagaaccccaactatgccctgaccagccgcttccggcagatcgaggtgctgaccaccgtggccaatgccttcagcagcctgtacagccaggtgtctggcacccccctgcagagaattggctccatgagctctgtgaccagcaacaaggagacagaccccccaccacccctgaccaggagcaacacagccaaccggctgatgaagaccctgagcaagctgaacctgtgtgtggacaagacagagaagggggagagcagcagccccagccccagcgctgagaagggcaagatcctgaatgtgtctgtcatcgaggagagcggcaacaagaatgaccagaagagccagaagatcatgaagaagaaggagagcagctccatgctggccaccgtgaaggaggaggtgtctggcagcagcgctgctgtgacagaaaatgctgacagcgaccgcatcagtgatgaggccaacagcaacttcaaccagggcacagaaaatgagcagagcaaggagacccagagccatgagagcaagctgggggaggagagcggcatcgtggagagcaagctggacagcgacttcaacatcagcagccacagcgagctggagaacagcagcgagctgaagtctgtgcacatcagcaccccagagaaggagccctgtgcccccctgaccatccccagcatccggaacatcatgacccagcagaaggacagctttgagatggaggaggtgcagagcacagaaggagaggcccctcatgtgcctgccacctaccagctgggcctgaccaagagcaagagggaccacctgctgaggacagccagccagcacagcgacagcagcggctttgctgaggacagcacagactgcctgagcctgaaccacctgcaggtgcaggagagcctgcaggccatgggcagcagcgctgacagctgtgacagcgagaccaccgtgaccagcctgggggaggacctggccacccccacagcccaggaccagccctacttcaatgaaagtgaggaggagagcctggtgcccctgcagaagggcctggagaaggctgctgctgtggccgacaagaggaagagcggcagccaggacttcccccagtgcaacaccattgaaaatacaggcaccaagcagagcacctgcagccctggggaccacatcatcgagatcacagaggtggaggaggacctcttccctgctgagaccgtggagctgctgcgggaggccagcgctgagagtgatgtgggcaagagcagcgagagcgagttcacccagtacaccacccaccacatcctgaagagcctggccagcattgaggccaagtgcagcgacatgagcagcgagaacaccaccggcccccccagctccatggacagagtgaacacagccctgcagagggcccagatgaaggtgtgcagcctgagcaaccagaggatgggccgcagcctgctgaagagcaaggacctgctgaagcagcgctacctgtttgccaaggccggctaccccctgcggcgcagccagagcctgcccaccaccctgctgagccctgtgcgggtggtgtcctctgtgaatgtgcggctgagccctgggaaggagacccgctgcagcccccccagcttcacctacaagtacaccccagaggaggagcaggagctggagaagagggtgatggagcatgatggccagagcctggtgaagagcaccatcttcatcagccccagctctgtgaagaaggaggaggccccccagagcgaggccccccgggtggaggagtgccaccacggccgcacccccacctgcagccggctggcccccccacccatgagccagagcacctgcagcctgcacagcatccacagcgagtggcaggagcggcccctgtgtgagcacaccaggaccctgagcacccacagcgtgcccaacatcagcggggccacctgcagcgcctttgccagccccttcggctgcccctacagccacagacatgccacctacccctacagagtgtgcagcgtgaaccccccatctgccatcgagatgcagctgcggcgggtgctgcatgacatccggaacagcctgcagaacctgagccagtaccccatgatgaggggccctgaccctgctgctgccccctacagcacccagaagagctctgtgctgcccctgtatgagaacaccttccaggagctgcaggtgatgagaagaagcctgaacctcttccgcacccagatgatggacctggagctggccatgctgcggcagcagaccatggtgtaccaccacatgacagaggaggagagatttgaggtggaccagctgcagggcctgaggaacagcgtgaggatggagctgcaggacctggagctgcagctggaggagcggctgctgggcctggaggagcagctgcgggctgtgaggatgcccagccccttccgcagcagcgccctgatgggcatgtgtggcagccgctctgctgacaacctgagctgccccagccccctgaatgtgatggagcctgtgacagagctgatgcaggagcagagctacctgaagtctgagctgggcctgggcctgggggagatgggctttgagatccccccaggagagagcagcgagagcgtcttcagccaggccaccagcgagagcagctctgtgtgcagcggccccagccacgccaacagaagaactggagtgcccagcacagcctctgtgggcaagagcaagacccccctggtggccaggaagaaggtgttccgggcctctgtggccctgacccccacagcccccagcaggactggatctgtgcagaccccaccagacctggagagcagcgaggaggtggatgctgctgagggcgcccctgaggtggtgggccccaagtctgaggtggaggagggccacggcaagctgcccagcatgcctgctgctgaggagatgcacaagaatgtggagcaggatgagctgcagcaggtgatccgggagatcaaggagagcatcgtgggggagatcagaagagagatcgtgtctggcctgctggccgctgtgagcagcagcaaggccagcaacagcaagcaggactaccactag

SEQ ID NO: 48015 - DNA, 3780 bp, Artificial Sequence
  derived and/or modified sequence
atggaccggcccctgagcagcagcgccgaggccgaggaggagctggaatggcaggtggcctctcggagacgtaaggcttgggccaagtgtcggtcctcttggcaggcctccgagactgaagacttgagcacagaagctaccacccaggatgaggaagaagatgaggaggaggacctaccaggggcccagcttccggccgccgggggtcggggtaacgtgccgaacgagaaaattgctatttggctcaaagactgtaggaccccgctgggggctagcttggacgagcaaagctcttcaaccttgaagggagtgttagtcaggaacggtggtagtttcgaagacgatctgtcgttaggcgcagaggcgaaccatctgcatgaatccgatgcccagatcgaaaactgcaataacatactggcgaaggagcgtagactgcagttccatcaaaaagggcggagtatgaactcaaccggatccggcaagtctagtgggaccgtgagctccgtttccgaattgctcgagttatatgaagaggatccggaggaaatattatataacctcggttttggccgggatgaaccagatatcgcaagtaagattccctcaagattctttaacagctcatctttcgctaagggtatcgatattaaagtctttctctccgctcagatgcagcggatggaggtggagaatccaaattacgccctgacaagccgattccgtcagattgaggttctgacaacagtggccaatgccttctcgtccctgtacagccaggtgagtgggaccccgttgcagagaataggatccatgtcctccgtgaccagtaataaagagacagatcctcccccaccccttacacggtctaatactgcgaatcgcctgatgaaaacactgtctaagctcaatttgtgcgtggataaaactgagaagggcgaaagttcatcaccttccccatcagctgagaaggggaagatcctgaacgtgagtgtcatcgaagaatccggcaataagaatgatcagaagtcccagaaaatcatgaagaagaaggagagtagcagcatgctagctaccgtgaaggaggaagtcagcggctccagcgcagcggtcactgagaatgcggacagcgacaggatatctgacgaggcgaactctaacttcaatcaaggcactgaaaacgaacagtctaaagaaactcagagccacgagagcaagctgggagaggaaagtggcattgtggagtcaaagctggatagcgacttcaatattagttcccactcagaactcgagaatagttcagaactcaagtctgtccatatctcaactcccgaaaaggaaccctgtgcgcctctaaccattccaagcatccgcaacatcatgacccaacaaaaagacagctttgaaatggaagaagtgcaatccaccgagggggaggcaccccacgtgccggctacctaccagctgggtctgacaaagagcaagcgggaccacttgctgcggacagcatcacaacacagcgactcgtccggcttcgcagaagatagcaccgactgtctgtcccttaatcatttgcaagtgcaggaatccctgcaggctatggggagctccgccgactcatgtgactcagaaaccacagtgactagtctgggagaagatttggccacacccaccgctcaggaccaaccctattttaacgaaagtgaggaggagtctctggtgccactccaaaaggggttggagaaagctgcagctgtggccgacaagaggaagagtggcagccaggattttcctcagtgcaatacgatcgaaaacactggcacgaaacagagtacatgcagccctggggatcatattatagaaatcactgaagttgaggaagatctctttccagccgaaacagttgaactactgagggaggcttctgccgaaagcgacgtcgggaagtccagcgagtctgagttcactcaatataccactcaccacattctgaaaagccttgcctccattgaggccaagtgtagtgatatgtcttctgagaatacgactggcccccccagtagcatggacagggtgaatacggctttacagagagcacagatgaaagtctgcagcctgtctaatcagcggatgggtaggtcgctgttgaagagcaaggatctgctcaagcagaggtacctttttgccaaagcagggtatccgctgagaaggtcccagtcgcttccgacaacattgctctcacccgtgcgcgtagtgagttctgtcaatgtgcggctgtcacccgggaaggagacccggtgctccccaccgagtttcacgtacaagtacacgccggaagaggagcaggaactggagaaacgcgtgatggagcatgacggccagagtttggtcaaaagcacaatttttatttccccctcgagtgttaagaaagaagaagccccccagtctgaggctcctagggttgaggagtgtcaccacggccgaacacccacctgctctcggttagcccctccgccaatgtcacagtctacctgcagcctacacagtatccattccgagtggcaggagcgtccattgtgcgagcacacacggacattgagcacccacagtgtgccaaatatatcaggggctacatgcagcgccttcgcctctcctttcggttgtccctatagccatagacatgccacctatccataccgggtttgcagtgttaacccgcctagcgccatcgagatgcaactgcggcgggtgctgcacgacatacgtaactctttacagaacttgagtcaataccccatgatgcgcggaccggatccagccgctgctccatattccacacagaaatcctccgtgctgcctctctatgaaaacactttccaggagttgcaggtaatgagaagatctttgaacctgtttaggactcagatgatggatctcgagttggcaatgctgcggcagcagacaatggtgtaccaccacatgaccgaagaggaacgattcgaagtggatcaactgcagggcctgcggaatagcgtcaggatggaacttcaagatctcgagctgcagctggaggaacggcttctaggcctcgaagagcaactccgagctgtccggatgccctctcctttcaggagctccgccttgatgggcatgtgcggaagtcggtctgccgataacctgagctgcccctctcccttaaacgttatggaacctgtaacggaactaatgcaggagcaatcctatctgaaatcagagctcggcctgggcctaggtgagatgggattcgaaattccccctggtgagtcctcagagtccgtcttctcacaggcaacatctgaatcttcctctgtctgttcaggtccgtcacatgccaacaggagaaccggagtgccatcaaccgcatccgtggggaaaagtaagaccccattagtggctcgaaaaaaggtttttcgcgcatctgtggccttgacaccgactgccccaagtaggacaggaagtgtgcaaacaccccctgatcttgagagcagcgaggaggtggatgctgcagaaggcgcacccgaagttgtaggccccaagagcgaggtggaggaggggcatgggaagttaccatctatgcctgcagcggaagaaatgcacaaaaatgtggaacaggacgagctgcaacaggtcatacgagagattaaggagtcaatcgtgggtgagatccgaagggaaattgttagcgggcttttagccgccgtgtcgagcagcaaagccagtaactctaagcaagactaccattag

SEQ ID NO: 48016 - DNA, 3780 bp, Artificial Sequence
  derived and/or modified sequence
atggatcgaccactgtccagcagcgccgaagccgaagaagaattagaatggcaggtcgccagcaggcgccgtaaggcgtgggccaagtgccggagctcctggcaggccagcgaaaccgaggacctgtcaacagaagctacaacccaagacgaagaggaagatgaagaggaggatttgcccggtgcccagctgcccgcagccggaggtcgcggtaacgtacccaacgagaagatcgccatctggttgaaggattgtcggacacccctgggcgcatcactcgatgagcaatctagctccaccctcaagggggtgctcgtacgcaacggcggatctttcgaggatgacctgagcctgggggctgaggctaaccacctgcacgagtccgatgcccagatagaaaactgtaacaacatcctggctaaggagagacggctgcagttccatcagaagggcaggtcgatgaacagtaccggctcgggtaagtcctcgggcaccgtgtcctctgtgagtgaacttctggaattgtatgaggaagatcccgaagagatactgtataacttgggatttggcagagacgagccagacattgcttcgaagatcccctctcgcttcttcaactccagtagcttcgccaaaggtatagacataaaggtattcttgagcgcccaaatgcaacgtatggaagtggagaatcccaactatgcgctgaccagtaggtttaggcagatagaggtactgactactgttgccaacgcctttagctccttgtactcacaggtctctgggactccactacagagaattggctcaatgtcctctgttacgtcaaacaaggaaacggatcccccaccacctcttacccggtccaacaccgcaaaccggttgatgaagaccttgtccaaacttaacttgtgcgtcgacaagactgagaaaggcgagtcaagctcacctagtcccagtgccgagaagggaaaaatcctgaacgtgagcgtcattgaagagagtgggaataagaatgatcagaaaagccagaagatcatgaagaagaaagaatcaagttcaatgctggctacagtgaaagaggaagtcagtgggtctagtgctgcagtgaccgagaatgccgacagcgaccgcatatcagatgaagcaaacagcaactttaaccagggcacagagaacgagcagtcaaaggagactcagtcccatgagagcaaattaggagaagagtcaggaatagtggaatccaaactggattctgacttcaacatttcctcacattcggagctcgaaaattctagcgagttgaagtccgtgcacattagtacacccgagaaggagccctgtgcacctctgactattccctccatcaggaatatcatgactcaacaaaaggattcatttgagatggaggaggtgcagagcacagaaggcgaggcccctcacgtgcccgctacctaccaattgggactgaccaaatctaagcgtgatcaccttctgcgtacagccagtcagcacagtgactccagtggttttgcggaagactcaacagactgtctgagccttaatcatctacaagtccaggaaagcctgcaagctatggggtcctccgcagattcttgtgattccgagactacggtgaccagcctcggggaagatctcgccacaccaaccgctcaggaccagccatatttcaatgagagcgaggaagaatctctggtcccccttcagaagggccttgaaaaagccgcagcggtagcagataagcggaaatctggcagtcaggatttccctcagtgcaataccatcgagaatactgggaccaagcagtccacgtgttcgcctggcgatcacattattgaaattactgaggttgaggaagatctgttcccagctgaaactgtggagttgctgagagaagcatccgcggagtccgatgtcgggaaatcttctgaatcagagttcacccagtacaccacgcaccatattttgaaatccctcgcatcaattgaagcaaaatgctctgacatgagtagtgagaacacgactggacccccttcttctatggaccgggtcaataccgcccttcaaagggcgcaaatgaaagtttgttctctcagcaaccaacggatgggtcgttctcttcttaaatcgaaggatcttctcaaacagcgttacctcttcgccaaggcgggatacccactgcgtcgatcacagagtctgcccacgacccttctgtctccagttcgcgtcgtgtcctcagtaaatgtgagactgagtccgggaaaagagactcggtgctcccctccaagcttcacttataaatacactccggaggaggaacaggaactcgaaaaacgcgttatggaacacgatgggcaatctctggtaaagagtaccatattcatctcgcctagcagcgtgaagaaagaggaggccccacagagcgaagcacccagggttgaggagtgtcaccacggaagaacgccaacctgttctaggctggctcctccaccaatgagtcagtcaacttgctccttacatagtatccatagcgagtggcaggagcggcctctctgtgagcacacgcggacgctaagcacccactcagtgcccaatatctccggagctacctgcagcgcattcgcctctccatttgggtgtccatactcccacagacacgccacctatccttaccgagtctgttccgtgaaccctccatcggctattgagatgcagctaagacgcgtcttgcatgatatccggaatagcttgcagaatttgtcacaataccctatgatgagggggcctgaccccgcagccgctccctattccacccaaaagtcaagcgtgttaccactctacgagaacacatttcaggaactgcaggttatgagaaggagtttgaatttgttcagaacgcagatgatggatctcgagctcgccatgctgcgccagcagactatggtgtaccaccacatgacggaggaagaacggtttgaagtggaccagcttcagggtttacgtaactccgtgagaatggagcttcaggacctcgagctccaactcgaggagcgacttttgggcctggaggagcagttgcgagctgtgagaatgcctagtccattccggagctctgccttgatgggcatgtgtggatcccggtcagccgataatctatcatgtccatcgccactgaacgtgatggagcctgttaccgaactgatgcaggaacagtcctatctgaaatctgaactgggcctgggactgggcgaaatgggttttgaaatacccccaggcgagtcatctgagtccgtcttttcgcaagcaacaagcgagtcatcgtcagtgtgttctgggcctagtcatgcaaaccgacggacaggggtcccttccaccgctagtgtgggaaagtcaaagacccctctggtggcccgaaagaaggtctttcgggcatcagtagccttgactccaacagctccctcccgaaccggttctgtgcagaccccaccagaccttgagagttccgaggaggtggacgctgccgaaggggctcctgaagtcgtgggacctaagtccgaagtggaagaagggcatggcaaattgcctagcatgcctgccgctgaggaaatgcacaaaaacgtcgaacaggatgaactgcagcaggtgatccgggagataaaggagtcaatcgtgggtgaaatccgcagggaaattgtgtccgggctgctggctgctgtgagcagctccaaagcgtccaatagtaaacaagactaccactag

SEQ ID NO: 48017 - DNA, 5150 bp, Artificial Sequence
  derived and/or modified sequence
ctccccttccttccctccctccctccctgtcccctcctcctcctcctcctcctccggcgcccgcttcagctccccggggccccctgcccggccgggcgctgacagcaagggcgggggtccctgccgccgccttgtctcgcgcagggtccggctggggtagcggagcccccagtgcggccatggaccggcccctgtcgtcgtcggcggaggcggaggaggaactggagtggcaagtggcgagtcgcaggaggaaggcctgggccaagtgccgcagctcctggcaagcgtcggagacggaggatctgtccacagaagcgacgacgcaggacgaggaggaggacgaggaggaggacctccccggcgcgcagctgccggcagcggggggaagaggaaacgtgcccaacgagaagatcgcgatatggctcaaggactgccgtacacctttgggagcctcactggatgaacaaagcagtagtacactcaagggtgtgcttgtgagaaatggaggaagttttgaagatgatttgtcattgggagctgaagccaaccacctccatgaaagtgatgctcaaattgaaaactgcaataatatcttggccaaagagagaagattacagtttcatcagaaagggagaagtatgaattccactggatctgggaaaagtagtgggacagtttcaagtgtttcagaattgttggaactttatgaggaagatcctgaagaaattctttataatcttggatttggacgtgatgaaccagatattgcttctaaaattccttccagattttttaattcatcatcctttgccaaagggatagatattaaagtatttttgagtgctcagatgcaacggatggaagtagaaaacccaaattatgctttaacaagccgttttcgtcaaattgaagtgcttactactgtggccaatgcgttttcttctttatattctcaagtctccgggacgcccctgcagagaattggaagtatgtcctcagtgacctctaacaaggagacagacccacctccacctttaactcgaagtaacactgcaaatcgtttaatgaaaacactctcaaaactgaatttatgtgttgataaaacagagaaaggagaaagtagtagtccttctccatcagctgaaaaaggaaagattctaaatgtttcagtgattgaagaaagtggcaataaaaacgatcaaaagtctcaaaaaattatgaagaagaaagagtcatcttctatgttggctacagttaaagaagaagtctctggtagttcagcagctgttacggagaatgctgatagtgatagaatttctgatgaagcaaatagtaattttaaccaaggaactgaaaatgaacaaagtaaagaaactcaaagtcatgagagtaaactgggtgaggaatctggtattgtagaatccaaattagatagtgatttcaacatatccagccacagtgagctggaaaatagcagtgagctgaaaagtgtccatatatccacacctgaaaaagagccttgtgcaccactgacaataccatccataagaaatataatgacacagcagaaggactccttcgaaatggaagaggttcaaagtacggagggagaagctcctcatgttccagccacttaccagctaggtcttacgaagtcgaaaagagatcatctgttacgtactgcaagtcagcattccgatagcagtggttttgctgaagattctacagactgcctatcccttaatcatcttcaggttcaggagtccttgcaggctatggggagtagtgctgatagttgtgacagtgagacaacagttacgtcacttggtgaagaccttgccacaccaacagcacaagaccagccttattttaatgaatcagaggaggagtctcttgtccctcttcagaagggactagagaaggcagcagcagttgcagacaaaagaaaatcaggtagccaggatttccctcagtgcaacaccattgagaatacaggaactaaacagtccacctgtagtccaggggatcatatcattgaaattactgaagtggaagaggatttgtttccagcagagacagtagagctactgagggaagcaagtgctgaaagtgatgtgggtaaaagcagtgaaagtgaatttactcagtataccacacaccatattctgaaatcattggcttctattgaagctaaatgcagtgatatgagctctgaaaatacaactgggcctccctcttccatggacagagttaatacagctttgcaaagagctcaaatgaaggtttgcagtctgtctaatcaaaggatggggcgtagcctgctaaaatcaaaagatttgttaaaacaaaggtacttatttgcaaaagctggctatcctctaagaaggtctcagtctttaccaaccaccttattgagcccagtaagggttgtgtcctctgtcaatgttcgattatctccaggaaaagagaccagatgcagcccaccttccttcacctataagtacacacctgaagaggagcaggaattggaaaagcgggtgatggaacatgatggtcagtctttagttaaatcgaccattttcatctctccatcatctgtgaagaaagaagaagccccccagagtgaggcgccgcgggtggaggaatgccatcatggaaggactcctacctgttcacggcttgctccaccaccaatgtctcagtctacctgttcccttcattccatccactctgagtggcaagaaaggcccctgtgtgagcacacaagaactctgagcactcacagtgttcccaacatatcaggggctacttgtagtgccttcgcttcccctttcgggtgtccttactcacatagacatgccacctacccttaccgagtgtgctctgtgaatcctccttcagccatagaaatgcagttgcgaagagtattacatgatattagaaactcactgcagaatctttcacagtaccctatgatgagaggacctgatcctgctgctgctccatatagtactcagaaatcatctgttctacctctttatgaaaatacttttcaggagctccaggtaatgaggcggagcctgaatttgtttagaacacaaatgatggatttagaattggcaatgctgcgtcagcaaaccatggtttatcatcatatgactgaggaggagaggtttgaagttgatcagctccagggtttgagaaattcagtccgaatggaacttcaggacctggaactgcagctggaggagcgcctgctgggcctggaggagcagcttcgtgctgtgcgcatgccttcacccttccgctcctccgcactcatgggaatgtgtggcagtagaagcgctgataacttgtcatgcccttctccattgaatgtaatggaaccagtcactgaactgatgcaggagcagtcatacctgaagtctgaattgggcctgggacttggagaaatgggatttgaaattcctcctggagaaagctcagaatctgttttttcccaagcaacatcagaatcatcttctgtatgttctggtccctctcatgctaacagaagaactggagtaccttctactgcctcagtgggcaaatccaaaaccccattagtggcaaggaagaaagtgttccgagcatcggtggctctaacgccaacagctccttctagaacaggctctgtgcagacacctccagatttggaaagttctgaggaagttgatgcagctgaaggagccccagaagttgtaggacctaaatctgaagtggaagaagggcatggaaaactcccatcaatgccagctgctgaggaaatgcataaaaatgtggagcaagatgagttgcagcaagtcatacgggagattaaagagtctattgttggggaaatcagacgggaaattgtaagtggacttttggcagcagtatcttcaagtaaagcgtctaattctaagcaagattatcattaaacagaaattataggttggcatggatcctattagctgtgtaatactggaattatcaatgatatgcactggtggaggtgttatttgtgctttagaagatacttgctgttgagctgggctactgtatacagtgtacaatgtgtatttcttcaaccatatattttaaaaagacgtacatagaaacttaggcactttgctatttcttttctaaactatcaaaaactctagcagtttgaaaagcctaatatttatttgtatgtcagtatttttcatttgattccctattagaattaattttaaaacttgaagacttccagacttatccaacttataaataacatatttcttcagactaacatcttaaaacactgacctctatgaggtatttactgtgcaataactgattcatttttttcagagcttgaagcatccaatgatttttccctccactgctgttaattaatgtcacttccaagaagaaaaactgttctgttgtaaaaaatataattgctcttaattcttggggaggttactaatagcagtaggatagaattttatgaggttacctacaactacttaatgtacttacactgtaagccttgttgctttacccaagacaaatgtaattttatcattgcttatgtagtatttttcttttggaaatgtgccttatgttaaacactatgtacttttactttttgcattgtccagacttctttattagatggagatgtttctttttctgtcttctagactaaatagagtatcatccaaataatggggcctatgacttgaatgaatagaaatgaataagctggtgtttgttttttcaaaatggaagtaatttagatttgttctcctcatacataaaatgattttagttcagttttaaccagtgaaaactttgtttttatgaaaaaaaaggaaaatggtttcccatttggttttatatgtgttaaataaatgtgtaaagtaaccaccaaatgttattagaatttttcttctagcatttataattttttcaactcctattgtgtttctttgtgtgtgatattttaatcaaaagtggttgagttgttaacagtgttctttgaaagaatctctaaaaggcttataaatgtttgaaatatcacacaaaggctgatttctaaaatatatatatattaaaacaataaagtatttattttgcctaaa

SEQ ID NO: 48018 - protein, 2081 aa, Artificial Sequence
  derived and/or modified sequence
MLCCLLVRASNLPSAKKDRRSDPVASLTFRGVKKRTKVIKNSVNPVWNEGFEWDLKGIPLDQGSELHVVVKDHETMGRNRFLGEAKVPLREVLATPSLSASFNAPLLDTKKQPTGASLVLQVSYTPLPGAVPLFPPPTPLEPSPTLPDLDVVADTGGEEDTEDQGLTGDEAEPFLDQSGGPGAPTTPRKLPSRPPPHYPGIKRKRSAPTSRKLLSDKPQDFQIRVQVIEGRQLPGVNIKPVVKVTAAGQTKRTRIHKGNSPLFNETLFFNLFDSPGELFDEPIFITVVDSRSLRTDALLGEFRMDVGTIYREPRHAYLRKWLLLSDPDDFSAGARGYLKTSLCVLGPGDEAPLERKDPSEDKEDIESNLLRPTGVALRGAHFCLKVFRAEDLPQMDDAVMDNVKQIFGFESNKKNLVDPFVEVSFAGKMLCSKILEKTANPQWNQNITLPAMFPSMCEKMRIRIIDWDRLTHNDIVATTYLSMSKISAPGGEIEEEPAGAVKPSKASDLDDYLGFLPTFGPCYINLYGSPREFTGFPDPYTELNTGKGEGVAYRGRLLLSLETKLVEHSEQKVEDLPADDILRVEKYLRRRKYSLFAAFYSATMLQDVDDAIQFEVSIGNYGNKFDMTCLPLASTTQYSRAVFDGCHYYYLPWGNVKPVVVLSSYWEDISHRIETQNQLLGIADRLEAGLEQVHLALKAQCSTEDVDSLVAQLTDELIAGCSQPLGDIHETPSATHLDQYLYQLRTHHLSQITEAALALKLGHSELPAALEQAEDWLLRLRALAEEPQNSLPDIVIWMLQGDKRVAYQRVPAHQVLFSRRGANYCGKNCGKLQTIFLKYPMEKVPGARMPVQIRVKLWFGLSVDEKEFNQFAEGKLSVFAETYENETKLALVGNWGTTGLTYPKFSDVTGKIKLPKDSFRPSAGWTWAGDWFVCPEKTLLHDMDAGHLSFVEEVFENQTRLPGGQWIYMSDNYTDVNGEKVLPKDDIECPLGWKWEDEEWSTDLNRAVDEQGWEYSITIPPERKPKHWVPAEKMYYTHRRRRWVRLRRRDLSQMEALKRHRQAEAEGEGWEYASLFGWKFHLEYRKTDAFRRRRWRRRMEPLEKTGPAAVFALEGALGGVMDDKSEDSMSVSTLSFGVNRPTISCIFDYGNRYHLRCYMYQARDLAAMDKDSFSDPYAIVSFLHQSQKTVVVKNTLNPTWDQTLIFYEIEIFGEPATVAEQPPSIVVELYDHDTYGADEFMGRCICQPSLERMPRLAWFPLTRGSQPSGELLASFELIQREKPAIHHIPGFEVQETSRILDESEDTDLPYPPPQREANIYMVPQNIKPALQRTAIEILAWGLRNMKSYQLANISSPSLVVECGGQTVQSCVIRNLRKNPNFDICTLFMEVMLPREELYCPPITVKVIDNRQFGRRPVVGQCTIRSLESFLCDPYSAESPSPQGGPDDVSLLSPGEDVLIDIDDKEPLIPIQEEEFIDWWSKFFASIGEREKCGSYLEKDFDTLKVYDTQLENVEAFEGLSDFCNTFKLYRGKTQEETEDPSVIGEFKGLFKIYPLPEDPAIPMPPRQFHQLAAQGPQECLVRIYIVRAFGLQPKDPNGKCDPYIKISIGKKSVSDQDNYIPCTLEPVFGKMFELTCTLPLEKDLKITLYDYDLLSKDEKIGETVVDLENRLLSKFGARCGLPQTYCVSGPNQWRDQLRPSQLLHLFCQQHRVKAPVYRTDRVMFQDKEYSIEEIEAGRIPNPHLGPVEERLALHVLQQQGLVPEHVESRPLYSPLQPDIEQGKLQMWVDLFPKALGRPGPPFNITPRRARRFFLRCIIWNTRDVILDDLSLTGEKMSDIYVKGWMIGFEEHKQKTDVHYRSLGGEGNFNWRFIFPFDYLPAEQVCTIAKKDAFWRLDKTESKIPARVVFQIWDNDKFSFDDFLGSLQLDLNRMPKPAKTAKKCSLDQLDDAFHPEWFVSLFEQKTVKGWWPCVAEEGEKKILAGKLEMTLEIVAESEHEERPAGQGRDEPNMNPKLEDPRRPDTSFLWFTSPYKTMKFILWRRFRWAIILFIILFILLLFLAIFIYAFPNYAAMKLVKPFS

SEQ ID NO: 48019 - DNA, 6682 bp, Artificial Sequence
  derived and/or modified sequence
tctccgcggaggagcagcgaaggcgacagctctcttggcgcggctgcctgggagccgggcgcttgctgggtgggtgctcgggcccggtgctcccgctcccgccctgactgcgcgcctgtgtgccgccggggctgcccagccatgctgtgctgcctgctggtgagggccagcaacctccccagtgcgaagaaggaccggcgcagcgaccctgtcgcaagcctgactttccgaggggtgaagaagagaaccaaagtcatcaagaacagcgtgaaccctgtatggaatgagggatttgaatgggacctcaagggcatccccctggaccagggctctgagcttcatgtggtggtcaaagaccatgagacgatggggaggaacaggttcctgggggaagccaaggtcccactccgagaggtcctcgccacccctagtctgtccgccagcttcaatgcccccctgctggacaccaagaagcagcccacaggggcctcgctggtcctgcaggtgtcctacacaccgctgcctggagctgtgcccctgttcccgccccctactcctctggagccctccccgactctgcctgacctggatgtagtggcagacacaggaggagaggaagacacagaggaccagggactcactggagatgaggcggagccattcctggatcaaagcggaggcccgggggctcccaccaccccaaggaaactaccttcacgtcctccgccccactaccccgggatcaaaagaaagcgaagtgcgcctacatctagaaagctgctgtcagacaaaccgcaggatttccagatcagggtccaggtgatcgaggggcgccagctgccgggggtgaacatcaagcctgtggtcaaggttaccgctgcagggcagaccaagcggacgcggatccacaagggaaacagcccactcttcaatgagactcttttcttcaacttgtttgactctcctggggagctgtttgatgagcccatctttatcacggtggtagactctcgttctctcaggacagatgctctcctcggggagttccggatggacgtgggcaccatttacagagagccccggcacgcctatctcaggaagtggctgctgctctcagaccctgatgacttctctgctggggccagaggctacctgaaaacaagcctttgtgtgctggggcctggggacgaagcgcctctggagagaaaagacccctctgaagacaaggaggacattgaaagcaacctgctccggcccacaggcgtagccctgcgaggagcccacttctgcctgaaggtcttccgggccgaggacttgccgcagatggacgatgccgtgatggacaacgtgaaacagatctttggcttcgagagtaacaagaagaacttggtggacccctttgtggaggtcagctttgcggggaaaatgctgtgcagcaagatcttggagaagacggccaaccctcagtggaaccagaacatcacactgcctgccatgtttccctccatgtgcgaaaaaatgaggattcgtatcatagactgggaccgcctgactcacaatgacatcgtggctaccacctacctgagtatgtcgaaaatctctgcccctggaggagaaatagaagaggagcctgcaggtgctgtcaagccttcgaaagcctcagacttggatgactacctgggcttcctccccacttttgggccctgctacatcaacctctatggcagtcccagagagttcacaggcttcccagacccctacacagagctcaacacaggcaagggggaaggtgtggcttatcgtggccggcttctgctctccctggagaccaagctggtggagcacagtgaacagaaggtggaggaccttcctgcggatgacatcctccgggtggagaagtaccttaggaggcgcaagtactccctgtttgcggccttctactcagccaccatgctgcaggatgtggatgatgccatccagtttgaggtcagcatcgggaactacgggaacaagttcgacatgacctgcctgccgctggcctccaccactcagtacagccgtgcagtctttgacgggtgccactactactacctaccctggggtaacgtgaaacctgtggtggtgctgtcatcctactgggaggacatcagccatagaatcgagactcagaaccagctgcttgggattgctgaccggctggaagctggcctggagcaggtccacctggccctgaaggcgcagtgctccacggaggacgtggactcgctggtggctcagctgacggatgagctcatcgcaggctgcagccagcctctgggtgacatccatgagacaccctctgccacccacctggaccagtacctgtaccagctgcgcacccatcacctgagccaaatcactgaggctgccctggccctgaagctcggccacagtgagctccctgcagctctggagcaggcggaggactggctcctgcgtctgcgtgccctggcagaggagccccagaacagcctgccggacatcgtcatctggatgctgcagggagacaagcgtgtggcataccagcgggtgcccgcccaccaagtcctcttctcccggcggggtgccaactactgtggcaagaattgtgggaagctacagacaatctttctgaaatatccgatggagaaggtgcctggcgcccggatgccagtgcagatacgggtcaagctgtggtttgggctctcagtggatgagaaggagttcaaccagtttgctgaggggaagctgtctgtctttgctgaaacctatgagaacgagactaagttggcccttgttgggaactggggcacaacgggcctcacctaccccaagttttctgacgtcacgggcaagatcaagctacccaaggacagcttccgcccctcggccggctggacctgggctggagattggttcgtgtgtccggagaagactctgctccatgacatggacgccggtcacctgagcttcgtggaagaggtgtttgagaaccagacccggcttcccggaggccagtggatctacatgagtgacaactacaccgatgtgaacggggagaaggtgcttcccaaggatgacattgagtgcccactgggctggaagtgggaagatgaggaatggtccacagacctcaaccgggctgtcgatgagcaaggctgggagtatagcatcaccatccccccggagcggaagccgaagcactgggtccctgctgagaagatgtactacacacaccgacggcggcgctgggtgcgcctgcgcaggagggatctcagccaaatggaagcactgaaaaggcacaggcaggcggaggcggagggcgagggctgggagtacgcctctctttttggctggaagttccacctcgagtaccgcaagacagatgccttccgccgccgccgctggcgccgtcgcatggagccactggagaagacggggcctgcagctgtgtttgcccttgagggggccctgggcggcgtgatggatgacaagagtgaagattccatgtccgtctccaccttgagcttcggtgtgaacagacccacgatttcctgcatattcgactatgggaaccgctaccatctacgctgctacatgtaccaggcccgggacctggctgcgatggacaaggactctttttctgatccctatgccatcgtctccttcctgcaccagagccagaagacggtggtggtgaagaacacccttaaccccacctgggaccagacgctcatcttctacgagatcgagatctttggcgagccggccacagttgctgagcaaccgcccagcattgtggtggagctgtacgaccatgacacttatggtgcagacgagtttatgggtcgctgcatctgtcaaccgagtctggaacggatgccacggctggcctggttcccactgacgaggggcagccagccgtcgggggagctgctggcctcttttgagctcatccagagagagaagccggccatccaccatattcctggttttgaggtgcaggagacatcaaggatcctggatgagtctgaggacacagacctgccctacccaccaccccagagggaggccaacatctacatggttcctcagaacatcaagccagcgctccagcgtaccgccatcgagatcctggcatggggcctgcggaacatgaagagttaccagctggccaacatctcctcccccagcctcgtggtagagtgtgggggccagacggtgcagtcctgtgtcatcaggaacctccggaagaaccccaactttgacatctgcaccctcttcatggaagtgatgctgcccagggaggagctctactgcccccccatcaccgtcaaggtcatcgataaccgccagtttggccgccggcctgtggtgggccagtgtaccatccgctccctggagagcttcctgtgtgacccctactcggcggagagtccatccccacagggtggcccagacgatgtgagcctactcagtcctggggaagacgtgctcatcgacattgatgacaaggagcccctcatccccatccaggaggaagagttcatcgattggtggagcaaattctttgcctccataggggagagggaaaagtgcggctcctacctggagaaggattttgacaccctgaaggtctatgacacacagctggagaatgtggaggcctttgagggcctgtctgacttttgtaacaccttcaagctgtaccggggcaagacgcaggaggagacagaagatccatctgtgattggtgaatttaagggcctcttcaaaatttatcccctcccagaagacccagccatccccatgcccccaagacagttccaccagctggccgcccagggaccccaggagtgcttggtccgtatctacattgtccgagcatttggcctgcagcccaaggaccccaatggaaagtgtgatccttacatcaagatctccatagggaagaaatcagtgagtgaccaggataactacatcccctgcacgctggagcccgtatttggaaagatgttcgagctgacctgcactctgcctctggagaaggacctaaagatcactctctatgactatgacctcctctccaaggacgaaaagatcggtgagacggtcgtcgacctggagaacaggctgctgtccaagtttggggctcgctgtggactcccacagacctactgtgtctctggaccgaaccagtggcgggaccagctccgcccctcccagctcctccacctcttctgccagcagcatagagtcaaggcacctgtgtaccggacagaccgtgtaatgtttcaggataaagaatattccattgaagagatagaggctggcaggatcccaaacccacacctgggcccagtggaggagcgtctggctctgcatgtgcttcagcagcagggcctggtcccggagcacgtggagtcacggcccctctacagccccctgcagccagacatcgagcaggggaagctgcagatgtgggtcgacctatttccgaaggccctggggcggcctggacctcccttcaacatcaccccacggagagccagaaggtttttcctgcgttgtattatctggaataccagagatgtgatcctggatgacctgagcctcacgggggagaagatgagcgacatttatgtgaaaggttggatgattggctttgaagaacacaagcaaaagacagacgtgcattatcgttccctgggaggtgaaggcaacttcaactggaggttcattttccccttcgactacctgccagctgagcaagtctgtaccattgccaagaaggatgccttctggaggctggacaagactgagagcaaaatcccagcacgagtggtgttccagatctgggacaatgacaagttctcctttgatgattttctgggctccctgcagctcgatctcaaccgcatgcccaagccagccaagacagccaagaagtgctccttggaccagctggatgatgctttccacccagaatggtttgtgtccctttttgagcagaaaacagtgaagggctggtggccctgtgtagcagaagagggtgagaagaaaatactggcgggcaagctggaaatgaccttggagattgtagcagagagtgagcatgaggagcggcctgctggccagggccgggatgagcccaacatgaaccctaagcttgaggacccaaggcgccccgacacctccttcctgtggtttacctccccatacaagaccatgaagttcatcctgtggcggcgtttccggtgggccatcatcctcttcatcatcctcttcatcctgctgctgttcctggccatcttcatctacgccttcccgaactatgctgccatgaagctggtgaagcccttcagctgaggactctcctgccctgtagaaggggccgtggggtcccctccagcatgggactggcctgcctcctccgcccagctcggcgagctcctccagacctcctaggcctgattgtcctgccagggtgggcagacagacagatggaccggcccacactcccagagttgctaacatggagctctgagatcaccccacttccatcatttccttctcccccaacccaacgcttttttggatcagctcagacatatttcagtataaaacagttggaaccacaaaaaaaaaaaaaaaaaaaaaaaaa

SEQ ID NO: 48020 - DNA, 6243 bp, Artificial Sequence
  derived and/or modified sequence
atgctctgttgtttgctggtcagagcctccaacctgccttccgcaaagaaagaccgcaggagcgatccggttgctagtctgacgtttcggggcgtgaaaaagaggacaaaagtgattaaaaatagcgtgaaccccgtttggaacgagggtttcgagtgggacctcaaagggattcccctcgaccagggcagcgaacttcatgttgtagttaaagaccatgagacaatggggcgaaaccggttccttggcgaggctaaagtacccctgagggaagtcctggcaacaccatccctttccgccagtttcaacgccccgcttctggacacgaagaaacagcctactggcgcttctttggtgctacaagtgagctatacccccttgccaggagccgtacccctgttccccccccctacgccactggagccatctcctacactacccgatcttgacgtggtggcggatacaggaggcgaggaggataccgaagaccaggggttgacgggtgatgaggcagaacccttcctcgaccagtccggcggccccggcgcccccaccacccctcggaagctacctagccggccacctccgcactaccctggcataaagcgcaagcggtcggcacccacttctcgaaaactcctgtccgacaaaccgcaagacttccagatccgggttcaagtgattgaaggccgccagcttcctggcgtcaatattaagcctgtcgtgaaagtcaccgccgctggccaaaccaaaagaacaagaatccacaaaggcaattcacccttgttcaacgaaacgctattcttcaacctgttcgactcaccaggcgagctcttcgatgaaccaatctttatcacagtagtggattcgcggtcactccggactgatgccctgctgggagaatttcggatggatgtcgggaccatctatagagaaccgcgccacgcttaccttcggaagtggctactcctgtctgatcccgacgatttttcagccggcgcaagagggtacttaaaaaccagtctgtgcgtactagggcctggcgatgaagcccccctggagagaaaggacccgagtgaggataaagaggatatcgaaagcaacctactgcgtcccaccggcgtggctctccggggagcacatttctgtctgaaagtctttcgtgcggaggatctcccccagatggatgacgctgtgatggataacgtcaaacagatcttcggctttgaaagcaataaaaagaacttagtggatccctttgtagaggtgtcgttcgctgggaaaatgctgtgttctaagattctggaaaaaactgccaatccacagtggaatcagaacataaccctgccagctatgtttccgtctatgtgcgaaaagatgcggatccgaattatcgattgggacagactcacacataacgacattgtcgctacgacttatcttagtatgtccaagatctcagcgcctggaggggaaattgaggaggagcccgctggcgccgtgaagccatccaaagcgagcgacctcgacgactacctcggttttctccctaccttcggaccctgctatattaatttgtacggaagtccccgcgagttcaccggatttcctgacccttatacagaactgaacacaggtaagggcgagggagtggcctataggggccggcttttactgagtttggaaactaaactggttgaacactcggaacagaaggtagaggatcttcctgccgatgacatcctgagagtggaaaagtacctgcgcaggaggaagtatagtttatttgccgccttttattcagcaacaatgctgcaggacgtagacgatgccattcagtttgaggtatccatcggcaactatgggaacaaattcgacatgacgtgccttccactggcgagtaccacacaatatagtagggctgtcttcgacggctgtcactactactatctcccatggggtaacgtgaaacctgtggtcgtgctgtcatcttattgggaggatatctcacaccgtatagagacccaaaaccagctactgggaatagcagataggttggaagcaggcctcgagcaggtgcatcttgccttaaaggcacagtgttccactgaggacgtggatagtctggtagcacagctcacggacgaacttatcgcagggtgctctcagcccctgggggacatccacgagaccccatccgcaacacatcttgatcagtatctttatcaactgagaacccatcacctatcccagattacagaggccgctctggcgctcaaactgggtcatagcgagttgccagccgcccttgaacaggcagaagactggctgctcaggttgagagccctggccgaggaaccccaaaattccctcccggatatagtgatctggatgctccaaggggataaacgggtggcttatcagcgagtccctgctcaccaggtgcttttctctaggaggggagctaactactgcggtaagaattgcggcaaattgcagacgatatttttgaaataccctatggaaaaagtaccaggagcgcgcatgccagtccaaataagggtgaagctgtggtttggactcagtgtggacgaaaaggagtttaaccagttcgcagaggggaagttgagtgtgtttgccgaaacctacgagaatgaaaccaagttggctctagtgggaaattggggtaccactgggctaacttatccaaagttttctgacgtgaccggcaagatcaaactgcccaaagactctttccgcccaagtgctggttggacatgggcgggcgactggttcgtttgcccagagaagacattgttgcacgatatggatgcgggacacttgtcattcgttgaggaggtgttcgagaaccagacacgcctcccagggggtcagtggatttatatgagcgataattacacggatgttaatggagagaaagtgctccctaaggatgatatcgagtgtccgctcggttggaagtgggaagacgaggagtggtcaactgatctcaatagagctgtggacgagcagggatgggagtatagcataacaatccccccagagagaaaaccgaaacactgggtccccgctgagaaaatgtattacacccaccgccgaaggaggtgggttagactgcgacgacgtgacctctctcaaatggaggcgctgaaaaggcaccgacaggcagaggccgagggtgagggatgggaatatgccagtttattcggctggaaattccacctggagtacaggaaaacggatgcattccgacgtcgacgctggaggcgccggatggagccactggagaagacgggacccgcagcggtctttgcgcttgagggggctctcggaggggttatggatgataagtcagaggacagcatgtccgtctcgacactctcctttggagtgaacaggccaaccatcagctgcatttttgattatggcaaccgatatcatttgcggtgctatatgtatcaagctagagacctggccgccatggacaaagacagcttctccgacccttatgccattgtgagtttcctgcatcagtcacagaagactgtggttgtcaaaaatacactgaacccgacgtgggaccaaacgttaattttctacgagatcgaaattttcggcgagcctgcgacagtggctgaacagcctccatctatagtagttgagctgtacgaccacgatacatatggagccgatgaattcatggggcgttgtatatgccaacctagccttgagcgcatgcctcggctggcctggttccccctgacccgagggagccagcccagcggggagctcctggcttcattcgagctgattcaaagagagaagccagcaatccaccacataccgggtttcgaagtccaggaaacttccaggatcctggacgaatcggaagacacagatctgccatatcctccaccacagcgagaggccaatatttatatggtaccccaaaacattaagcccgcgttgcaacggaccgcgatagagatccttgcttgggggttgaggaacatgaagtcctatcagctcgcaaatatatcatcaccttctctggtcgtggagtgcggaggtcaaaccgtacagagttgcgtcattcggaatctgagaaaaaatcctaactttgatatctgcacgttgtttatggaagtgatgttaccacgcgaggaactgtattgtcccccaattaccgtgaaggtgatagataaccggcagttcggtcgacgtccagtggtgggacaatgcacaattcgctcgctcgagagcttcttgtgtgatccttacagtgcagagagcccctctccccagggcggacctgatgacgtctctctactgtctccaggggaagatgtgctgatagatattgatgacaaggagcctctgatccccatccaggaggaggagtttattgattggtggtcaaagttcttcgcttctatcggcgagagggaaaagtgcggctcttaccttgaaaaggactttgacacacttaaagtatatgacacccaactagagaacgtggaggctttcgaggggctgagtgatttctgcaacaccttcaagctatacagaggtaaaacccaggaggagaccgaggatcctagcgtgattggtgagtttaaaggtcttttcaagatctatccactccccgaagatcccgctatcccgatgccaccccgacaattccaccagctggccgcccagggtccgcaggagtgcctggtcagaatctatattgtgagagctttcggcctccagcccaaagatcctaacggcaagtgcgacccgtatatcaaaatcagtatagggaaaaagtcggtttcggaccaggacaattacattccttgtactctcgaacctgttttcggtaagatgtttgagttaacatgcacactccctctggagaaagacttgaaaattactttatatgattatgacctgcttagtaaagacgagaagattggagagacagttgtggacctggagaatcgactcctcagcaagttcggagctaggtgtgggctgccccaaacctactgtgtgtccgggcccaaccagtggagggatcagctgcgacccagccaactgcttcacctgttttgtcagcaacacagagtgaaagctcctgtctaccggacggacagagtgatgttccaggacaaggagtatagtattgaggagatcgaagccggccgtatcccaaatcctcatcttggaccagttgaagagcggttggccctacacgtgttgcagcagcagggtttagtgcccgaacatgtcgaatccagacccctatacagtccactgcagccagacatcgagcaggggaagctgcagatgtgggtagatctctttccaaaggctctggggcgccccggtccaccgtttaacatcactccaaggcgcgcccgccggttcttcctacgctgtatcatctggaacacccgagatgttattctcgacgatcttagcctgacaggtgagaaaatgagtgacatctacgtgaagggatggatgattggctttgaggaacataaacagaagacagacgtgcactataggtctttggggggtgagggcaattttaactggcgattcatatttcccttcgattatttgcctgcagaacaggtttgcactattgcgaaaaaggatgcattttggaggttagacaaaacggagagcaaaattcccgccagagtagtgttccagatctgggacaatgataagttctcattcgacgatttcttggggtcccttcagcttgatttaaacagaatgcctaaacctgcaaagaccgcaaaaaagtgctccctagaccaactggatgatgcttttcacccagagtggtttgtgagcctgtttgaacagaagaccgtcaaagggtggtggccctgtgtagcagaagaaggcgagaagaagatcttagcaggcaagttagagatgacattagagatcgtcgccgagtctgagcacgaggagcgcccagccggccagggaagggatgaacccaatatgaacccaaagctggaggacccccggaggccagatacatcctttctctggttcacaagcccttacaagaccatgaaatttatactttggaggcgctttcggtgggcaataatcttattcattatcctgttcatactgctactgttcctggccatttttatctacgcctttccgaactacgcagctatgaagctggtgaagccgttctcc

SEQ ID NO: 48021 - DNA, 6243 bp, Artificial Sequence
  derived and/or modified sequence
atgctgtgctgtcttcttgtgagagccagtaacctacctagtgccaagaaggatcggcgatcagatccggtggcttctctgaccttccgtggtgtcaagaagcgaaccaaggtgatcaagaattctgtcaaccccgtgtggaatgaggggtttgaatgggaccttaaaggcattccgttagaccaggggtctgagctacacgtggtggtgaaggaccacgagaccatgggccgcaaccgatttctgggtgaggccaaagttcctttgagggaggtgctggctactccctccctttctgccagcttcaacgcccccctgctggacactaagaagcagcctaccggggctagcctcgtcctgcaggtctcctatacccctctcccaggagcagtgccattatttcccccacccaccccccttgagccctctccaacgttgcctgacctggacgtcgtggctgacacgggcggggaggaggatacagaggatcagggtcttacaggggacgaagccgagccattcctggaccagtccgggggccccggggctcctaccactcctaggaagcttccgtccaggcccccgccccattaccctgggattaagaggaaaagaagtgcccccacgtctaggaagttgctttccgataagccgcaggatttccagattcgagttcaggtcatcgaagggcggcagttacccggcgtgaatatcaaacctgtggtgaaggtaactgccgccgggcagacaaagcgtaccaggattcacaaaggaaattcccccttgtttaacgagacactctttttcaatttgttcgactcaccaggggagctgtttgacgagccgatctttattaccgtcgtcgactcccggtctcttagaactgatgccctgctcggagagttccgcatggatgtgggcacgatctaccgggagccaagacacgcttacttgcgcaagtggctcttgctgtctgatcctgacgacttctccgcaggggcccgaggttacctaaagaccagcctgtgtgtgttggggcccggcgatgaggccccccttgagcgcaaggatcctagcgaggataaggaagacatagaatcaaatctgctacggccaaccggtgtggccctgcgaggggcccatttctgcttaaaggtcttccgggccgaagatctgccgcagatggatgatgcagttatggataatgtcaagcaaatcttcggtttcgagagtaacaaaaaaaacttggtcgacccatttgtcgaggtatcttttgctggaaaaatgttgtgttccaaaatattggagaaaaccgccaatccacagtggaaccagaacattacattgcctgcgatgttcccctccatgtgcgagaaaatgcgcattaggatcatcgattgggacaggctgactcataacgatatcgtggccaccacctatctgtccatgtctaagatctcagcgcccggaggcgagatcgaggaggagccagccggggccgtgaagccttccaaggcctctgacctcgacgattacctgggctttctgccgacatttggtccctgttatataaacctttatggaagccctagagaatttacaggattccccgacccctacaccgaattgaacacagggaagggggagggagtcgcctaccggggtcggctcttgctctcactggagactaagcttgtggaacacagcgaacagaaagtggaggatctgccagccgatgacatattacgcgttgagaagtatctccgccggagaaaatactccttgtttgccgcattttactctgccactatgcttcaggatgtggacgacgcaattcagttcgaagtctcgatcggaaactacggcaataagtttgacatgacatgcctgcccctcgcgtccaccacacagtattcgagggcagtattcgatggttgtcactattactacttgccttgggggaatgtcaagcctgtggtcgtcctttcctcgtattgggaggacatctctcatcgcatagagacacagaaccagctgctggggatagctgatcgactggaggcgggtctcgaacaggtccacctggcccttaaagcccagtgcagcactgaggatgtcgatagtctggtcgcccagctgacggatgagcttatcgccgggtgctctcaacccctgggggacatacacgagactcctagtgcaacgcatctcgatcaatacctgtatcagctgcggacacaccatctatcccagataacagaggcggcattggcccttaagctagggcacagcgagctgcctgctgcactcgaacaggccgaagattggctgttgaggctgcgggctctagccgaggagcctcagaattctctccccgacatcgttatctggatgcttcaaggagataagcgcgtggcctaccagcgcgttcctgcacaccaggttctgttttcacgccggggtgcgaattactgcgggaagaactgtgggaagctgcagacaatttttctgaagtaccctatggagaaggtgcctggggctcgaatgcctgtgcagatccgagtgaaactctggttcggtctgagcgtggacgagaaggaatttaatcagtttgctgaaggcaagttatcagtgttcgccgagacctatgaaaacgagacaaagctggcgctcgtaggcaactggggcaccacagggctcacttaccctaaattctcagacgttacagggaagatcaagctgccgaaggattccttcaggccttcggctggctggacctgggccggggactggttcgtctgtcctgagaagactctactgcacgacatggacgcagggcatctgagtttcgtggaggaagtctttgaaaaccagacacgcctgcccgggggacagtggatttatatgtccgacaactacacagacgttaacggagagaaggttctgcctaaggatgatatcgagtgccccctgggctggaagtgggaggatgaggagtggtccactgacttgaatcgcgcagtagatgagcaggggtgggagtactctatcactattcctcccgagcgcaagccaaagcattgggttcctgcagagaaaatgtattacactcataggagacgtagatgggttaggttacgtagaagggatctgtcccagatggaagccttgaaacggcatcgacaggccgaagctgagggggagggctgggagtatgccagtctgttcggctggaagttccacctcgagtatcgcaagaccgatgcattcaggcggagaaggtggagaagaaggatggagccattggagaagacaggacccgccgcggttttcgcactggagggcgcactggggggggtgatggatgataagagcgaggacagtatgtccgtgtcaacgctgtctttcggggttaatagaccaaccattagctgtattttcgactacggaaaccggtatcatctgcggtgctacatgtaccaggcaagagacctggcagctatggacaaggactcattctctgacccatatgccattgtttcattcctccaccagagccagaaaactgtggtcgtaaaaaacacactgaaccctacctgggaccagaccttgatcttctatgagattgagattttcggagaacccgcaactgtggctgagcagcctccttcaatcgttgtcgaattgtacgaccacgatacatatggtgcagatgagttcatgggaaggtgtatttgtcaaccatctttagagcgcatgccccgactagcctggttccctctgactaggggctctcagccctccggtgagcttctggccagcttcgaactgatacaacgcgaaaaacctgccattcatcatatccccggattcgaggtccaggaaacctcgaggatcttggatgagtctgaggacactgacctgccctacccacccccacagcgcgaggcgaacatctacatggtgcctcaaaacattaagcctgcccttcagaggaccgccattgaaattctcgcctggggccttaggaatatgaagagctatcagttggccaatatttcttctccgtccctggttgtagagtgcgggggccagactgtgcaatcttgcgttattcggaacctcaggaagaaccctaatttcgacatttgcactctgttcatggaagtgatgttacctcgtgaggaattgtattgcccccctatcaccgtgaaggtgatcgacaacagacagtttggcagacggcctgtcgtgggacagtgtactatccgctccctggagtcattcctgtgtgacccctatagcgcggagtcccccagcccccagggcggtccagacgacgtgtccttgctgagccccggcgaggacgtactgatcgacatcgacgacaaggagccactcattccaattcaggaggaggagttcattgactggtggtctaaatttttcgcgtccataggggaacgtgagaagtgcgggagttaccttgagaaggacttcgacactctcaaggtgtacgacacacagctcgaaaatgtggaagcttttgagggcctttccgacttctgtaatacttttaagctgtacaggggcaaaacacaagaagagacagaggacccttcggtgatcggcgaattcaagggcctttttaagatatacccgctgcccgaagaccctgcaatccccatgcctcccaggcaatttcaccagttggccgcacagggcccacaggagtgtctcgtgcggatttatattgtgagagcgtttgggctccagccaaaagatccaaatggtaagtgtgatccgtatatcaaaatctctattggcaaaaagagtgtgtctgatcaagacaattatatcccgtgtacactggagccggtgttcggcaagatgtttgaactgacctgtacactgccactggaaaaggatctcaaaattaccctctatgactacgatctgttatcgaaggacgaaaaaattggggagaccgtcgtggatctggagaaccgattactcagcaagtttggggctcgatgcggcctcccgcagacgtactgtgtgtcaggtcctaatcagtggcgcgaccagctgcgcccttcccaactgctgcacttattttgccagcagcacagggtgaaagcccctgtttatcggacggatcgcgtcatgttccaggataaggaatacagtatcgaggagatcgaagctggtaggattcccaacccccacttggggcccgtggaagagcggctggccctgcacgtcctgcagcagcagggtctcgttccagaacatgtggaatcgagaccactctactcccctctgcagccggatattgagcagggcaagttgcagatgtgggtggatctgttccctaaggccctcggtaggccaggaccccctttcaatataaccccaaggagagcaaggagattctttctgaggtgcataatctggaacaccagagatgttattttggatgatttgtctctcacgggggaaaaaatgtccgacatttacgtcaagggctggatgattggtttcgaagagcataagcagaaaactgatgtgcactataggagccttggtggcgagggaaacttcaattggcgcttcatcttccccttcgactatctcccagctgagcaggtgtgcactatagcaaaaaaggacgcgttttggaggctggacaagaccgaaagtaaaatcccagccagagtggtgtttcagatctgggacaatgataagttttcttttgacgacttcctgggcagtcttcaactagacctcaaccggatgcctaaacctgccaagaccgcaaagaaatgttccctcgaccagctggacgacgcttttcatcctgagtggttcgtgtccctgttcgagcagaaaactgtgaaagggtggtggccttgtgtggccgaggaaggtgaaaaaaagattttggccggcaaactggaaatgaccttagagatcgtcgccgaatccgagcacgaggagcgccccgcgggtcagggtagggatgagccgaacatgaaccccaagctggaagatccccgtcgccctgacacatccttcttatggttcacttccccatacaagaccatgaagtttatactgtggaggagatttagatgggcaataatactgttcattattctgtttatacttctcctgtttttggccatattcatttacgccttccccaattacgctgccatgaaactggtcaagccattcagc

SEQ ID NO: 48022 - DNA, 6243 bp, Artificial Sequence
  derived and/or modified sequence
atgctgtgttgccttctggtcagagcatcgaacctcccatcggcgaagaaggacagaaggagcgatccggtcgcatccctgaccttccgcggtgtgaaaaagcgcacgaaggtcatcaaaaactccgtcaatcccgtgtggaatgagggcttcgaatgggatctcaaaggaattccactggaccaagggtccgaactgcatgtcgtggtcaaggatcatgaaactatgggccgcaatcggttcctgggcgaagcaaaggtgccactcagggaagtgcttgctactccttccctgagcgcatcgttcaacgcaccactgttggacaccaaaaaacaaccgactggagcgtcgctggtgctgcaagtgagctacactcctttgcccggagcagtgccgctctttccaccacctacccctctggagcccagccctactcttccagatcttgatgtcgttgcagacaccggaggagaggaagataccgaggaccagggattgactggagacgaagctgagccttttcttgatcaatcaggtggcccaggggcacctactacccctcggaagttgccctcccgcccgccaccccactacccaggaattaagcgtaagcgctcggcccctacctctaggaagctcctttcggataagcctcaagactttcaaatcagagtgcaagtgatcgaggggagacagcttcctggtgtgaacattaagcctgtggtcaaggtgactgctgcaggtcagaccaagaggactagaatccataaagggaactccccacttttcaatgaaacccttttctttaatctgttcgattcccccggtgagttgttcgacgagccaatcttcattactgtggtggactcaagatccctgagaaccgatgcactgctgggagagtttcgtatggatgtgggaaccatctaccgcgaaccacggcacgcctaccttagaaagtggctcctgcttagcgatcctgatgatttttcagcaggtgcacggggttacttgaaaacctcactgtgcgtcctgggacccggtgatgaggcaccacttgaacgaaaggatccttccgaggataaagaagatatcgaatcgaacttgctccgcccaactggtgtggcactcagaggggcccacttttgtcttaaggtgttccgagccgaagatctcccccaaatggacgacgcagtgatggataacgtgaagcaaatcttcggatttgaatccaacaagaagaacttggtggatccattcgtggaagtctcttttgctgggaagatgctgtgttctaagattctggagaaaacggccaatcctcagtggaaccaaaacataacgcttcctgcaatgtttccaagcatgtgcgagaaaatgaggatcagaatcattgactgggatagattgacgcataatgatattgtggcaaccacctacctttccatgagcaagatcagcgctcccgggggagaaattgaagaggaaccggcaggcgcggtgaagccctcgaaggcatctgatttggatgattacctcggatttctgcctacctttggtccttgttacattaacctgtacggctcaccaagggaatttaccggatttcccgatccatacaccgaactcaacactggcaagggtgagggtgtcgcctaccgcggacgactgcttctcagcctcgagacgaaactggtggaacactccgaacaaaaggtggaggatcttcccgcagacgatattctgcgcgtcgaaaagtacctgaggagaagaaagtatagcctttttgcagccttctactcagccactatgctgcaggacgtcgatgatgcaattcaatttgaagtctccattggaaattacggaaacaagtttgacatgacttgtctcccccttgccagtaccacccagtactcgcgcgcagtgtttgatggatgtcattactactacctgccatggggtaacgttaaaccagtggtggtcctgtcgagctactgggaagatatttcgcacagaattgaaacccaaaaccagctcctgggtattgcggatcgcctggaagccgggcttgaacaggtgcacctcgccctgaaggcccaatgctcaactgaggacgtggattctcttgtcgcgcagctgactgatgagcttatcgccgggtgtagccaacccctcggggatatccacgaaaccccaagcgcaacccatcttgaccaatacctgtaccaactccggactcatcacctctcgcagattactgaggcagccctcgcactcaagctggggcattcggaactgcccgcggcgctcgagcaggcagaggactggctgctgcgcctccgcgcactcgcagaagaacctcaaaattcgctgcctgacatagtgatctggatgctgcagggcgataagcgtgtggcgtaccaacgtgtgccagctcaccaagtgctttttagcagacggggagcaaactactgcggtaagaactgtggtaagctgcagacgatttttctgaagtacccgatggaaaaggtgccaggcgcccgtatgccagtgcagattcgggtgaaactgtggttcggactgtcagttgacgaaaaggaattcaaccagtttgcagagggcaaactgtcggtctttgcggagacttacgaaaacgagactaagctggcccttgtgggaaactgggggaccactgggctgacttaccctaaattctcggatgtgaccggaaagatcaagctgccaaaggattctttcaggccttcagcaggctggacttgggcaggtgactggtttgtgtgtcccgaaaagaccctgctgcatgacatggatgccggccaccttagcttcgtggaggaggtattcgagaatcagaccaggttgccaggaggtcaatggatctacatgtcggacaactacactgatgtgaatggcgaaaaggtgttgccaaaagatgatattgagtgccctcttggatggaagtgggaagatgaggaatggagcaccgatttgaatcgggcagtcgatgaacagggttgggaatatagcatcaccattccacccgaaagaaaaccaaaacattgggtgccagcagaaaagatgtactacactcaccgaaggcgcaggtgggtcagacttagacggagagacttgagccaaatggaagcactgaagcggcaccgacaagcagaagctgaaggggaaggatgggaatacgcgtcgctctttggctggaaatttcatcttgaatacagaaagactgatgcattcagaaggcgacgttggagaaggagaatggagcctcttgaaaagactggacctgcggcagtgtttgcactggaaggtgcactgggaggtgtcatggatgataagagcgaggattcgatgtcggtgagcaccctgtcatttggcgtgaacagacctaccataagctgtatctttgattacggtaacaggtaccatctgagatgctacatgtatcaggcacgggaccttgcagcgatggacaaggattcgttcagcgatccttatgcgatcgtgtcatttctgcatcaatcgcagaaaactgtggtcgtgaagaacaccctgaatccaacttgggaccaaaccttgatcttttatgaaattgagattttcggtgagcctgccactgtggcagaacagcctccgtcgatagtagtggagctgtacgatcacgacacctacggggcagacgaattcatgggaaggtgcatatgccaaccgagcctcgagagaatgccacggcttgcgtggtttcctctcactcgcggttcgcaaccttcaggagagttgctcgcatcattcgagctgattcagcgggaaaagcccgcaattcatcatattcccggattcgaagtgcaggagacttcgcgcattttggacgaaagcgaagatactgacctgccctacccacctccacagagggaggcaaatatctatatggtgcctcagaacataaagcctgctctccagcggaccgctatagaaattctggcatgggggcttcggaatatgaagtcgtaccaactggctaacatcagctccccttccctcgtcgtggagtgcggtggtcaaaccgtgcagagctgtgtcatcaggaacctgcgtaaaaacccaaactttgatatctgcaccctgtttatggaagtgatgctgccgcgagaagagctgtactgccctcccattaccgtcaaggtgatcgacaaccgacagttcggacggcgccccgtcgtgggtcagtgcactattagaagccttgaatcatttctgtgcgacccttactcggcagaatcacctagccctcaagggggaccagatgacgtctcacttctctcccccggcgaagatgtgcttatagatattgatgataaggagccattgattccaatacaggaggaagaattcattgactggtggtcgaagttttttgcatcgatcggcgaacgggagaagtgtggaagctaccttgaaaaggactttgacaccttgaaggtgtacgacactcagctggagaatgtcgaggcatttgaaggactctcggacttttgtaacacttttaagctgtacagaggaaagacgcaagaagaaactgaagatccatcagtgatcggagagttcaaaggtttgtttaagatttacccactgccggaagatcccgccattccaatgcctccaaggcaattccatcaactggcagcacaaggtccgcaggaatgcctggtgcgtatttacatcgtgagagcatttggcctccagccgaaagatccgaacggcaaatgtgatccttacatcaagattagcatcgggaaaaagtcggtgtctgatcaggacaactacattccctgtactctggaaccggtgtttggcaagatgttcgagctcacctgtactctgcctctggaaaaggatttgaagataaccctttacgattatgatcttctgtccaaggatgaaaagattggcgagacggtggtggatctcgagaatcgccttctctcgaaatttggcgcaaggtgtggccttccccagacgtactgtgtgtcgggacccaaccaatggcgagatcagctgcgaccctcccagctcttgcatctcttttgccaacaacatcgcgtgaaggctccggtgtaccgcaccgatagggtgatgtttcaggataaggagtacagcatcgaagaaatcgaggcaggtagaattcctaatccccacctgggaccggtggaggaacgtcttgcactgcatgtcttgcaacaacaagggctggtgccagaacatgttgaaagcagacctttgtactcgccacttcaacctgatattgaacaaggcaaattgcagatgtgggtcgacctgttcccgaaggctctcgggcgcccaggtcctccttttaacattaccccaaggcgcgcgagaagattcttcctgcggtgtattatctggaacacccgagatgtgatcctcgatgacctgtcgcttactggggagaagatgtccgatatctacgtcaagggctggatgattggatttgaagaacacaagcaaaaaaccgatgtgcactacagatcactgggaggcgagggcaatttcaactggagattcatctttcccttcgattaccttcctgcagagcaggtgtgcaccattgcaaagaaggatgcattttggcgcctggataaaaccgagtctaagatccctgcgagagtggtgtttcaaatctgggataacgacaagttctctttcgatgattttctgggatccctccagcttgaccttaatcgcatgcccaaacctgcaaagacggctaagaagtgttcccttgatcaacttgacgatgcatttcacccagaatggttcgtgtctctgtttgaacaaaagactgtgaagggctggtggccctgtgtcgccgaagaaggggagaaaaagattctggcaggaaaacttgagatgacgcttgaaattgtggcagagtccgagcatgaggaaagacctgccggacagggacgagatgaaccgaacatgaatcctaaacttgaagatccacgaaggcccgacacctccttcctttggttcacctcgccttacaaaactatgaagtttattctgtggaggcggtttagatgggcaattatcttgtttatcattttgttcattctgctcctcttccttgccatctttatctacgctttcccaaattacgccgcaatgaaacttgtgaagcctttctcg

SEQ ID NO: 48023 - DNA, 6243 bp, Artificial Sequence
  derived and/or modified sequence
atgctctgttgcttattggtgagggccagcaacctgccatccgcgaagaaagatcgcaggagcgatccggtggccagtctgacattccgcggagtcaagaagagaacgaaagttatcaaaaactctgtcaatccggtctggaacgagggctttgaatgggacttgaaaggaatacccctggatcagggctcagagctgcatgtcgtggtgaaagaccatgagacaatgggtagaaacaggttcctgggagaagccaaggttccacttcgggaggtccttgctacgccgtcactgtctgcatcatttaacgcacctcttcttgataccaagaaacagcccacaggggctagcttagtcctgcaggtgtcctacactcccctccctggcgccgtgcctctctttccccctccaacccccctggaaccatctcccaccctcccagacttggacgtggtagccgacactggaggagaggaggacaccgaggatcagggattgaccggagacgaggccgagccttttctagaccagagcggcggccctggcgctccaacaaccccacgaaaattgcccagcaggcctcctcctcactatcccggtataaagagaaagagaagtgctccgacaagcagaaaattgctgtccgacaaaccacaggactttcagattcgtgtgcaggtaattgaaggcagacagctccctggggtgaatatcaaacctgtcgttaaggtcaccgctgcgggccagacgaagaggacacgcatccataaagggaatagccccctttttaacgaaacccttttctttaacctttttgactctcccggagagctgtttgacgagccaatcttcattaccgttgtggactctcggtctcttcggacggacgctcttctgggcgagttcagaatggatgtgggaaccatttatagagagccaagacatgcatacctgaggaaatggttacttttgagtgacccagatgatttttcagcgggtgcccgcggttaccttaaaacaagcctctgcgttctgggacctggggacgaggcacctcttgagcggaaggatccaagcgaagacaaagaggacattgagagcaacttactgcgccccacgggcgtggctttgagaggagctcatttctgcttgaaggtttttagagcggaggatctcccccagatggacgatgcagtgatggacaacgtcaaacagatcttcggttttgaaagtaacaagaaaaacctcgtggacccattcgtggaggtgagtttcgcaggaaaaatgctttgtagtaagatattggaaaaaactgctaacccccagtggaaccagaacattaccctgcccgctatgttccctagcatgtgtgaaaagatgaggatccggatcatcgattgggacagattgacacataatgatattgtggccactacctacctgtctatgagcaaaatctccgccccaggcggcgaaatagaggaggagccggcaggcgctgtcaagcccagtaaagctagcgacctggacgattatctgggcttcttgcccactttcggaccatgctatattaacctctatggtagtccgcgggagtttacaggttttcccgatccatatacggaactgaataccggcaagggagaaggagtggcttacagaggacggttgttgctctctctggaaaccaagcttgtggagcattccgaacagaaagttgaagatctccctgcagatgatatcctgcgtgtcgagaagtacttgcgcaggagaaagtacagtctttttgccgcattctattctgcaacaatgcttcaagacgtcgacgacgccatccagttcgaagttagcatcggcaactatggcaacaagtttgatatgacctgtctgccactggctagcaccactcaatacagccgggccgtctttgacgggtgtcactattactaccttccttggggaaatgtgaaacctgtggtcgtcttgagctcctattgggaagatatctcgcacaggatagagacccagaatcaactgttggggatagcagatcggttggaggcaggcctggaacaggttcacctggctctgaaggcccagtgttcaactgaggatgtggattccctggtggcacagcttaccgacgaactgattgctggttgtagccaacctctgggagacatccacgaaactcctagcgccacccatctggaccagtacctctatcagcttcgcacacaccaccttagccagattactgaggcagcccttgccctgaaattgggacactccgaacttcccgctgccctggaacaggctgaagattggctgctcagactcagagctcttgctgaggaaccccagaacagcttacccgatatcgtcatctggatgctgcagggcgacaagagggtcgcttaccagcgcgtccccgcgcatcaggttttattttcccgcagaggggccaactattgcggaaaaaactgtggaaagttgcaaacaatcttcctcaaataccccatggagaaagtcccaggtgctcgcatgccagtgcagatcagggtaaagctctggtttggactgagcgtggacgagaaagagttcaaccagtttgcagaaggcaagctgtctgtgtttgcagagacctatgagaatgagacgaaattggctctggtcgggaattggggcacaactgggctgacctaccctaagtttagcgacgttacaggaaaaatcaagctgcccaaagattcctttcgcccatccgctggctggacttgggctggggattggttcgtgtgtcctgaaaaaaccctgctgcacgatatggatgctgggcatcttagttttgtggaggaagtgttcgaaaaccagactcggcttcccggcggccagtggatttacatgtctgacaactataccgacgtcaatggagagaaggtgctcccaaaggacgacatcgagtgccccctaggctggaagtgggaggacgaagagtggtctactgacctcaatcgtgctgtggacgagcagggttgggagtacagcatcacaatccctccagagagaaaacctaagcactgggtgcccgccgagaagatgtattacactcaccgccggagacgttgggtgaggctgaggagaagagatctgagtcaaatggaagcattgaagcgccacaggcaggcagaagctgaaggcgaggggtgggagtacgcctcactgtttggttggaagttccatctggagtatcgcaaaaccgacgccttccgtcgccgccgttggcgtagacgaatggagccactggagaagacaggccctgcagcagtgttcgcacttgaaggtgctcttgggggagtgatggatgacaagagcgaggatagtatgagcgtgagtaccttgtcatttggcgtgaacagaccaaccataagttgcatcttcgactatggcaaccgatatcaccttcgttgttacatgtaccaagcgagagaccttgcagccatggacaaagattccttctctgatccgtacgccattgtgtcattcctgcaccagagccagaaaacagttgttgtcaagaacactttaaacccaacatgggaccagactctcatcttttatgaaatcgagatcttcggagaacctgcgactgtggcagaacaaccaccgagtattgtggtggaactgtacgaccacgatacctatggcgctgatgagtttatgggtagatgcatatgccaaccgtccttagagaggatgccacgcctcgcatggttccctctgacacgcggttcccaaccctctggggaacttttggctagctttgaactcatccagagagagaaacccgctatacaccacattcctgggtttgaggtgcaagaaactagtagaatcctcgacgagtccgaggatacggatttgccatacccccctcctcaacgcgaggccaacatctatatggtgccgcagaatattaagcccgctctgcaacgcaccgcgatcgaaattctggcgtggggactgagaaatatgaagtcataccaactcgcgaacatcagcagtccgagtttagttgtggagtgcggaggacagactgtgcagtcttgcgtcatccgtaatctcagaaaaaacccaaatttcgatatttgcactttgtttatggaggttatgctgccacgagaggagctgtattgtcctccaatcactgtcaaggtgatcgataataggcaatttggacggcggccagtggtcggacaatgcactattagatcgctggagagcttcctctgcgacccttacagcgccgaaagtccctctcctcagggcgggcccgatgacgtgtccttgctctcacccggtgaagacgtgctgattgacattgacgacaaagagcccctgatcccgatccaggaggaggagtttatagactggtggagcaaatttttcgcgagtatcggagagcgggagaaatgtggatcatacttggaaaaagactttgatacactgaaagtctacgacacgcaactggagaatgtggaggcattcgagggcctttccgacttctgcaacacattcaagctttaccgtggcaaaacgcaggaggagacagaagatcctagcgttatcggcgagtttaagggcttatttaaaatctatccactgcccgaggatcctgccattccgatgccccctagacagtttcatcagctggctgcacaaggcccacaggagtgcctggtgcgcatctacattgtgagagctttcggcctccagcccaaagaccccaacggcaaatgcgacccctatatcaaaatcagtatcggcaaaaaaagtgtctctgaccaggacaactacattccctgtacactcgaaccagtgttcggaaagatgtttgaacttacttgtacccttccacttgagaaggatctgaaaatcacgctctacgattacgatctgttgtctaaagacgagaaaatcggcgagaccgtagtagatttggagaacaggcttctgagcaaatttggcgcaagatgcggactgccccaaacctattgcgtatctggtcctaaccaatggagagatcagctcagaccgagtcagctgttacacctcttctgccagcaacaccgggttaaggccccagtgtatagaactgacagggtgatgtttcaggacaaggaatactcaatcgaagaaattgaggctgggcggataccaaacccacatctggggcccgtggaagagcgcctcgctttgcacgtgctgcaacaacagggccttgtgccagaacacgtggaatctcgccctttatactcgcccctgcaaccagatatcgaacagggcaagctccagatgtgggtcgacttgttcccaaaagcccttggacgtccagggccaccttttaacatcacacccaggagagcaaggagattcttcctcaggtgtataatctggaacactagagatgtgattttggatgacctgtcactcaccggagagaaaatgtccgacatctacgtcaaagggtggatgattggatttgaagaacacaaacagaaaacggatgtccactacagaagtttgggcggcgagggaaactttaactggaggtttattttcccattcgactaccttcccgctgagcaggtgtgtacaatagccaagaaggatgcgttctggcgcctggataaaacagaaagcaaaatccctgccagggtggtctttcaaatctgggataatgataagtttagctttgacgactttctgggaagccttcagctggatctgaaccgtatgcctaagcccgctaaaactgctaaaaagtgcagcctggatcagcttgacgacgcatttcaccctgaatggttcgtaagcctgttcgaacagaaaacagtgaaaggctggtggccttgtgtcgcagaggagggtgagaaaaagatcttggcagggaaactggaaatgacactcgaaatcgtcgcagaaagcgagcatgaggaacgccccgctggtcagggtagggatgaacctaacatgaatcccaaactggaagatccaagaagacccgacacctcttttctgtggtttacaagtccttacaagaccatgaagtttatactgtggcgcagatttaggtgggccatcatactgtttatcatcctcttcatcttgttactgtttctggctatctttatatacgcgttccctaattatgcggctatgaagttggtgaaaccattcagc

SEQ ID NO: 48024 - DNA, 6243 bp, Artificial Sequence
  derived and/or modified sequence
atgctgtgttgcctcctggtgagggcaagcaaccttcctagcgcgaagaaagatagaaggagcgatccagtggcatccctcacttttcgtggcgtcaaaaagagaactaaagtcattaagaactccgtgaaccctgtgtggaacgaagggttcgagtgggacttgaagggcatacctcttgatcaaggaagcgagctccatgtggtggtgaaggatcatgaaactatggggagaaaccgctttctgggcgaggccaaagtcccactccgggaagtgcttgcaactccaagcctttcagcgtcatttaacgctccacttttggatactaagaaacaaccgaccggagcgtccctcgtgctgcaagtgtcgtacactcctctgccaggggcggtgccactgttcccacctcccaccccgctggagccttcccctactctgcctgatctcgatgtcgttgcagatactgggggagaggaggacaccgaggatcaggggcttaccggtgatgaggcagaacccttcctcgaccagagcggtggtccaggtgctccaactaccccgcgcaagttgccatcacgaccacctccacactaccccggaatcaaaagaaagagatcggcaccgacctcaagaaagctgctgtccgataagcctcaagattttcagatacgcgtccaggtcatcgaagggcgccagcttcctggcgtcaacataaagcctgtcgtgaaggtgaccgcagcaggacagactaaacgcactagaatacacaagggcaattcgccactctttaacgaaacgcttttcttcaaccttttcgatagccctggcgaactgtttgatgagcccatctttatcaccgtcgtggattcacgctctctgagaactgacgccctgctcggagagttccggatggacgtgggaacgatttaccgagagccgcgtcacgcataccttcggaaatggctgctgttgtcagacccggacgacttttcagccggggcaagaggataccttaagactagcctttgcgtcctgggaccaggagacgaggccccactggaaagaaaagatcctagcgaagataaggaggatatcgagtcgaacctcctgcggccaactggagtggcactgagaggcgcacatttctgccttaaagtgttccgggcagaggaccttccacaaatggatgatgcggtgatggacaatgtgaagcagatatttggatttgaatcgaataagaagaatctcgtggacccattcgtggaagtgtccttcgctgggaagatgctttgctcgaagatactggaaaaaaccgccaacccccaatggaaccaaaacatcacccttcctgccatgtttccttctatgtgtgagaaaatgagaattcgaataatcgactgggatagactgactcataacgacattgtggcaactacctacctctcgatgtccaaaatctcggcacctggcggtgaaatcgaagaggagccagcaggagcagtcaaaccaagcaaggcatctgacctggatgattacctgggatttttgcctactttcggtccttgttacattaatctctatgggtcaccgagagagtttaccgggtttcctgacccgtacaccgagcttaacaccgggaagggagaaggagtggcgtatcgtggtcgcctgcttctgtcacttgaaactaagctcgtggaacattccgaacagaaggtggaggatctcccagcagacgatattctcagagttgaaaagtaccttaggaggcgcaagtactccctttttgctgctttttactccgcaactatgcttcaagatgtggacgatgcaattcagtttgaagtgtcgatcgggaactacggcaacaaatttgacatgacttgcctccccctggcatccaccactcaatattcacgcgccgtgtttgacggatgtcattactactacttgccttggggtaacgtgaagcccgtggtcgtgctttcatcctactgggaggacatatcccaccgcattgaaactcagaaccagctccttggtattgcagatcggctcgaagcagggcttgaacaagtgcatctggccctcaaggcacagtgctcgaccgaagatgttgatagcttggtggcgcagctcacggatgaactgattgcaggatgttcgcaaccactgggagatatccatgagacgccgtcagcaactcatctggaccaatatctttaccaactgagaactcatcatttgagccagattaccgaggcagctctcgcgcttaaacttggtcactctgagcttccagccgcacttgagcaggccgaagattggttgcttagactccgggccctggccgaagagcctcagaactcccttccggacattgttatttggatgctccaaggggataagcgggtggcttaccagcgagtcccagcgcaccaagtcctgttttcgcgtcggggagcaaactactgcggaaagaattgtgggaagctgcaaactatctttttgaagtacccaatggagaaggtgcccggcgctcgcatgcctgtccagattcgcgtgaagctgtggtttggattgtccgtggatgaaaaggaattcaatcaattcgccgaaggcaaactttccgttttcgcggaaacctacgaaaatgagactaaacttgcactcgtggggaattggggaaccaccggcttgacctacccgaagttttccgacgtgaccggtaagatcaaattgcccaaagattccttcagaccatcagcaggttggacctgggcgggagattggttcgtgtgtccagaaaagacgctcctgcatgacatggatgcaggacacctgagctttgtcgaagaagtttttgagaaccaaactagattgcccggcggtcaatggatttacatgtctgacaattacaccgacgtcaatggtgaaaaagtgctgccaaaagatgacatcgaatgtcctcttggatggaagtgggaggatgaggagtggagcaccgatctgaatagagccgtggatgaacagggctgggagtacagcatcaccattccaccagagagaaagcccaaacattgggtgccagcagaaaagatgtactatacccatagacggaggcgatgggttaggctccggcgccgcgacctttcacaaatggaggccctcaagaggcataggcaagcagaggcagagggtgaaggctgggagtatgcatcacttttcggttggaagtttcatctcgaatatcggaaaactgatgcattccgacgacgccggtggcggcggcgcatggaaccgctcgaaaagacgggacctgcagcagtgtttgcactggaaggcgcactgggcggagtcatggatgacaagtcggaagattccatgtcagtgtcaaccctgtccttcggtgtgaaccgccccactatttcatgtatcttcgattacggaaatcgttaccatctgaggtgttacatgtaccaggcacgcgatctggccgcaatggataaagattccttttcggacccttacgcaatcgtgtcgtttcttcaccaatctcagaaaacggtggtcgtcaagaacacccttaatccaacctgggaccagaccctcattttctacgaaattgagatttttggtgaacctgccaccgttgcggagcagcccccctcaatcgtggtcgaactgtacgatcacgacacctacggagctgacgagttcatggggcggtgtatatgtcaaccctccctcgaaaggatgccacgactggcctggtttccactcactcgaggatcacagccatccggtgaactgcttgctagctttgagctgattcagcgagaaaagcccgcaatccatcatatccctggatttgaagtccaggaaacgtccaggatcctcgatgaatccgaagatacggaccttccctacccaccacctcagagagaagcgaatatctatatggttcctcaaaacattaagcctgctctgcaacggacggcgatcgagatcctggcatggggactcaggaacatgaagagctaccaactggcgaacattagcagcccctccctcgtggtcgaatgcggtggacagaccgtccagagctgcgtcatccgcaacctcagaaagaatccgaattttgacatctgcaccctgtttatggaagtcatgttgccacgggaagaactgtactgtccccccattacggtcaaagtgattgacaatcgtcaatttgggaggaggccggtggtgggccagtgcactattagatcgcttgaatcatttctttgtgacccttactccgccgaatcaccatcccctcaaggtggacctgatgacgtgtcccttctctcccctggcgaagatgtgctcattgatatcgatgataaagagcctcttatacctattcaagaagaagagttcatcgattggtggagcaagttctttgcatctattggtgaacgagaaaagtgtggttcctacttggagaaagattttgatactcttaaggtgtacgacacccaactcgaaaacgtcgaagcatttgaaggactcagcgacttttgtaatacctttaagctgtatagaggtaagactcaagaagaaaccgaagatccttcagtgattggagagtttaagggtttgtttaagatttacccactcccggaagatccagcgattcccatgccccctagacagtttcatcagctcgccgcacagggacctcaagaatgtctcgtgaggatctacattgttcgagcctttggactgcaaccaaaagatcccaacggaaaatgcgacccttacattaagatttccataggaaagaagtccgtgagcgaccaggataactacatcccatgtactctggagcctgtctttggtaaaatgtttgaactcacttgtacgttgccacttgaaaaggatctcaagataactttgtacgattacgacttgctttcgaaagacgaaaagatcggagaaactgtcgtggacctcgagaacagactgcttagcaagttcggagccagatgcggtttgcctcaaacctactgcgtctcgggtcctaaccaatggagggaccaactccgcccttcccaacttcttcacttgttttgtcagcaacaccgggtgaaggcaccagtttaccgaactgaccgcgtgatgttccaagacaaagaatactcgatagaagaaatcgaagcaggtagaattcctaaccctcaccttggtccggtggaagaacggctggcactgcacgttctccaacaacagggtctggttcctgaacacgtggaatcacgccctctttacagcccactgcagccggatattgagcaaggaaagctccaaatgtgggtggatcttttccccaaggcccttggccgccccggcccaccatttaacattaccccccgtcgcgcaagacgctttttcttgagatgtatcatatggaacactagagatgtgatacttgatgatctgtcgctgaccggggaaaagatgtcggacatctacgtgaagggatggatgatcggcttcgaggaacacaagcaaaagactgatgtgcattaccgtagccttggaggagaaggtaacttcaactggcggttcatcttcccctttgattacttgccagcggaacaagtctgtactatagcaaagaaggatgcattttggcggcttgacaagactgaaagcaagattcctgcgcgtgtcgtgttccagatttgggataatgataagttttccttcgacgatttcttgggatcgcttcagctggacctcaacaggatgccgaaaccagcaaagaccgctaaaaagtgctccctggatcaactcgatgacgcctttcatccagaatggtttgtctctctttttgaacaaaagaccgtcaaaggatggtggccctgtgtggccgaagaaggcgaaaagaagattcttgccggtaaacttgagatgaccttggagatcgtcgcagaaagcgagcatgaagaacggcccgcgggacagggtagagatgagcctaatatgaatccaaaacttgaagatccgaggcgtccagatacctcctttctgtggtttacctctccctacaaaaccatgaagtttatcctgtggcgtcggtttcgttgggccattatcctgttcataattctgtttatcttgcttctttttctggccattttcatatacgcatttccgaattatgcggctatgaagctcgtgaagcctttttcg

SEQ ID NO: 48025 - DNA, 6243 bp, Artificial Sequence
  derived and/or modified sequence
atgctgtgttgcctcctggtgcgggccagcaacctcccatctgcaaagaaagatcgacgatcagacccagttgcgagtctgacctttcgaggggtcaagaagcggacaaaggtgatcaagaattccgtgaatcccgtatggaacgaagggttcgaatgggacctcaaggggattccgctggaccagggtagtgagctgcatgtggttgtgaaggaccacgaaaccatggggagaaatagatttctgggtgaagctaaagttcctttgagggaggtactagcgaccccttccctgtccgccagtttcaatgctcccttgttggacacaaaaaaacagcctaccggtgctagcctcgttctgcaagtgtcatacactccgttgcctggagcagtgccactgtttccacctcctactcccctcgagccatcccccacgctacctgacctagacgtcgtggcggacacaggaggtgaagaggatactgaggaccaggggctgacaggcgacgaagccgagcccttcttggaccagagcggggggccgggggctcccacaacgcctagaaaactcccaagtagaccccccccccattacccgggaataaaacgaaagaggtcggctcccacttctcgcaaactgctaagtgataaaccccaggactttcagatccgcgttcaagtgattgagggcaggcagctgcctggcgtgaacattaaacccgttgtgaaagtgaccgccgcagggcaaaccaaaaggactagaatacacaaaggcaactcgccactctttaacgagacactttttttcaacctgtttgacagcccgggcgagctatttgatgagccaatcttcatcaccgttgtggatagtaggagtctgcgaacagatgccctcctgggtgaatttaggatggacgttggcaccatttatagggagcctcggcatgcgtacctgaggaagtggcttctgttatccgaccccgatgacttcagcgctggagctcgtggatacctcaagacctctctttgcgtgctggggcctggtgacgaagccccactggagcgcaaggatccctcagaggacaaagaggatatcgagagtaatctgctccgccctacgggtgtagctctgaggggcgcccacttttgcctgaaagttttccgggcagaggacctgccgcagatggatgacgccgtcatggacaacgtcaagcagatcttcggattcgagtccaacaaaaaaaatctggtggacccattcgtcgaagtaagctttgccggcaaaatgctctgctcgaaaattttagagaaaaccgccaacccccaatggaatcaaaacataactctacctgccatgttcccctcaatgtgcgagaaaatgcggatccggatcattgactgggataggctcacccacaacgacattgtggctactacctatctgtccatgtctaagatctctgcgcccgggggggaaatcgaggaggagcccgccggcgcagtgaaaccatcaaaggcctccgatctggatgactacctggggttcctacctacattcggtccgtgttacatcaacctgtacggatcgccccgagagtttaccggattccccgacccctatacggagctgaatacaggcaaaggggaaggtgtcgcctatcgaggccggctactcctgtcccttgagaccaaacttgtggagcattccgagcagaaggtagaggaccttccggccgacgacattcttcgcgttgagaaatacctgagacgccggaagtattccttgtttgctgcattttactccgcaacaatgctacaggacgtcgacgacgccattcaatttgaggtttcaataggcaactacggcaacaagttcgatatgacttgcctgcctctggcaagtacaacgcagtatagccgtgcagtttttgacggctgccactactattatctcccgtggggaaatgtgaaacccgtggtggtactgagctcttactgggaagacatctcacaccgaatcgagacacagaatcaactgctgggcatagccgatcgactcgaggccggcctggaacaggtgcaccttgccctaaaggcacagtgttcaacagaagacgtggacagtctggttgcacagcttacggatgagcttatcgcagggtgtagccaacccctaggcgatattcatgaaacgcccagcgcaacccatctggatcagtacctgtatcagttgcggactcatcacctcagtcagattactgaggcagctctggctttgaagctgggccattccgagttacctgctgccctggagcaggcagaagattggttgctgaggttgcgcgcccttgcagaggaacctcagaacagtctgccagacattgttatatggatgctgcaaggcgataagcgggtcgcgtaccaaagggtaccagcgcatcaggtgctgtttagtcgaagaggggctaattattgtggaaaaaattgtgggaagttgcaaaccattttcttaaagtatcccatggaaaaggtgcctggggcacgaatgcccgttcagattcgggtgaagctatggtttggcctctccgtggatgagaaagaatttaaccagttcgccgagggcaagttgtcggtgttcgctgagacttacgagaatgagaccaagctggccctcgtcggcaattggggcacgacagggttgacataccctaagttctccgacgtaactggtaagataaaactccctaaagattcctttcgtcccagcgccggttggacctgggctggagactggtttgtctgccctgagaaaaccctcttgcacgacatggatgcggggcacctgagttttgtcgaggaagtgttcgagaatcagacgcgtctcccggggggtcaatggatctacatgagtgataactatactgatgtgaatggcgagaaggttcttccaaaggacgacatcgagtgccctctggggtggaagtgggaagacgaagagtggtccacggaccttaaccgggccgtggacgagcaaggctgggaatacagcatcaccatccctccagaacgcaagcccaagcattgggtgccagcagagaagatgtactacacacatagacgtaggcgatgggtgcgcttacgcaggagggacctctcccagatggaggccctcaaacgtcaccgccaggccgaggcagagggggaggggtgggaatacgcctccctgtttggctggaagttccatctggaatatagaaaaactgatgcgtttaggcgccgcagatggagacgccggatggagcccctggagaaaaccgggcctgccgcagtctttgccctggagggggcactgggcggtgtgatggatgataaatctgaggactccatgtcagtctctaccttgtccttcggagtgaataggcctaccatttcgtgcattttcgactatggcaacaggtatcacctgcggtgttatatgtatcaggctagagacctggcagcaatggacaaggacagtttctcagatccctatgctatcgtgagttttttacatcagagtcaaaaaaccgtagtagttaagaacaccctcaacccaacctgggaccagactctgattttttacgagatagaaatctttggcgaacctgcaactgttgctgagcagcctccaagtatagtggtggagctctacgatcatgacacatacggggcagatgagttcatgggtcgctgtatctgccaacctagcctggagaggatgcccaggctcgcctggtttccgctgaccagaggctctcagcctagtggcgaacttctggcttctttcgaattgatacagcgggagaagcctgccatccaccacataccgggattcgaggtgcaggagacttcacggatactggatgagagcgaagataccgacctcccttacccacccccgcagcgggaggctaacatctatatggtgccccagaatattaagcccgccctgcagcgcaccgccattgaaatactggcgtgggggttgaggaatatgaagagctaccagcttgccaacatttcttcgccaagccttgtagtggagtgtggcggtcagacagtgcagtcgtgcgttattcgcaatctccgcaagaatccaaatttcgatatctgcaccctgtttatggaagttatgctcccccgggaagagctgtactgtccgcctataacggtgaaagttatcgacaaccgccaatttggccgccgcccagtcgttggccagtgcacaattcgcagcttagaaagcttcctatgcgacccttactcagctgagtccccgagccctcaggggggccccgacgatgtgtctctactgagtcccggagaagatgtccttatcgacattgatgataaagagcccctgattcccatccaggaggaggagttcatagattggtggtccaagttttttgccagcatcggggagcgagaaaagtgtggttcatatcttgaaaaagacttcgacacacttaaggtgtatgacactcagctggaaaacgtggaggccttcgagggcctcagcgatttttgtaacacgttcaaactgtatcgtggcaagacacaagaagagacagaagacccatccgtgatcggggagtttaagggactttttaagatctaccctctccccgaggaccccgctatccctatgccaccgcgtcaatttcaccagttagctgcccagggtccacaggagtgccttgtcaggatctacatcgtgcgggcctttggtctgcagcctaaagaccctaatggcaagtgcgatccctacatcaaaatctcaataggaaagaagagcgtaagtgaccaggataactatatcccttgcaccttagagcctgtgtttggaaagatgttcgagcttacctgtactttaccactagaaaaagacttgaagatcaccctttatgactatgacctgctttccaaagacgaaaagattggagagactgtggtggatctggagaatcgactcctgagcaagtttggcgcccgatgtggccttcctcagacctactgcgtatctgggcctaaccagtggcgtgaccagctgcgtccctcccaactactgcatttgttttgccagcaacatagagtgaaagcccccgtttacagaactgatcgagtgatgttccaggataaagagtacagcatagaggagattgaggccggccgaataccgaatccccacttaggcccagttgaggagaggctggctctccatgtcctgcagcagcagggcttggtgcctgaacacgtggagtcgagacccttgtattcacctctccaacctgacatcgaacagggcaaactgcagatgtgggtggacttgtttcccaaagctctagggcgcccaggccctccgtttaacattaccccacggcgagccaggcggttttttttaagatgcatcatctggaataccagggacgtcatcctggatgacctctctctaaccggcgagaaaatgtctgacatttatgtaaaaggatggatgatcggcttcgaagagcataaacagaaaacagacgtgcactacaggagtttaggaggggagggtaacttcaactggcgattcatattccctttcgattatctgccagccgagcaggtttgcacaatagcaaaaaaagacgctttctggcgcctggacaagaccgaatccaagatccccgcccgagttgtattccaaatttgggacaatgacaagttcagtttcgacgactttcttggatctctgcagttggatcttaatagaatgccgaagccagctaagactgccaagaagtgctccttggatcagttagatgacgccttccatccagagtggttcgtgagtctgttcgagcagaagacagtgaaaggttggtggccatgcgtggctgaggagggggaaaagaagatcctcgcggggaagcttgagatgacccttgagatagtggcagagtccgagcatgaggagcggccggcgggccagggacgggatgagcccaacatgaaccccaagttggaagatcccaggcggccggacacctccttcctctggtttacctcaccgtacaaaacaatgaaattcatcctctggagacgattccggtgggcaattatcctgttcattatcctgtttattctcctcttatttttagcaatcttcatctacgctttcccaaattacgcagccatgaagttggtgaaaccatttagc

SEQ ID NO: 48026 - DNA, 6243 bp, Artificial Sequence
  derived and/or modified sequence
atgttgtgttgcctgttggtgagagcctccaacttgccctcagctaagaaggataggaggagtgaccctgtggccagcctgactttccgcggtgtgaagaagagaacaaaagtcatcaagaatagcgttaaccccgtgtggaacgaaggatttgaatgggacttgaagggtatcccgctggatcagggctcagagctgcacgttgtcgtgaaggatcacgaaacgatgggtagaaacagattcttgggcgaggcgaaggtgccgctgcgcgaggttctggccacccctagcttgtctgcttcctttaacgcccccctgctggacactaagaagcagcccactggcgcatccctggtgcttcaggtgagctacacccctttgccaggagccgtgccgttgttccctcctccgacaccgctcgaaccgagcccaacactgccagatctggacgttgtggccgacactggcggagaagaggacactgaggaccaaggcttgaccggcgacgaagcagaaccgttcttggaccaaagcggcggccctggcgctcctaccacaccgagaaagctcccttccagaccccctccccactatccaggaattaagcgcaaacgcagcgcacccaccagcaggaagctcctttcagataaaccacaggacttccagataagagttcaggtgatagaaggtagacaactgcccggtgtcaacatcaaacccgtcgtcaaagtgaccgcagcaggccagacgaagagaactcgcattcacaagggcaactcacccctgtttaacgaaaccctgtttttcaatctgtttgattcaccgggcgagcttttcgatgagccaatcttcataacagtcgtagactctcgctcacttagaacagacgcattgctgggcgagtttagaatggatgtaggaacgatatacagagaacctaggcatgcttacctccgcaagtggctccttctctcagacccagacgatttcagtgctggcgcacgcggttacttgaaaacatccctctgtgtgctgggcccaggtgacgaggctcctctcgaaagaaaagaccccagcgaggacaaagaggacatcgagagcaatctgttgaggcctactggtgtcgctctgcgcggcgcccacttctgtctcaaggtgtttagggccgaagacctgcctcagatggatgacgcagtcatggataatgtgaagcagatcttcggatttgagtccaacaagaaaaacttggttgatccgttcgtggaggtgtcctttgccggaaaaatgctctgctccaaaatccttgagaagaccgccaatccccaatggaatcagaacattaccctgcctgctatgtttccttccatgtgcgaaaagatgcgcattaggattattgattgggacaggctcacccataatgatattgtggcaaccacttacctgagtatgtccaagatctccgcccctggcggagaaattgaagaagagcccgcaggagcggtgaagccatctaaagcatctgaccttgatgattacttgggtttcctcccaacctttggcccttgctacatcaacctgtacggtagtcctcgcgagttcactggattccctgacccctataccgagctgaacactggaaagggagagggtgtcgcatacagaggccgcctgttgctgagcctcgaaacaaagttggtcgaacactccgagcagaaggtggaagatctgccagccgatgacatcctgagggtggaaaagtatctccgcaggaggaagtattctctgtttgccgccttctattccgcaactatgctgcaggatgtagacgatgctattcagtttgaggtgagcatcggcaactacggaaataagttcgacatgacctgcctgcccctggcctccactacccagtactctcgcgccgtcttcgacggctgccattactactacctgccatggggaaacgtgaagccagtggtggtgctcagtagttattgggaagacatatcacataggatcgagactcagaatcagctgctgggaattgcagacagactggaggccggtctggagcaggtccaccttgcgctcaaagcccagtgctctaccgaagacgtggatagccttgttgctcagctcactgacgaactgatcgccggttgtagccagcctcttggtgacatacatgagactccatcagctacccatttggaccagtacctttatcaacttcgcacccaccacctgagtcagatcacagaggctgccctggccctgaagttgggacatagcgagctccctgccgctctcgaacaagccgaggactggctgctgagattgcgcgcgctcgcggaggagcctcagaacagcctgccggatattgttatctggatgctgcagggcgacaaacgcgtggcttaccagcgcgtacccgcccaccaggtgctcttttccaggcgcggtgctaactactgtggcaagaattgtggaaaacttcagaccatctttctgaagtaccccatggagaaggtgccaggagcgaggatgcctgtgcagatccgcgtcaagctgtggttcggactctcagtcgacgagaaggagttcaaccagtttgctgagggtaagttgagcgtttttgctgagacttatgagaacgagactaaactcgcccttgttggcaattggggtaccactggcctgacttatccaaaatttagcgatgtaacaggaaagataaagctgccaaaggacagcttcaggccgagtgcaggctggacatgggcaggtgattggttcgtgtgcccggaaaagacactgctgcatgatatggacgcgggacacttgtcatttgttgaggaagtctttgagaaccaaacccgcctcccaggtggacaatggatctacatgagcgacaactacaccgacgtgaacggagagaaggtgctgccgaaggatgatatagagtgtccgcttggatggaagtgggaggacgaggagtggagcaccgacctgaacagagctgttgacgaacagggatgggaatacagtataacaatcccacctgagagaaagccaaaacactgggtgcctgccgaaaagatgtactacacgcacagacgccgcagatgggtcagactgagacgccgcgacctcagtcaaatggaggctctcaaacgccaccgccaggcagaggcggagggtgagggatgggaatacgcctctctgtttggctggaagttccacctggagtaccgcaagaccgatgcattcaggagaaggagatggcgcagaagaatggagccactcgaaaagaccggacccgccgctgttttcgccctggagggcgccctgggaggcgtgatggacgacaagtcagaggattccatgtctgtctccaccctgagttttggtgttaacagaccaacaatttcttgtatcttcgactatggaaataggtaccatctgaggtgctacatgtaccaagccagagacctggccgctatggataaggactccttctccgatccctacgctatcgtaagttttcttcatcagtcccaaaaaaccgtcgtggtaaaaaacactctgaatcccacttgggaccaaactctcatcttctatgagattgagattttcggcgaacctgcaacagtggccgaacagccgccgtcaatcgtcgtcgagctttacgaccacgacacatacggagcagacgagttcatgggaaggtgcatctgtcaaccatccctggaacgcatgcctcgcctcgcttggtttccgctgacccgcggaagccaaccttccggagagctgctggcctccttcgagctcattcagcgcgaaaagcccgctatccaccacattcccggcttcgaagtgcaggaaacctcacgcatcctggatgaatccgaagacactgatctgccatatcctccacctcagcgcgaggctaatatctatatggtgccccagaatatcaagcccgcactccagagaacggccattgaaattctggcttggggtctcagaaacatgaagagctaccagttggcgaatatttcttctccatctttggtcgtggagtgtggcggtcagacggtgcaatcatgtgttattaggaatctccgcaaaaatccgaatttcgatatctgcacactgtttatggaggttatgctgccccgcgaggaactgtattgccctcccattacggttaaagtgatcgacaacagacaattcggcaggcgcccggtcgttggccagtgtacaattaggtctttggaaagctttctgtgcgacccttacagtgcagagtctccctcaccacagggaggtcccgatgatgtcagtttgttgtctcccggcgaggacgttttgatagacatcgatgacaaggagccactgatcccaattcaggaggaggaattcatcgattggtggagcaagttcttcgcttccattggtgaaagggagaaatgcggtagctatctggaaaaggatttcgacacgctcaaggtgtatgacacccagttggagaatgttgaagcctttgagggactgtccgacttctgcaacactttcaagctctaccgcggcaaaacacaggaagagaccgaagaccccagcgttatcggagagttcaagggcttgttcaagatttaccctcttccggaggaccccgcaatccccatgccgccgagacaatttcatcaactggctgcccagggccctcaggagtgcctcgtcaggatttatatagtgcgcgcttttggtctgcagcctaaagatccgaatggtaaatgcgacccctacattaaaataagtattggcaagaagtccgttagcgaccaggacaactacatcccttgcaccctggagcctgtgtttggtaagatgttcgaattgacatgtacactccctctggagaaggacctgaagataactctgtacgattatgatcttcttagcaaagacgagaagattggcgaaactgtagtggatttggagaaccgcctgctgtccaaattcggtgcccgctgcggtctgccccaaacctattgcgttagtggaccgaaccaatggcgcgaccagctcagaccttcccagctgctgcatctgttttgccagcagcacagagtgaaggcacccgtataccgcaccgacagggtaatgtttcaggataaagaatacagcatagaggaaatcgaggcaggtaggattccgaatccccatctcggccccgtggaggagaggctggccctgcatgtgctccagcagcaaggtctggtgccagagcatgtcgagagccgcccactctactcccccctgcagcctgacatagagcagggcaagttgcaaatgtgggttgacttgttccctaaggcgttgggcagaccaggacctcccttcaatattaccccacgccgcgccaggcgcttcttcctgagatgcatcatttggaatacacgcgatgtaattcttgacgacctgagcttgacaggcgagaagatgtccgacatatatgtcaagggatggatgatcggttttgaggagcacaagcagaaaacggacgtgcactataggtcactgggcggcgagggcaacttcaactggaggtttattttcccatttgattatctcccagctgaacaggtatgcacaatcgctaagaaggatgcgttctggagattggataaaactgaatccaaaatccccgctcgcgtggtgtttcaaatctgggataacgacaagttctctttcgacgattttctgggctccctccaactggatctcaataggatgccaaagcctgctaagaccgcaaagaaatgttcactggatcaactggacgacgccttccatcctgagtggttcgtttccctttttgaacagaaaacggtgaaaggctggtggccatgtgtagcagaggaaggagagaagaagatattggctggaaaactcgagatgaccttggaaatcgtggcagagagcgagcatgaggaacgcccagctggtcaaggtagagatgagcccaatatgaatcccaagttggaggatcctagaaggccagacacctcattcctgtggttcacctctccgtacaagacgatgaagttcattctgtggcgccgcttccgctgggccattatcttgtttattatcttgtttatcttgctcctcttcctggctatctttatctatgccttccccaattacgctgctatgaaattggtaaagccctttagt

SEQ ID NO: 48027 - DNA, 6243 bp, Artificial Sequence
  derived and/or modified sequence
atgctttgctgcctgctggtcagagctagtaacctgccctccgcaaagaaggacagacgaagtgaccctgtcgcctcactgacttttaggggggtcaaaaagcgaacaaaagtcataaagaattcagttaatccagtctggaacgagggatttgaatgggatctcaagggcatccctctggatcagggtagcgagctccacgtggtggtgaaagatcacgagaccatgggtaggaacaggtttctgggagaagctaaagtccctctgcgagaggtcctggctaccccatcgctgagcgcttcattcaatgcccccttactggataccaagaagcaaccaacaggcgcctcacttgttctgcaggtaagctatactcctttgcccggggcggtgcctttattcccaccccccacccccctcgagccttcccctacactgcccgacctcgacgtcgtagccgacactggcggcgaagaagacacggaggaccagggactcacaggggatgaggcagaaccttttctggatcagagcggcgggcccggagcgcccacaacaccccgaaagttgcccagtcgacccccaccacactaccccggcataaaaaggaagcgctccgcaccaacctctaggaaactgctcagcgacaaacctcaagatttccagatccgagtccaagtcatcgaaggacgtcagctgcccggcgtcaatattaaacccgtggtgaaggtgactgcggccggccagactaaacgcacaaggatccacaagggaaatagccctctgtttaacgagaccctgtttttcaacctttttgattctcctggcgaactgtttgatgagcctatcttcataacagttgtagactctaggagtctgagaaccgacgcattgctgggggagtttagaatggatgtgggaacgatctaccgagagcctcgacatgcttatcttcgcaagtggctactgctgtccgaccctgatgacttttctgcaggagccagaggttatctgaaaacctccttgtgcgttctgggtcccggtgatgaggcgcccttagagaggaaagatccctccgaagataaggaggatatcgaatcaaatcttcttaggcctaccggagtcgctctccgaggggctcacttttgtcttaaggttttccgagccgaggatttgccccagatggatgacgctgtcatggataacgtaaagcagatcttcgggtttgaaagcaataagaaaaacctagttgatccttttgtggaggtctctttcgctgggaagatgttatgttccaagatccttgagaaaacggcaaatcctcagtggaaccagaacatcaccctgcccgccatgttcccttcgatgtgtgaaaaaatgcggatcagaattatagattgggatagactcactcacaacgatatcgtggccaccacgtaccttagtatgtcaaagatctccgctcccggtggggaaatcgaagaagagcctgcaggggcagtaaaaccatctaaggcatctgatctggatgactacctgggtttcctgccaacattcggaccatgctatatcaacctgtatgggtctccccgcgagtttacagggtttccggacccatacaccgaactcaatactggaaaaggcgaaggtgttgcttatagaggtagactgttactttccctggaaaccaagctcgtggaacattccgaacagaaagtggaagacctccccgcagatgatattctgagggttgaaaagtatctgagaaggcgtaagtattcgctgttcgccgccttctattcagcaactatgttgcaggacgttgacgatgccatccagttcgaggtttcgatcgggaattacggaaataagttcgacatgacctgcttgcccctcgctagcaccacccagtactcccgggctgtgttcgatggatgccattattattaccttccatggggaaacgtcaagcctgtggtcgttttgtcttcctactgggaagatatttctcacagaatcgaaactcagaaccagctcttgggcattgccgatcgtttggaggctggtttggaacaggtgcacctcgctctgaaggcccagtgctctacagaggacgtggactctctcgtggcacagcttacagacgaactgatcgctggctgctcgcagcctctaggcgatatccacgaaaccccttccgccactcacctggatcagtacctctaccaactccgaacccaccacctgtcccagattactgaggccgctctagcgctcaagctggggcacagcgagctaccggccgcactggagcaggctgaggattggctgctaagattgcgagcattggctgaagagccccagaacagtctgcccgacatcgtcatctggatgctgcagggggataaaagagtcgcatatcaacgagtccccgcacatcaagtgctgttctcacgacgaggcgccaattattgcggtaagaattgtggtaaactccagaccatcttcctcaaataccctatggagaaggtccccggcgcaaggatgccagtccagatcagagtgaagttgtggttcgggctgtccgtagacgagaaggaattcaaccaatttgctgagggcaaactcagtgtgttcgccgagacatacgaaaatgaaacaaaattggcgctcgtgggcaattgggggaccactgggttgacctaccctaagttttctgatgtgaccggaaagattaagctgccaaaagacagtttccgaccctccgcggggtggacgtgggcgggggattggttcgtttgccccgagaaaacacttcttcacgatatggatgcagggcacctgagttttgtcgaggaggtgtttgaaaaccagacacgactgccagggggacagtggatctatatgtccgacaactacaccgacgtgaacggggagaaggtgctgccaaaagatgatatcgagtgcccgctggggtggaagtgggaagacgaagagtggtctaccgacttgaacagggcggtcgacgagcagggatgggaatattctatcaccattcccccagaaaggaagcccaagcactgggtccccgctgaaaaaatgtactatacccataggcggcgcagatgggtaaggctgcgacgccgagatctgtcccagatggaagcactgaagagacaccgccaagcagaggcagaaggcgaaggatgggaatatgcaagtctttttggatggaaatttcacctggagtaccgaaaaacagatgccttccgtcgaagacgatggcgaaggaggatggaacctttggaaaagacaggcccagccgcggtctttgcactggagggggccttaggcggggtgatggatgacaagtccgaggattctatgtctgtatcaaccctttcctttggggtgaaccgtcccacaatctcttgcattttcgactacggcaaccggtatcatctccggtgttatatgtaccaggccagagatttggcagcaatggacaaagatagtttttccgatccgtatgcaatagtgagtttcctacatcagtcacagaaaacagtcgtggtcaagaatacccttaatccaacttgggatcagacactgattttctacgaaatcgagatttttggagaaccagccaccgttgccgagcaacccccttccatcgtcgtcgagctttatgatcatgacacctatggggcagacgagtttatgggccggtgcatttgtcagccttccctggagcggatgccacgactggcctggtttcctctgaccagggggtcccagccgtccggcgagcttcttgcttcatttgaactcattcaaagggagaagccggccattcaccatatcccaggctttgaggtccaggaaacatcgagaattctcgacgaatccgaagatactgatctcccataccctcctccacaacgagaggcaaatatatacatggtgccacagaacataaagccagcactccaaaggaccgccattgagattctggcttggggcctacgaaatatgaaatcttaccagctggccaatattagctctcccagcctcgtggtggagtgtgggggacagacagttcagtcttgtgttatccgcaacctccgaaagaatccaaactttgacatctgcacactgtttatggaagtgatgctgcccagagaggagttgtactgtcctcccatcaccgtcaaagtgatagacaatagacagttcgggaggaggcctgttgtgggccagtgcactatacgtagcctggaatctttcttgtgcgatccttattcagcagagagcccctctccgcagggcggacctgatgatgtatcgctgcttagccccggcgaggatgttttgatcgacatagatgacaaagagccacttatacctattcaagaggaggagttcatcgactggtggagcaagttcttcgctagtataggagagagggaaaagtgtggctcatacctggaaaaagactttgatacacttaaggtttatgacacgcagctggagaatgtggaggccttcgaaggtctctctgatttctgtaatacgttcaagctctacagggggaagacgcaggaggaaaccgaggacccttctgtgattggggagtttaagggcttatttaagatataccctctaccagaagaccctgccataccaatgcctccccgtcagtttcaccagctcgccgctcagggtccacaggaatgcctagtcagaatctacattgtccgcgcattcggattgcagccgaaagatcccaatggtaaatgcgatccttacattaagatctctattgggaaaaagagcgtgagcgaccaggacaactatattccttgtaccctggaacccgtgtttggaaagatgttcgaattgacctgcacattgcctctggaaaaggacctgaaaatcaccctgtatgattatgacttgctcagcaaggacgaaaaaattggggagacagtcgtggatctggaaaaccgtctgttgtctaagttcggcgctagatgcggactaccacagacgtactgcgtaagtggccctaatcagtggagagatcagctgagaccatcccagctgctccacctcttctgtcaacaacacagagtcaaggcacccgtttataggaccgatagagtcatgtttcaggacaaggagtacagtatagaggaaattgaggctggcagaatcccaaatcctcacctagggcccgtggaagaaaggctggccctgcacgtgctccaacagcaaggcttagtacccgagcatgtcgaaagtcgacctctatactcgccactgcagccagacatcgaacaggggaaactccagatgtgggttgatctcttccccaaagctttgggcaggcctggaccgccgtttaatataacccctcgacgggcacgacgattcttcttgaggtgcatcatttggaatactcgcgatgtaatcctggatgacctgtcactcacaggggaaaagatgagcgacatctacgtcaaaggttggatgattggattcgaggagcataaacagaagacggatgtgcattataggtccttggggggcgaaggcaacttcaattggcggttcatttttccgttcgactacctccccgctgaacaggtttgcacgatcgccaagaaagatgcattctggagattagacaagacagagtccaagatacctgcacgggtggtgttccagatctgggacaatgataaattctcctttgatgatttcctcggaagtctacagctcgatctcaaccgcatgccaaaacccgctaagacagccaagaagtgttccctggaccagctggatgacgcctttcatccagaatggttcgtgtctctgtttgagcagaaaacagtgaagggctggtggccatgcgtcgccgaggagggtgaaaagaagatcctggctggcaaactggagatgaccctggagatcgttgctgaatcggaacatgaggagcgacccgcgggccagggtagggatgaacctaatatgaatccaaagctggaggaccctagaaggccagatacatctttcttgtggtttacatccccatacaaaacaatgaagttcatcctgtggcggagattccgatgggctatcatcctcttcatcatcctctttattctgttgctattcctagcgatttttatatacgcatttcctaactacgcagcgatgaagctggtgaaacccttcagt

SEQ ID NO: 48028 - DNA, 6243 bp, Artificial Sequence
  derived and/or modified sequence
atgctgtgttgccttctagttagggcttccaaccttccttccgccaagaaagacagacgttctgatcctgtcgcatccctgacctttcgaggtgtgaaaaagcgcacaaaggtgataaagaactcggtaaacccggtttggaatgaggggtttgagtgggacctgaaggggattccactcgatcagggttctgagctgcacgtcgtggttaaagatcatgaaaccatgggtagaaatcgctttctgggggaggctaaagttcctttaagggaggtcctggccaccccctcactctcggcctcctttaatgcgcccctccttgacaccaaaaaacagccgactggtgccagcctggtccttcaagttagttacacacccctgcccggcgccgtgcccctgttcccccccccaacccccttggagccttcccccactctccccgatttagacgtcgtagcagacacaggcggggaagaggacactgaggaccagggccttacaggagatgaggccgagcccttccttgaccagagcgggggccctggcgccccgactacaccccgaaaattaccgagcagaccgcccccccactatcccggcattaaaaggaaacggtcagccccgacttccagaaagctactctccgataaacctcaggattttcagatcagagtgcaagtaatagagggccgtcaactacccggcgtgaacatcaaacctgtggttaaggttacagccgcggggcagactaagcgcacccgcatacacaagggcaactcaccactgttcaatgaaactctcttcttcaatctgttcgattcaccaggcgagttattcgatgagcccatctttatcaccgtggttgactctaggagccttcggactgatgctttgctgggggaatttcggatggatgtggggacaatttaccgcgaaccccgacacgcatatcttagaaaatggctcctgttgagtgatcccgacgacttcagcgctggagccagaggatatctaaagacttccctgtgtgttctgggcccgggggatgaagcccctctggagagaaaagacccatctgaagacaaagaagatatagaaagcaacctgctccgccccactggcgttgcactgcggggagcgcatttctgcctcaaagtatttagggctgaggacttgccccagatggacgatgcagtcatggacaacgtgaaacagatctttggattcgagagcaataagaagaacctggttgatccctttgtggaggtatcattcgcaggcaaaatgctttgtagcaagattctcgaaaagaccgctaatcctcagtggaatcaaaatatcaccttgcccgccatgtttcctagcatgtgtgaaaagatgaggatccggattatcgactgggatcggttgacacataatgatatcgtggccacgacctacctgtccatgtccaagatctctgcccctgggggcgagattgaagaggaacccgctggtgcagtgaaaccgtcgaaagcatcagacctcgacgattacctcggatttctccccacatttggtccttgctatattaatctgtatggctcccctagagaatttacgggtttccctgacccctacacagaactcaatacaggcaaaggggaaggcgtcgcgtatcgcgggcgactactgctctctctcgagacgaaactggtcgaacatagtgagcagaaggtagaggatctgcctgctgatgacatcctgcgtgtggagaaatacctgcggcggaggaagtactcattattcgccgccttctactccgccacgatgttgcaggacgtagatgatgctatacaatttgaagtgtctattggcaactacggcaacaaatttgacatgacatgcctgccacttgccagcactacgcagtattcaagggcagtctttgatggctgtcactactattacctaccatggggaaacgttaagcctgtggtggtgctgtcttcctactgggaggacatcagtcacaggattgaaactcagaatcagctgctgggcatcgcggaccgacttgaagccgggctcgagcaagtgcatctcgccctgaaagctcagtgttccacagaggatgtggacagcctcgtagcacagctgaccgatgaacttattgcaggctgctcccagcccctgggggatatccacgaaaccccatccgcaacgcatttagaccagtacctgtatcagctgaggactcatcatctgtcccagatcacagaagctgcactagccctaaagctcggacactccgagctaccagccgcattggaacaggccgaagactggcttctgcgcctgcgtgcattggccgaggagcctcaaaattcccttcctgatatcgttatctggatgttgcaaggggacaaacgtgtggcctaccagcgcgttcctgctcaccaggtcctattctctagacggggggccaattattgtggaaagaactgcggcaaactccagaccatctttctcaagtatcctatggagaaggttcccggcgcccgaatgcccgtgcagatcagagttaaactctggttcggacttagtgtcgacgaaaaggagttcaatcagtttgccgaggggaagttgagtgtcttcgcagaaacatatgagaacgagacgaaactcgccctggtagggaactgggggacaaccgggttgacctacccaaagttcagcgatgtgacaggcaaaatcaaattacccaaggactccttcaggccttcggccggttggacttgggcgggggactggttcgtgtgcccagaaaagaccttgctccacgacatggacgccggccaccttagcttcgtggaagaggtcttcgaaaaccagacgcgactgcccggtggccagtggatttacatgagcgataattatacagacgtcaatggggaaaaagtcctgcccaaagatgatatagagtgtccacttggctggaaatgggaagacgaagagtggtccacggatttgaacagagccgtggatgagcaggggtgggagtatagcatcacgattccccccgaacgtaaaccaaagcattgggtgccagcggagaagatgtattatacacaccgcagaaggcgttgggttagactgaggcgccgtgatctgtcccagatggaagctctcaagagacatcgccaggccgaggccgagggcgaggggtgggagtacgcgagtctcttcggttggaaattccatcttgagtacaggaagacggacgcatttaggagacgtcgctggagacggagaatggagcccctagagaaaacgggacctgccgcagtattcgccttggaaggcgcactaggaggcgtgatggatgataaatctgaggattccatgtccgtgtccaccctgtcctttggtgtcaacagaccgactatcagctgtatttttgactatgggaaccgatatcacctccgctgctatatgtaccaggccagggatctggcggcaatggacaaagacagcttcagcgatccatacgcaattgttagctttctgcaccagtcccaaaagaccgtagtcgtcaagaacacactgaaccccacgtgggaccagactttgatcttttatgaaatcgagatttttggcgagccggcaactgtcgccgagcagcctccgagcatagtggtggaactctatgatcatgatacttacggcgccgacgaattcatgggtaggtgcatttgtcagccttccttggaaagaatgccccgcctggcttggttcccgcttacgcggggctcccagccttcaggcgagttattggcctcgtttgagctcatacagcgagagaagcctgcgatccaccacatccccggctttgaagtgcaggagacatctcggatcctggatgaatcagaagacacagatcttccgtatcctcccccccagagggaagcaaatatttatatggtcccacaaaacattaaacccgcactccaaagaaccgcaattgagattctggcctggggtctgcggaacatgaaaagctaccaactggcaaacatatctagccccagccttgtcgtggaatgtggtgggcaaaccgttcagagctgtgtgattcgaaatctgaggaaaaatcccaacttcgatatttgcaccctgtttatggaggtgatgctcccgagagaagagctgtactgcccacccataaccgtgaaggtgattgacaaccgacagttcgggaggcggccagtggtagggcaatgtacaatccgcagtcttgagagtttcctgtgcgacccctacagcgccgagtcaccttcaccccagggtggtccggatgatgtgtctcttttgagtcccggcgaggatgtgctgatcgacatcgatgacaaagaacccctgattcctattcaggaagaggagttcattgactggtggagtaagttcttcgccagtattggcgagcgggagaaatgtggctcctatctggagaaggattttgatacattaaaagtttatgatacccaactagaaaacgttgaagctttcgaggggctgagcgacttttgcaacaccttcaaactttaccggggaaagacacaagaagagactgaggacccttctgttatcggggaatttaaggggctgttcaagatctatccgctgccagaagatcccgcgatccccatgcctcccagacagtttcaccagttagcggctcaggggccccaagagtgcctggtgcgcatctatatagtgcgtgcgtttggactgcagcctaaggaccccaatgggaaatgcgacccatatatcaaaatcagtattggcaagaagagcgtctctgatcaggacaattatataccatgcacactggagccagtttttggcaagatgtttgagctcacctgtaccctgccattggagaaggatctgaaaattactctttatgactatgatctcctttctaaagacgaaaagattggcgaaactgtagtcgatctggagaatagactgttgagtaagttcggagcgcggtgtggtttgcctcaaacgtactgtgtctctggacccaatcaatggcgcgaccaactgaggccgagtcaactgttgcacttattttgtcagcagcatcgcgtgaaggcgcctgtgtacaggaccgaccgggtgatgttccaggacaaagagtattctattgaagaaatcgaggctgggcgaataccaaaccctcacctaggcccggtggaggaacgactggctttgcatgtgttgcaacagcagggtctggttccagagcatgtggagtcccgccctttatacagtccattgcagccggacatagagcagggaaaattacagatgtgggtcgacttgtttcctaaggcactggggcggccaggtccaccctttaacattactccccgccgcgctagaaggttttttctgagatgcattatttggaatacgcgagacgtcattcttgatgatctgtctctaaccggcgaaaagatgtccgatatttacgtcaagggatggatgatcggttttgaggaacataagcaaaagaccgatgtacactatcgatctctggggggcgagggcaacttcaactggcggtttatctttcctttcgactatctcccggccgaacaagtgtgcaccattgcgaagaaggatgcattttggcgcctcgacaagaccgagtccaaaatcccagctcgagtggtctttcagatctgggacaatgacaaattttcctttgacgactttttgggttcccttcagttggatctgaaccggatgcccaagcccgctaaaaccgcaaaaaagtgctctctcgaccaactggacgatgccttccaccctgagtggttcgtgtctctgtttgagcagaaaacagtcaaggggtggtggccctgcgttgcagaggagggtgagaaaaaaattcttgccggcaagctggaaatgaccctggaaatcgtagccgaaagtgagcacgaagagcgccccgctggccagggacgggacgagccaaacatgaaccccaagctggaggatcctcgcaggccagatacttcatttctgtggtttacctccccctacaagacaatgaagtttattctctggcgccgatttcgatgggctatcattctattcattattctttttatcctcctcctttttttagccatcttcatctatgcttttccaaactacgccgctatgaagctggttaaacctttctcc

SEQ ID NO: 48029 - DNA, 6243 bp, Artificial Sequence
  derived and/or modified sequence
atgttgtgttgccttctggtgagggcaagcaatttgccgagcgcaaagaaggatcgtcgatcagacccggttgcgtccctcacgtttcgtggtgtcaaaaagagaacgaaggtgatcaaaaactccgtgaacccggtctggaacgagggattcgaatgggatctgaaggggataccacttgatcaaggctcggagcttcatgtcgtggtaaaggatcacgaaacgatgggacgtaaccggtttctgggcgaagcgaaggtgcctctgcgggaagtgctggcaactcctagcctgtccgcatcctttaatgcaccactgcttgatactaagaaacaacctactggagccagcctggtgctgcaagtgtcctacactccattgccaggcgcagtgccactgtttccaccgccaactcctctggaaccatcgcccactctcccagatctcgacgtggttgcagacacgggaggtgaagaggacaccgaagatcaaggactgaccggcgatgaggcagagccttttcttgatcaatcaggtgggcctggagcccctactaccccacgcaagctccccagcagacccccaccccattaccctggtattaagagaaagcggtccgcacctacctcaaggaaactgctgtcggacaagcctcaagattttcaaattcgtgtgcaggtgatcgaaggtagacaactcccaggagtgaacataaagccagtggtcaaagtgaccgcagcaggacagactaaacgtaccagaatacacaagggaaatagccctctctttaacgaaaccctctttttcaacctctttgacagcccgggagaacttttcgatgaacccatctttatcactgtggtcgacagccgatcgcttcgtaccgatgcccttctgggggagtttcggatggatgtgggcaccatttaccgggagccacgacacgcgtacctgcggaaatggcttctgctctcagacccggacgatttctcggcaggagcacgaggataccttaagacttcgctttgtgtgctcggacccggagatgaagcaccccttgaacgaaaggacccatcggaagataaggaagatatcgaatcgaacctgcttagacccacgggtgtcgcactcaggggagcacacttttgtctgaaggtgttccgcgctgaggacctccctcaaatggatgatgctgtcatggacaatgtaaagcaaatctttggttttgaatcaaataagaaaaacttggtcgatccctttgtggaagtgtcctttgcgggaaagatgctgtgttcaaagatccttgagaaaacggcgaatcctcaatggaaccagaacataactctgcctgcgatgttcccctcaatgtgtgaaaagatgcgaattaggattattgactgggatagacttacccataatgacatcgttgcgactacttacctctcaatgtccaagatatccgcgccaggtggggagattgaagaagagcccgccggggctgtgaaaccttcaaaggcatcagaccttgatgattaccttgggtttctgcccacctttggtccgtgctacatcaatctttacggttccccgcgggagtttactggattccctgacccttacaccgagctgaacactgggaagggagaaggggtcgcataccgggggagattgctgctttcgctcgaaactaagctcgtggagcattccgaacagaaggtggaagatttgccagcagatgatatcctgcgcgtcgaaaagtatctgaggcggcgtaagtactccctgtttgcagcattctacagcgcaaccatgctgcaggacgtggatgatgcaatccaattcgaagtgagcataggcaactacgggaacaaattcgacatgacctgcctcccactggcatcaaccactcaatactcaagggccgtgtttgacggatgtcactactactaccttccttggggaaacgtgaagcctgtggtcgtcttgtcatcatattgggaagatatcagccatcgtattgaaactcaaaatcagcttcttggaattgcagacagactcgaagcaggactggagcaggtgcatctcgcccttaaagcgcaatgttccaccgaggatgtggattccctggtggctcaacttaccgatgaactcattgcggggtgctcgcagcctctcggtgatattcacgagactcctagcgcgactcatcttgaccagtacctgtaccaactgcgaacccatcacctcagccagatcacggaagctgcactcgctctgaaactcggtcacagtgaacttccagccgccctggaacaggcggaggattggcttctcagacttcgcgctcttgcagaagaacctcagaactcattgccagacatcgtcatatggatgctgcaaggagataaaagagtggcgtaccaacgagtgcctgcacatcaggtgctctttagcagaagaggtgcaaattactgtgggaagaactgtgggaagctccagaccatcttcttgaaatacccaatggaaaaagtcccaggagcccgcatgccagtgcaaattagagtgaagctgtggttcggactgagcgtggatgaaaaggagtttaatcagtttgcagaagggaagctgtcagtgtttgcagaaacctacgaaaacgaaactaaactggcactcgtgggtaactggggaacgaccggcctgacgtaccccaagttttcagacgtgacgggcaagattaagttgccaaaggatagctttcggccatcggcaggttggacctgggccggtgattggtttgtgtgccctgagaaaacgcttcttcatgatatggacgcaggacatctcagctttgtggaagaagtctttgaaaaccaaacccggctccctggaggccagtggatctacatgagcgataactatactgatgtgaacggtgaaaaagtgcttcctaaagatgacattgagtgccctctcgggtggaaatgggaggacgaagaatggtcaaccgacctgaacagagccgtggatgagcaagggtgggaatatagcatcactattccaccagagcggaagccaaagcactgggtgccagccgagaagatgtactacacccaccggaggaggagatgggtgaggctgcgtcggagagatctttcgcaaatggaagcactgaaacgtcatcggcaagcggaagcagaaggcgaaggatgggagtatgcgtccctgtttggatggaaatttcatcttgaatacagaaaaaccgatgcatttcggagaagaagatggcggcggcgcatggagcctcttgaaaagaccggacctgcagccgtttttgcactggaaggcgcattgggaggagtcatggatgataaatccgaagattcaatgtcagtgagcactcttagctttggggtgaacagaccaactatttcctgcatctttgactatggaaataggtaccacctgagatgttacatgtaccaagcccgggatctggctgcaatggataaggattcgttctccgacccatacgccattgtgtcgtttctccatcaaagccaaaagacggtcgtggtcaagaacactctgaatcctacctgggatcagactctcattttctatgagattgagatctttggggaaccagcaactgtcgcagaacagcctccaagcatcgttgtggaattgtacgatcatgacacgtatggggcagatgaattcatgggaaggtgtatttgccaacccagccttgaaagaatgcctcgccttgcgtggtttccactgactagaggttcgcagcctagcggcgagctgctggcatcattcgagcttatccaaagagaaaagcctgccattcaccacatccctggatttgaagtgcaggagacgtcgagaatactggatgaatccgaggacactgacttgccatacccaccgccccaacgtgaggcaaatatctacatggtgccacaaaacattaagcctgcactccaaagaaccgcaatcgaaatcttggcatggggacttcggaacatgaaatcataccaactggcgaacataagctccccaagccttgtcgtggaatgtggaggccagactgtccaatcatgtgtgatcagaaaccttagaaagaaccccaactttgacatctgtaccctcttcatggaggtgatgttgcctcgcgaagaactttattgtccccctatcaccgtgaaagttattgataaccgccagttcggtcgcagacctgtcgtgggacaatgtaccatccgctccctcgaatcatttctttgtgatccctactcggctgagtcgccatcgcctcaaggaggtcctgacgacgtgtcacttctttcgcctggcgaagatgtgcttattgatattgacgataaggagcctttgataccgatccaagaagaggaattcattgattggtggtcgaagttcttcgcttccatcggagaaagagaaaagtgtggatcatacctcgagaaggattttgacacccttaaggtctacgacacccagctggaaaatgtcgaggcgttcgaaggtctttcggatttttgtaacacgtttaagctgtaccgaggtaagactcaggaggagactgaggacccctccgttattggggaattcaagggactctttaagatctaccctttgcctgaggatcctgccattcctatgccgccccggcaatttcaccagcttgccgcacaaggtcctcaggaatgcctggtgagaatatacattgtgcgcgcattcggtctgcagcccaaggacccaaatggtaaatgtgatccatacataaagatttctatcgggaaaaagtctgtttcagatcaggacaattacatcccttgtaccctcgaaccggtctttggtaagatgttcgaactgacctgtaccctgccgcttgaaaaggatctgaagataactctgtacgattacgatctgctttcgaaggatgaaaagatcggggaaaccgtggtggaccttgagaacagacttctgtcgaaattcggcgcaagatgtggactgcctcaaacctattgcgtctccggtccgaaccagtggcgagatcaattgcgtccatcgcagctgttgcaccttttctgtcaacagcatagagtgaaagccccggtgtacaggaccgatcgggtcatgtttcaagataaggagtatagcatagaagagattgaggctgggcgtattcctaacccacacctgggccctgtcgaggagaggctggccctgcatgtgcttcagcagcagggactcgtgcctgaacatgttgaatcgaggcctctctacagcccactccagcctgacattgaacaaggaaagctgcaaatgtgggttgaccttttccctaaagcacttggacggcccggcccgccgtttaacataactcccagaagagcgagacgcttttttcttcgctgcatcatttggaacacgagagatgtgatactggatgatctgtcactgaccggagaaaagatgtcggatatctacgtgaagggttggatgattggttttgaagaacacaagcaaaagaccgacgtgcattaccgttcgcttggtggagaagggaactttaactggagattcatattcccttttgactacctgcctgcggagcaggtgtgtactattgctaaaaaggatgcattttggcggcttgataaaaccgagtcaaaaatccctgcaagagtggtgttccagatctgggataacgataagttctcttttgacgactttctgggatctcttcagcttgatcttaaccgaatgcctaagccggcaaagactgccaagaagtgctccctggaccagcttgacgacgcatttcatccagaatggttcgtgtcgctcttcgagcaaaagactgtgaaagggtggtggccctgcgtggccgaagaaggagagaaaaagatcctggcgggtaagctggaaatgacccttgaaatcgtggctgaatccgaacatgaggagcgacccgctggtcaagggagagatgaacctaacatgaatccaaaacttgaggatcctcgtagacctgacacttccttcctttggttcaccagcccatacaagaccatgaagtttatcttgtggcggcggttcaggtgggcaatcattctgttcattattctcttcattctgctgctctttctcgcgattttcatatacgcatttccaaattacgcagcaatgaaactcgtcaagccttttagc

SEQ ID NO: 48030 - DNA, 6243 bp, Artificial Sequence
  derived and/or modified sequence
atgctgtgttgcctcctggtcagagcctccaacctgccgtctgcaaagaaggacagaagatcggacccagtggccagccttacctttagaggagtgaaaaaacggacgaaggtgataaagaacagcgtgaatccagtgtggaatgaaggatttgaatgggacctcaagggaatacctctcgaccagggaagcgagcttcatgtggtggtgaaggatcatgaaacgatgggccgaaacaggttcctgggagaagcaaaagtgcctcttagagaagtgttggcaaccccatctctcagcgcatccttcaacgcccctttgcttgacaccaagaaacagcctaccggagcaagccttgtccttcaggtgtcgtatactccgctgcctggcgctgtgcctctttttcccccacctacccctcttgaaccatcgcccactctcccagatctcgacgtggtggccgataccggaggagaagaagatactgaagatcaaggcctgactggcgatgaagcagaacctttccttgaccagtccggcgggcctggcgcgccaactaccccccgcaagctccctagcagaccaccaccacattatcctggcatcaagagaaagaggtcggccccaacgtcgcgtaagctgctcagcgataagcctcaagacttccagattagggtccaggtgattgaaggacgacagcttcctggagtgaacattaagcccgtggtgaaagtgaccgcagcaggacaaaccaagcgcactaggatccataagggaaactctccacttttcaatgaaactttgtttttcaatctgtttgactcccccggggaacttttcgatgaacctatattcattactgtcgtggatagcaggagcctcagaacggatgctttgcttggggagtttcgaatggatgtggggaccatctacagagagcctcgacacgcgtacttgcgaaagtggcttctgctgagcgatcccgacgacttttcggcaggggctcgaggttacctgaaaacgagcctctgcgtcctcggacctggagacgaagcccctcttgaaagaaaggacccttccgaggacaaggaggacattgaatcgaacctgctgcggcctaccggtgtcgcgctcagaggagcgcacttttgtctgaaggtgtttcgtgcagaagatctcccgcaaatggatgatgcagtgatggataatgttaaacagatctttggttttgagtccaacaagaaaaatcttgtggatccttttgtggaagtgagctttgctgggaagatgctttgcagcaaaatcctggagaaaaccgcaaatccacaatggaaccagaacataacgctccccgccatgtttccttcaatgtgtgaaaagatgcgcataagaattatcgattgggataggctgacccataatgatattgtggcaaccacctacctttcgatgtcgaagatttccgcaccaggcggagaaatagaggaggaacctgcaggcgcggtgaaaccctcgaaagcgtcagatctggatgactacctgggttttctgcctactttcggaccttgttacatcaatttgtacgggagcccgcgcgagtttaccggatttcccgatccctacactgagctcaacactggtaaaggagaaggagttgcgtacagaggcagattgctgctctcactggaaactaagctcgtggagcattccgagcaaaaggtcgaagatctcccagcagatgacattttgagggtcgagaagtacctccgcagacgcaagtactctttgtttgccgcattttactccgcgaccatgcttcaagacgtcgacgatgccatccagtttgaagtgagcattggaaactacggtaataagttcgatatgacttgccttccgcttgcatcaactacccaatattctcgcgcggtctttgatggctgtcattactactacctgccatgggggaatgtgaagccagtggtggttttgtcatcatactgggaggacatatcccatcgcattgagacgcaaaatcagctgctgggaattgctgatcgtcttgaggctggtcttgaacaagtgcatctggccctcaaggcacaatgttcaactgaagatgtagactccttggtggcgcaattgacggatgaactgatcgccgggtgttcccaacctcttggagacatacacgaaactccttcagcaactcatctggatcagtacttgtaccagcttcgcacccatcatctgtcccaaatcaccgaagccgctctggcgctgaagttgggtcactcggagcttccagcggcacttgaacaggcagaggattggttgctcagacttcgggcacttgcggaggaaccacaaaacagcctccctgatattgtgatctggatgttgcaaggagataagagagtcgcatatcaacgagtgcccgcgcatcaggtgcttttttcacgtaggggagcaaactactgtggcaagaattgtggaaaacttcagaccatttttcttaagtatcctatggaaaaagtccctggtgcccgcatgcctgtgcagattcgagtcaagctctggtttggactctcggttgatgagaaggagtttaaccaattcgctgaaggaaagctgtccgtgtttgctgaaacctacgaaaatgaaacgaagctcgcactcgtcggaaactggggaaccactggactcacctacccaaagttctcggatgtcaccggtaaaatcaagttgccaaaggactcgtttcggcctagcgcaggttggacctgggccggcgattggtttgtgtgtcccgaaaagaccctgctgcatgacatggacgccggtcaccttagctttgtcgaagaagtgtttgaaaaccagactcgactgcccggcgggcagtggatctacatgtcagataactacaccgatgtgaacggtgagaaggtcctgcccaaagatgatatcgaatgtccactgggctggaaatgggaggacgaggaatggagcaccgacctgaatagagcagtagatgaacaaggttgggaatactcaatcacgatacctccagaacgaaagccaaagcattgggtgccagcagaaaagatgtactacactcatcgtaggagacgttgggtcagactgcggagacgggatctttcgcaaatggaagccctgaagcggcaccggcaagcggaagcagagggtgaaggttgggagtacgcgtcgctgtttggatggaagttccatcttgaataccgtaaaaccgatgctttcaggaggcgtaggtggcggcgtaggatggagccactcgagaaaactggcccggcagcggtctttgcactggaaggtgcgctcggtggtgttatggacgataagtccgaagattcaatgagcgtctccactctgtccttcggagtgaaccgtccgactatcagctgtatctttgactacgggaacagataccatcttcggtgctacatgtatcaggccagggatcttgcagcaatggataaggacagcttctccgatccttacgcaatcgtctcgttcctgcaccaatcgcagaaaacggtggtcgtgaagaatactcttaaccctacctgggatcaaactctgatcttttacgagatagagatttttggcgagccagcgaccgttgccgaacaacccccttccatagtggtggaactttacgatcatgatacctacggcgcagatgagttcatgggtcgatgtatctgccagccttcgcttgaaagaatgcctcggctggcctggtttccgctcacccggggatcgcaaccttccggagaactcctggcatcctttgagttgatccaaagagagaagcccgctattcatcatataccgggtttcgaagtgcaggaaacctcccgcattcttgatgagtccgaagatactgacctgccttacccaccgccccagagagaagcaaacatctacatggtgccgcaaaacataaagcccgccctgcagcgcactgcgattgaaatactcgcctggggactccggaatatgaaatcgtaccagctggcaaatatctcatccccttcgctggtggtggagtgcggtggtcaaaccgttcaatcctgcgtgatccgcaatctccgcaagaatcctaactttgatatttgtaccctcttcatggaagtgatgcttccacgtgaagaactttactgtccaccaattactgtgaaagtcatcgataataggcaattcgggagacgccctgttgttggtcaatgcaccattcgcagcctggaatcatttctctgcgatccctactcggcagagtcaccatcccctcagggtgggccagatgatgtgtcgctcctttccccaggtgaggatgtcctcattgacatcgatgacaaagagcccctgatccctattcaagaagaggaattcattgattggtggagcaagtttttcgcatccatcggtgaacgcgaaaagtgtggatcctacctggaaaaggacttcgatacccttaaagtgtatgacacccaactcgagaacgtggaagccttcgaaggactcagcgatttttgtaacaccttcaaactgtaccggggaaagactcaagaagaaactgaggacccctcagtgatcggtgagtttaagggtttgtttaagatctaccctctccctgaagatcctgccattccaatgcctccacggcaatttcatcaactggcagctcaagggcctcaagagtgccttgtcaggatttacatagtacgggcctttggcctgcagccgaaggatcctaatggtaagtgtgatccttacattaagatctcgatcggcaagaaaagcgtctccgaccaagataactacatcccatgtactctggagcctgtgttcggcaaaatgttcgaactgacctgcaccctccctcttgagaaggacctcaagattaccctgtacgactatgacctgctgtccaaggatgaaaagatcggagaaaccgtggtggacctcgaaaaccgccttctttcaaaattcggagctcgatgtggtttgccccaaacttattgtgtctcgggaccgaaccagtggagagatcagcttagaccatcccagctcctccatcttttttgccaacaacacagagtgaaggcacccgtgtaccggaccgatagagtgatgtttcaagataaggaatacagcatagaagagattgaagcaggaagaatcccaaaccctcatctgggtcctgtggaagaacgcctggcacttcatgtgctgcaacagcagggccttgtgccagaacatgtggagtcgcggcctctgtactcgcctcttcagcctgatatagaacagggtaagctccaaatgtgggtggatttgttccccaaggcgcttggacgtccaggaccaccttttaacattactccaagacgcgcacgtaggttttttctccggtgtataatctggaacacgagggatgtcatcctggacgatctgtccctgaccggcgaaaagatgtcagacatctacgtgaagggatggatgattggatttgaggagcacaaacagaaaaccgatgtgcactaccgctcgctggggggagagggaaatttcaattggagattcatttttccttttgattacctgcctgcagagcaggtgtgtaccatcgccaaaaaggatgccttctggagacttgataagaccgaatctaagattcctgcccgggtggtattccaaatctgggacaacgataagttctcatttgatgatttcctcggatccctccaacttgatctgaaccgaatgcccaaaccagcaaagaccgccaagaagtgctcactcgatcagctggatgatgccttccatccagagtggttcgtgtccctcttcgaacaaaagacggtcaaaggatggtggccgtgcgtcgcagaggagggggaaaagaagattctggcaggaaagttggaaatgaccctggaaatagtggcagaatcagaacacgaagaacgacctgcagggcaaggacgtgatgaaccaaacatgaacccaaaactggaggatccacgaaggccagatacttcattcctctggttcacctcaccctacaaaaccatgaagtttatcctgtggcgacgatttagatgggctattatccttttcataatccttttcattctgctgctgttcctggctatcttcatatacgcattccccaattacgcagccatgaagctggtgaaacctttttcg

SEQ ID NO: 48031 - DNA, 6243 bp, Artificial Sequence
  derived and/or modified sequence
atgctgtgttgtctgctggtccgggcgagcaatcttccctccgcaaaaaaagatcgtaggagcgatcctgtcgcatccctcactttcaggggggttaagaaaagaacgaaggtcattaaaaatagcgtcaacccagtctggaacgaagggttcgagtgggatttgaaaggcatccccctggaccagggaagcgagttgcacgttgtagtgaaagaccatgaaacgatgggtcggaacaggtttttaggagaggcaaaggtgcccctgcgggaggtactcgcgaccccttcactcagcgctagttttaatgctccccttctcgataccaaaaaacagcccactggggccagcttagtgttgcaggtgagttacacacctttgccaggagctgtgcctctgttccctccccctactcctctggagccatctcctacattgcctgatctcgatgtcgtcgccgacaccggtggcgaggaagacacagaagaccagggcctgaccggtgatgaggcggagccgttcctcgatcaatccggcggtccaggcgccccaacaactcctcgcaaattgccgtccagaccaccgcctcactatcctggcattaagcggaagcgatcggcacccactagtaggaagttactgtcggataagccacaggattttcagatccgcgtgcaagtgattgaaggtaggcaattgcctggcgtcaatatcaaacctgtcgtgaaagtaacagcagccggtcagactaagcgaacacgtatccataaggggaactctcctttgttcaacgaaaccctcttcttcaatctgttcgacagccccggcgagctgttcgatgagccaatattcatcacagtggtcgattcaagatccctcagaaccgacgctctgctgggcgaattccgtatggacgtgggaactatctacagggaacccagacatgcgtacctgcgaaaatggctgctgctgtccgacccggatgacttcagcgccggcgccaggggctatcttaaaaccagcctttgcgtccttggaccaggtgacgaggccccgttggagagaaaggatccatcagaggacaaagaggatatagaaagcaatctgctcagaccaacaggggtggcactgaggggcgcccacttctgccttaaagtcttcagggctgaagacctgcctcagatggatgatgcggttatggacaacgtaaagcagatcttcgggttcgagtctaacaaaaaaaatctggtagacccgttcgtggaggtctcctttgccgggaaaatgctgtgctcaaagatccttgaaaaaactgccaatccccaatggaaccaaaacataactcttcccgcaatgtttcccagcatgtgcgagaagatgaggatccgcatcatcgactgggataggctgacccacaacgacatcgtagctacgacttatttgtctatgtcaaagatttctgctcccggtggagaaatagaggaggagccagctggcgccgttaaaccctccaaggcatcagatctggacgattacctgggttttttgcctactttcggtccttgttacattaatttgtatggcagtccacgtgagtttacagggttccccgatccttacactgagttgaatacgggcaagggagagggggtggcataccggggacggcttttgctgagtctcgaaaccaagctagttgagcactccgaacagaaagtggaagatctccccgccgacgacatacttcgcgtggagaaatatctgcgaagacggaaatactcactattcgcagccttttatagcgcaaccatgctgcaggacgtggatgacgcgatacagtttgaggtgagtatcggtaactacggaaacaaattcgacatgacctgcctgccgttggcctccacgacccagtacagcagagccgtcttcgacggatgccactattactatcttccctggggaaatgttaagcccgttgtagttttgtcctcctactgggaagacatctctcatcgaattgagacccagaaccaactcctgggaattgccgatcggctcgaagctggcctggagcaagtgcacctggccctgaaggcgcaatgtagtactgaggacgttgactccctcgtggctcaactgacagatgaactgatcgcgggttgttcccagccactaggggatatacatgaaacaccctcagcaacccatcttgaccagtatctgtatcaactgcgtacacaccacctgtcacagataaccgaggccgccctggcactgaagctggggcactctgagttgcctgccgcactcgaacaggccgaggattggcttctgaggttgagggctctggctgaggaaccccaaaatagtttaccagatattgttatttggatgctacagggggacaagcgtgtggcataccagcgggtgcccgcgcatcaggttctcttttcccgccgcggggcaaattactgcggaaagaattgtggaaaactccagaccatttttcttaagtatcctatggaaaaagtcccgggtgctaggatgccagtacaaatccgggtgaaactctggttcgggctgagcgtagacgagaaggagttcaaccagtttgccgagggaaagttgagcgtttttgcggagacctatgaaaacgagaccaagctagccttggtgggcaattggggtaccacaggtttgacgtaccccaaatttagtgatgtgaccggaaagatcaaactgccgaaggatagcttcaggccatcagcagggtggacgtgggccggagactggttcgtatgtcccgagaagacactgctgcacgatatggacgctggacacctgtctttcgtcgaagaagtgtttgaaaatcagacacggcttcctggagggcagtggatttatatgagtgataactatacggacgtgaatggggagaaagtcctcccgaaagacgatattgagtgccctttaggatggaagtgggaagacgaggaatggagcaccgatctgaaccgggccgtggatgagcaaggctgggaatactcgattaccatcccacctgagcgaaaacctaagcactgggtgcctgcagagaaaatgtactacacccacagacgcagacgctgggtgcgccttagaaggcgagacctatctcagatggaggccctcaaaagacaccggcaagcagaggcggagggggagggatgggaatacgcttctctctttggttggaaatttcacctagagtataggaagaccgatgcattcagaaggagacgctggcggcggcgaatggagccactcgagaagaccgggccagcagctgtttttgcgctggagggggcgctcggaggagtgatggatgataagtcagaggacagtatgtccgtcagtaccctgtccttcggtgtcaacagacctactatatcatgcatcttcgattacggcaataggtaccacctgcgatgctacatgtatcaggcgagggaccttgcagcaatggacaaagatagctttagcgacccatatgctattgtgtctttccttcaccagtcacagaaaaccgtcgtggtaaaaaacacgttgaaccccacatgggaccaaaccctgatcttttacgagatagaaatcttcggggagcccgccaccgtggctgaacagcccccctctatcgttgtggagctctacgatcacgatacatacggggctgacgaattcatggggcgttgtatatgccagccttcactggagcgaatgcctcggttagcttggttcccactgactaggggctcccagccatccggagaacttctggcaagcttcgaactaatccaaagggaaaaaccagccatccaccatatccccggtttcgaagtgcaggagactagcagaattcttgatgagtcggaggacaccgacctcccctaccctcctccccagcgggaagccaacatctatatggtcccgcagaatattaagcccgctctgcagcgcacagcaatagagatcctggcctgggggctgcgcaatatgaagtcctatcagctagccaatatctcatccccctcactagtagtagagtgcggcgggcagaccgtgcagtcgtgtgtaatacggaacctgcgaaagaatcctaattttgatatctgtactttgtttatggaggtcatgctgccgcgagaggagctgtactgtcctcctatcacagtgaaagtaattgataaccgccagtttgggcgaaggcccgtggtgggacagtgcacaattagatccctcgagagtttcttatgtgatccttactcagccgagagcccatcaccgcagggaggccctgatgacgtcagtttgctttccccgggcgaggatgtgctcattgacatagacgataaggagcctcttatacctatccaagaagaagagtttattgactggtggagcaagttcttcgcgtcaattggcgaaagagagaaatgcggcagctatctggaaaaagatttcgatacccttaaggtctacgatacacaactcgaaaacgtcgaggccttcgaaggactgtccgatttttgcaacactttcaagctttacagggggaagacgcaggaggagacggaagatcccagcgttatcggagagttcaagggcttgtttaagatctatcctttacctgaggacccggccatcccaatgccgcctcggcagtttcatcaattggcagcccagggccctcaggaatgcctggttcggatctacatagtcagagcatttggtctgcagcccaaagaccctaacggcaagtgtgatccctatattaagatctcaattggaaagaaaagcgtctccgatcaggacaactacatcccctgcacacttgaacctgtgtttggaaaaatgttcgaattgacatgcacacttcccctggaaaaagatctgaaaattacgttgtacgactatgacctgctgagtaaagacgagaagatcggggagaccgtcgtcgatctggagaaccgcctgctatcaaaattcggtgccaggtgcgggctgccacagacctactgcgtatccggacctaatcaatggcgagaccaactaaggccatctcagctgttacatcttttctgccagcagcaccgggtgaaggctcctgtttatcgtacagacagggtgatgtttcaagacaaggaatatagtattgaggagatcgaggccggcagaatacctaacccccatctcggccccgtagaggagaggttggctttgcacgtgctgcaacagcaaggattggttccagaacacgtcgaatcccgcccgctgtactctcctctgcagcctgacatagaacaagggaagctgcagatgtgggtggatctgtttcccaaagctctgggcagacctggaccacccttcaatatcacgccccggagggctcgccggttttttctgaggtgcattatctggaatacaagggacgttattctagacgacttgtcactgacaggcgagaagatgagtgatatatatgtgaaaggttggatgattggtttcgaggagcacaagcagaagacagatgtacactacagatccttgggtggtgaaggcaacttcaactggcggttcatcttccccttcgactatctgcccgctgagcaggtgtgcaccatcgcaaaaaaagatgccttttggaggctagacaagacagagtccaaaattccagcacgcgtcgtttttcagatatgggataatgataagtttagctttgacgactttctcggaagtctgcaactcgatctaaatcggatgcctaaacccgccaaaacagccaagaaatgctccctggatcagctagatgacgctttccaccctgaatggtttgtgtccctatttgaacagaaaactgttaaaggctggtggccctgtgtcgctgaggaaggagagaagaagatcctggccgggaaattagagatgaccttggaaatagtagcggagtctgaacacgaggagcgacctgcgggacagggccgtgacgaacccaatatgaacccgaagctggaagatcctcgcagacctgatacatccttcttgtggttcacttctccttacaagactatgaaattcatactttggaggcgttttaggtgggcaattatactgttcattattctttttatcctgcttttgttcctggcaatattcatctatgctttccccaattacgcagccatgaaactggtcaagcccttcagc

SEQ ID NO: 48032 - DNA, 6243 bp, Artificial Sequence
  derived and/or modified sequence
atgctgtgttgtctgttggtgcgagcatccaacttgccttcagccaagaaagatcgcaggtccgaccctgtggctagtttgactttcagaggggtaaaaaaacggactaaggtgatcaaaaattctgtgaatccggtgtggaatgaaggcttcgaatgggacctcaagggaattccccttgatcagggttctgagctgcacgtggttgtgaaagatcacgagacaatgggaaggaaccgcttcctcggcgaggccaaggtgcccctgcgcgaggtcttagcgacaccatctttatctgccagctttaacgccccactgctggacacaaagaagcagcctacaggagcttctctggtactgcaagtgagctatacacctctccccggagccgtacccctgttccccccccctacccccctggaaccttcacccacacttcctgatcttgatgtggtcgccgacacgggtggggaagaggacaccgaggaccagggcctaactggggatgaggccgaacccttccttgaccagagcggggggccaggcgcaccgactacccctaggaagctgccctcccgtccccctccccactatcctggtatcaagcgcaagcgctcagcacctacatcccgcaaacttctgagtgacaagccccaggatttccagatcagggttcaggtcattgagggtcgtcagttgcccggagttaatatcaagcccgtcgtgaaagttaccgccgctggacaaaccaaaagaacccgaattcacaagggaaattcacctctgtttaatgaaaccttgttctttaacttgttcgatagcccgggcgagttgtttgacgagcctatctttatcactgtcgtcgacagccgctctctgcgcactgacgcattgctcggcgagtttaggatggatgttggtaccatttaccgggagccaaggcacgcatatctgcgcaagtggctcctcctgtctgaccccgacgacttttccgccggagcacggggttacctcaaaacttccctatgtgttttggggcctggcgatgaggcccctctcgagcgcaaggatcccagtgaggacaaggaagatatagaatcaaatcttctgagaccgactggggtggccctgcggggtgcacatttctgcctaaaggtgtttcgcgcagaggaccttccccagatggacgatgcggtaatggataacgtgaaacagattttcggattcgaatccaataaaaagaacctcgtggatccttttgtggaagtgagttttgctggcaagatgctgtgcagtaagatcctagaaaagacagctaatccacagtggaaccagaacattacactacccgcaatgttcccctctatgtgcgagaaaatgaggatacgcatcatcgactgggataggctgacgcacaacgatatagtggcgacaacctacctgtctatgagcaaaatttccgcccctggaggggagattgaagaggaaccagctggagctgtgaagcccagtaaagcatcagatctggacgactatctgggtttcttgcccactttcggcccatgctacatcaatctgtatggatctcctagagagtttactggattcccagatccatacaccgaactcaatacgggcaagggcgagggtgtcgcctacaggggtcgattgctcctctctctggaaactaaacttgtagaacattccgagcagaaggtggaagacctgcctgccgatgatattctccgggtggagaagtacttacgcaggcggaaatatagcctttttgccgcgttctatagcgctacaatgttgcaggacgttgatgacgccatacagttcgaagtgagcatcggaaattatggaaataaattcgacatgacttgtcttccactggcttccaccacccaatattcccgcgctgtctttgacggttgccactattactatctgccatggggcaatgtgaagccggtggtggtactgtcgtcctactgggaggatatcagccacagaattgaaactcagaatcaactactgggtatagccgatcgtctcgaggcaggcttggagcaggtgcacctcgccttgaaggcccagtgttcaactgaggatgtggacagcctggttgcccagctcaccgatgaactgatcgcagggtgtagccaacccctgggcgatattcatgaaaccccatccgccacacaccttgaccaatatctctaccaactcaggacccaccatctgtcgcaaattactgaggccgccctggcactaaagttaggtcacagtgagctgccagcagcacttgaacaggctgaggattggctactccggcttcgagcgctcgcagaagagccacagaattcgctccctgatattgtgatctggatgctccagggggataagagggtggcctaccagagggtcccagcacaccaggtcctgttcagccggcggggagcaaattactgtggcaagaattgtggtaagctacagacaattttccttaaatatcccatggaaaaggtgccaggggctcgaatgccagtgcagataagagtgaaactgtggtttggattgtccgtggacgagaaagagttcaaccaatttgccgaggggaaactttccgtttttgccgagacatatgagaatgaaaccaaactggccctcgtggggaattgggggacaaccggactgacctaccctaagttctccgatgtgacaggaaagatcaagttgcctaaggatagctttcgcccgtctgctgggtggacctgggcgggcgattggtttgtttgtcccgaaaaaactttgctgcacgatatggatgcgggccacctgagcttcgtggaggaagtgtttgaaaaccaaacgcggctcccaggcggacagtggatctacatgtccgacaactatacagacgtgaatggtgagaaggtgctgcccaaagatgacatcgaatgtcctctggggtggaagtgggaagatgaagaatggtccactgacctgaaccgggctgttgatgagcagggctgggagtacagcatcaccataccacctgagcgcaagcctaaacattgggtgccggctgaaaagatgtactacacccatcggcggagacgctgggtcaggttgcggcgtcgcgatcttagccagatggaagccttgaagcgtcaccggcaggccgaggccgagggggaagggtgggaatatgcttcccttttcggttggaagttccaccttgagtatcggaagaccgacgcattccgtcgacggcgttggagacgcagaatggaaccactggagaagaccggtccagctgccgtctttgcgctagaaggcgcattggggggagtgatggacgataagagcgaagatagtatgagtgtgtccactttgagcttcggcgtgaataggccaaccatttcatgcatctttgattacggcaataggtatcacctcagatgttatatgtatcaagctagggacctcgccgctatggataaagattccttcagcgatccatatgcaatagtgagctttctgcaccagagccagaagacagtggtggtgaagaacaccttaaacccaacctgggaccagactctgatcttctatgagattgagatattcggcgagcctgcgactgtggctgaacagccccccagtattgttgtcgaactgtacgaccatgatacttacggcgcggatgagttcatgggtcggtgtatctgccagccctccctggaacggatgcccagacttgcttggtttcccctaacgcggggttcacaaccctctggtgagctgctggctagcttcgaactgatacagcgcgagaagcccgctatccatcacattccaggcttcgaggtgcaggaaaccagcaggatactggacgagtccgaagatacagatctgccgtaccctccccctcagcgagaagctaacatctatatggtgccccagaacatcaagcccgcgttgcagaggaccgctatcgagatcctggcatgggggctgcgaaacatgaagagctaccaacttgcaaacatctcgtccccgagtcttgtagtcgaatgtggcggacagaccgtgcagtcttgtgtcatcaggaacctcaggaagaatccaaactttgacatttgcactcttttcatggaagttatgttgccaagagaagaactgtattgcccccccattactgtgaaggtcatcgataatcggcaatttggcagacgacccgtggtcgggcaatgtaccatccgctccttggagtcattcctctgcgacccttattccgctgaaagcccctcccctcaagggggccccgacgatgtctcactgctatcaccaggcgaagatgttctcatcgatattgacgacaaagaacctttgatcccgatccaggaagaggagttcattgattggtggagcaagttctttgcatcgattggagaaagagaaaaatgcggatcataccttgaaaaagactttgacacactgaaggtctacgacacacaacttgagaacgtagaagcatttgagggcctatcagacttctgcaataccttcaaactgtacagagggaagacccaggaagaaaccgaggatccgagtgtgataggggaatttaaaggtctcttcaaaatctacccactcccggaggatcctgccatccccatgcccccacgacagtttcatcaacttgcagcgcagggcccccaagagtgcctcgtgcggatttacatcgttcgggctttcggcctgcaaccgaaggatccaaacggtaaatgtgacccttatataaaaatcagcattggtaaaaagagtgtctccgatcaggacaattatatcccctgtacgttggagccagtgtttggaaaaatgtttgaattaacctgtacccttcccttagagaaagatctgaaaattacactgtacgactatgacttattgtctaaggacgaaaaaattggagaaactgttgtagatctcgagaatcggctcctttcaaaattcggggccagatgcggtctaccacagacgtactgcgtctcaggacctaaccaatggcgggaccaactcagacccagtcaactgctgcatctcttttgccagcagcaccgggtgaaagcccctgtctatcgaacagatcgggtgatgtttcaggataaagagtacagcatcgaggagattgaggcagggaggatacccaatccacacttaggaccagtggaagaacgcctggccctgcatgtgttgcagcaacagggcttagttcccgaacacgtagagtcgagacctctctactcccccctgcagcccgacattgagcagggtaagctgcaaatgtgggtggatctcttcccgaaggcgctgggtcggcctggccccccattcaacattaccccgagacgcgcacgacggttctttctccggtgcatcatctggaatactcgcgatgtaattctggacgacctctccctcaccggtgaaaaaatgtccgatatttacgtcaaaggttggatgatagggtttgaggaacataagcagaaaacagacgtacattacaggtccctcggtggagaaggaaacttcaattggcgctttatcttcccttttgattatctgccagcggaacaggtttgcactatagctaagaaagacgcattttggcggttagataagaccgagagcaaaatacccgctagggtggtgtttcagatctgggacaacgataaattttcctttgatgacttccttggatctctccagcttgacctcaacaggatgccaaagcccgcgaaaaccgcgaagaagtgctccctcgaccagctcgatgatgcgttccacccagagtggttcgtgagcttgttcgagcagaagactgttaagggctggtggccctgcgttgctgaagaaggtgaaaaaaagattctcgctggcaagctggagatgacccttgagatagtggccgaatctgaacatgaggagagaccagctggacagggacgggatgaacccaacatgaatcctaagttagaggacccaagacggccagacaccagcttcctctggttcacatctccctacaagacgatgaaattcatcctgtggcgcaggtttagatgggctatcattctgttcataatactgtttattctcttattatttttggcaatattcatttatgcttttcctaactacgcggcaatgaaactggtgaagcctttctcc

SEQ ID NO: 48033 - DNA, 6243 bp, Artificial Sequence
  derived and/or modified sequence
atgctgtgctgtctcctcgtccgggctagcaatctccctagtgcaaaaaaggatcgacggtctgacccggttgcatccctcacgttcaggggggtgaaaaagcggaccaaggtcatcaagaactctgtaaatcctgtgtggaacgaggggttcgaatgggacctcaagggcattcccctcgatcaaggctctgaattgcacgtggtcgttaaggatcatgaaacaatgggcaggaatcggtttctgggagaggcaaaggtgccacttagggaagtactggcaacaccttcactgtcagcctcattcaacgcaccattgttggacacgaagaaacagccgactggagcatcccttgttcttcaagtctcttacacgcctttgcctggcgccgtgccactcttcccaccacctactccgctcgagccttccccaacacttcctgaccttgacgttgtcgccgatacaggtggcgaggaggatactgaggatcagggcttgaccggcgatgaggctgagcctttcctggatcaaagcggaggaccgggagctcctacaacacccaggaaacttccctcaaggcctcccccccattacccaggaatcaagcggaaaagatctgccccgaccagccgcaaactgctttccgataagcctcaggacttccaaatcagagtgcaggtaattgaagggcggcagctgcctggggtgaatataaagcctgtggtgaaggttactgctgccggccagacgaagaggacccggattcacaagggaaacagccccctctttaacgagacactgttttttaacctgtttgactcacctggcgagctgttcgacgagccaatttttatcaccgtggtggacagcagatcattgaggaccgacgccctgctcggcgagtttcgaatggacgtagggacgatctatcgggagcctaggcacgcgtacctgcggaagtggctgctgctcagcgatccggatgatttcagcgctggagcgcggggatatctcaagaccagcctctgtgtgctcgggccaggggacgaggctcctcttgagagaaaggacccatctgaggacaaggaggatatcgaaagcaacctgctgcgccctaccggggtggctctgagaggcgcacacttttgcctgaaggtgttcagggccgaggacctgccacagatggatgacgctgtaatggacaacgtaaagcagatctttggcttcgagtcaaataagaagaacctcgtcgatccatttgtggaggttagttttgctggcaagatgttgtgtagcaaaatcctcgaaaagacagccaatccccagtggaatcaaaacataaccctccctgctatgtttccctctatgtgtgaaaagatgagaatccggattatagattgggacagacttactcacaacgatattgtggctaccacgtatctgagcatgagcaagataagtgcacccggcggggagatcgaggaggagcctgcaggggccgtcaagcccagtaaagcctccgaccttgatgattatcttggtttcctgcccacattcggcccatgctatataaatctgtatgggagccctagggaattcactggatttccagatccctatacagaactcaacacaggaaaaggggaaggcgttgcctaccgcggtcggctgcttctttctctggaaaccaaactggtggaacactccgaacagaaggtagaggacctcccagctgacgacatcctgagagttgagaagtatttgcggaggcgcaagtattccctcttcgctgccttctactctgcaacaatgctgcaggacgtggatgacgccatccagttcgaggtctctataggaaattacggcaataaatttgatatgacctgtctgccactcgcttctacaacacagtattcccgagccgtgttcgatgggtgtcactactattacttgccatgggggaacgttaagcccgtagtagtgctctcctcttactgggaagatatctcccatagaattgaaacgcaaaaccagttgctgggtattgctgatagactggaagccggtctggaacaggtgcacctcgccttgaaagctcagtgcagtactgaagatgttgactcccttgtggcccaactgacagatgaactgattgctggatgctctcaacctctgggggacattcacgagacgcccagtgccacgcaccttgaccagtacctctaccagctgcgaacccatcacttgtctcagattacagaagccgcccttgcgctgaagctgggccactctgagctcccagctgctttggagcaggccgaggattggctgctccgcttgagggccctggctgaagaaccccaaaatagtttgcctgatattgtcatatggatgctgcagggagacaaaagagtggcgtatcaacgggtgcccgcccaccaggtgctgttcagtcgccggggggcaaactactgtggaaaaaactgtgggaagctgcagactatctttctgaaataccccatggagaaagtccccggggcgcgcatgcctgtgcagattcgcgtgaagctctggttcggattgtctgtggacgagaaggaattcaaccagtttgcagagggaaagttgagcgtattcgctgaaacttacgagaacgagaccaaactcgccctcgttggcaattggggcaccaccgggcttacttatcccaagttttccgatgtgactggaaagataaaactcccaaaagactccttccggcccagcgcaggatggacgtgggctggagactggttcgtatgccctgagaaaacactgctccacgacatggatgccggtcacctctcattcgtcgaggaagtttttgagaaccaaacccgactccctgggggacagtggatctacatgagcgacaattacactgatgtgaacggggaaaaagtactgccaaaggacgacatcgagtgtccgctgggctggaaatgggaggatgaagagtggtccactgacctcaacagggccgtggacgagcagggctgggagtattcaatcactattccgcctgaacgcaaacctaaacactgggtcccagccgagaagatgtactacacccacaggcggcgccggtgggttaggctgcggaggagggacctgtctcagatggaggcactcaagaggcatcgacaagccgaggcagaaggcgaaggctgggagtatgccagccttttcggctggaaatttcatctcgaatacagaaaaaccgatgcctttcgaaggaggagatggcggcggcggatggagccgctcgaaaagaccggccccgccgccgtgttcgctctggagggggccctggggggcgtgatggacgacaagtccgaggacagcatgagcgtttcaactttgtcatttggcgtcaatcgacctactatttcttgtatctttgattatggaaacagatatcaccttaggtgttacatgtaccaggctagggacttggccgctatggacaaggatagtttctcagatccatatgcgatcgtgagctttctgcaccaatcccagaaaacagtcgtggttaagaataccctgaaccctacctgggaccagaccctgattttctatgaaattgaaattttcggggaaccagctactgtggcagagcaaccacccagcatagtggtggagctctatgatcatgacacttacggggccgatgagttcatgggtcggtgcatttgccagcccagccttgagcgcatgccgagactggcttggttcccattgacgcgaggatcccagccttccggcgagctgctcgcgtcttttgagcttatacaaagagaaaagcctgcaatccatcatatacctggatttgaagtgcaggaaacctccagaatcttggacgaatctgaagacactgatttgccttacccaccacctcagagagaagcaaacatctatatggtcccccagaacataaaaccagctctgcagcgcacggctattgagatccttgcttgggggctgcggaacatgaaatcttatcagctggcaaacatctcaagtcctagtctcgtcgttgaatgtggcggacagactgtacaaagctgtgtgattcgaaatttgagaaagaaccctaacttcgatatctgtacactgttcatggaagttatgctccctcgagaggaactgtattgcccccctataacggtgaaggtgatcgacaaccgccaattcggacgaaggcccgtcgtggggcagtgtaccatacgaagtctggagagcttcctttgcgacccatattcagcagagtctccttcaccgcagggggggcctgacgatgtatccctcctgtctcctggagaggacgtgctgatagacatcgatgacaaggagcccctgatcccaatccaggaggaagagtttatcgactggtggagcaagttcttcgcttctattggggagagggagaagtgcggcagctatctggagaaggactttgataccctgaaagtatatgatacccaactcgagaatgtggaggcctttgaggggctcagcgacttttgtaacaccttcaagctgtacagggggaagacacaggaagagacagaggaccctagcgtgataggggaattcaagggactctttaagatttaccccctcccagaggaccctgctatcccaatgccaccgcggcagttccatcaacttgcagcccaaggtccccaggagtgcttggtgcggatatacatcgttcgggcgttcgggctgcagcccaaggaccctaacggcaagtgcgatccctacattaaaatctccatcgggaagaaatccgtgtccgaccaggacaattatatcccgtgcacactcgagcctgtgtttggaaagatgtttgaactgacctgtactctgcccctggagaaggacctgaagatcactctttatgactacgatctcctttctaaggacgagaaaattggagaaaccgtggtagacctggagaaccgccttctcagcaaatttggcgctcggtgcggacttccccagacatattgtgtaagtgggcccaaccagtggagggaccagcttcgaccatcccaactcctgcaccttttctgccaacagcaccgggtaaaggcccctgtgtaccgcactgatcgggtgatgtttcaggataaggaatactccatcgaggaaatcgaggcaggcaggatcccaaaccctcacctcggccctgttgaggaaagactcgcactgcacgtactccaacagcagggtctggtccctgagcatgttgagagtcgccccctgtacagccccctgcagcctgacatcgaacaggggaagctgcaaatgtgggttgacctgttccctaaggccctcgggagaccagggccgccctttaacatcaccccacgaagggccagacgcttttttctgcggtgtatcatatggaacactcgggatgttatcctggatgatctgtccttgacaggagagaaaatgagcgatatctatgtcaaggggtggatgataggatttgaggaacataagcagaagaccgacgtgcactatcgaagcctgggcggggaaggaaatttcaactggagatttattttccctttcgactatctgcccgccgaacaagtgtgtactatcgcaaagaaagatgccttttggcgactggacaaaactgagagtaaaattccagcacgggtcgtttttcagatctgggataatgataaattctcctttgacgactttctgggttctctgcagctggatctgaatcgcatgcctaagcctgccaaaacagctaaaaagtgctctctggatcagctggatgacgcatttcaccccgaatggttcgttagtctgtttgagcagaagaccgtcaaaggctggtggccgtgtgttgcagaggaaggagagaagaaaatcctggctggcaaacttgagatgaccctggaaattgtcgcagagtctgagcacgaggagaggccagccggccagggccgggacgagccaaatatgaaccctaagctggaggacccacgcagacccgatacgtcttttctgtggtttaccagtccatataaaacaatgaaatttattctttggcgaaggttcaggtgggccatcatcttgttcatcatcctgttcatactgcttttgttcctggcaattttcatctatgcctttcccaactacgctgcgatgaagcttgtgaagcctttctcc

SEQ ID NO: 48034 - DNA, 6243 bp, Artificial Sequence
  derived and/or modified sequence
atgctgtgctgtttgctagttcgagcctccaacttgccatctgccaagaaagatcgccgcagcgaccccgtggcctccctgacgttccgcggggttaagaagcgcacgaaggttattaagaacagcgtgaacccggtgtggaatgaaggatttgaatgggatctgaagggtatccccctggatcaaggaagtgagttgcacgtggtggtgaaggatcatgaaaccatgggacgtaatcggtttctcggagaggcgaaggtgccacttcgcgaggtcctcgcaacccccagcctgtcggcctctttcaacgcgccgctcttggacactaagaagcaaccaaccggagcgtccttagtattgcaagtcagctatacaccattaccaggagctgtaccattgttccctccaccaacgccactggagccaagccccacattgccagatttggacgttgtggccgataccggcggcgaggaggatactgaggaccagggtttaactggtgatgaggccgagcccttcctcgaccaaagtggcggccctggcgcaccaaccacgcctcgcaaactgccgagccgcccgccgcctcactacccaggcatcaagagaaagcgtagcgcacccactagccgtaagctgctgagtgataagccacaggatttccaaatccgagttcaggtcatcgagggccgccagctgccgggtgtcaacatcaagccagtggttaaagtgactgccgctggacagaccaagagaactcgtattcacaagggaaacagtcccttatttaacgaaacgctctttttcaatttgttcgacagcccaggagagctgtttgatgagcctatttttatcacagtggtggatagccgatccctgcgcactgacgctttgctgggcgaattcagaatggatgtgggtaccatttaccgggaaccccggcatgcgtacttgcgtaagtggctgcttctaagtgaccctgatgatttcagtgccggtgcgcgcggctacctgaagacctcgttatgcgtgctgggaccgggcgacgaagctccgctcgagcggaaggacccgtcggaggataaggaggacatcgagtcgaatctcctgcggcccactggcgtcgctctgcgcggtgcccatttctgcttgaaggtgttccgggccgaggatttgccgcaaatggatgatgccgtgatggataacgtgaagcaaattttcggattcgagtcaaacaagaagaacctagtagatccatttgtggaggttagctttgctggaaagatgctatgctccaagatcctggaaaagaccgcgaatccccagtggaaccagaatattaccttgccggccatgtttccgtccatgtgtgagaaaatgaggatacgcatcatcgattgggatcgtcttacacacaacgatattgtcgccaccacttacttgtctatgtcgaagataagtgccccgggtggtgagatcgaggaagaacccgcgggcgcagtgaagccgtccaaggccagtgatctggacgattacttgggcttcctgccgactttcggtccgtgctacatcaacctgtatggaagccctcgcgagttcacagggttccctgatccctatacggaactcaataccggcaaaggagaaggagtggcctatcgtggtcgcctgctcctgtccctggagaccaagctcgtggagcactctgagcagaaagtggaggacctgccggcagatgatatcctgcgagttgagaagtatttgcggcgacgaaagtattccctgttcgctgctttctactccgcaaccatgctccaggacgtagatgatgcaattcagttcgaggtgtcaattggaaattacggaaataaattcgatatgacctgcttgccactagcaagcacgacacaatatagccgcgccgtgttcgacggctgtcactattattacctgccgtggggaaacgtgaaaccggtggtggtgctctcgtcctactgggaggatatcagccaccgcattgagacccagaaccaacttctaggcatagctgatcgtttggaggcgggcttggagcaagtgcacctggccctgaaagcccaatgcagcacggaagacgtggactcattggtggcccaacttacagacgagctgatcgcgggctgctcccaacccctgggagatatccatgagacaccctctgctacacacctggatcaatacttatatcagctcaggacccaccatctatcccaaattactgaggcggccctggccctgaagttgggccacagcgagttgccggcagccttagagcaagcggaagattggctgctgaggcttcgtgccctcgcagaggagccacagaacagcctgcccgatatcgtgatatggatgctgcagggagacaagagagttgcataccagagggtgccagcgcatcaggtgctgttcagccgccgcggagcaaattattgcggaaagaactgcggcaagttgcagacgatcttcctgaagtatccaatggaaaaagtgcccggcgcccgtatgcctgtgcagatccgcgttaagctatggttcggtctgagtgtggacgaaaaggaatttaatcagtttgccgagggtaagctgagcgtcttcgcggagacgtacgaaaatgagacgaaactggcgctggtaggaaattggggtacaaccggcctgacgtatccaaagttcagtgatgtcacaggtaagattaagcttcccaaggactcgttccgtccttcagcgggctggacatgggctggcgactggtttgtctgcccggagaagaccctcctgcatgatatggacgccggtcatctctccttcgtagaggaggtctttgagaaccagaccagattaccaggtggacagtggatctatatgagtgataattacacggacgtcaacggcgaaaaggtgcttccaaaggatgatattgagtgtccgctcggctggaaatgggaggatgaagagtggtcgaccgatttgaatcgggcggttgacgagcaggggtgggagtacagcatcacgattcccccagagcgcaagccgaagcactgggtgcccgctgagaaaatgtattatacacatcggcgtcgtcggtgggtgcgcctgcgccgtagggacctgtcgcaaatggaagctctgaagaggcatcggcaagctgaggccgagggtgaaggttgggagtatgcatcactgttcggttggaagttccacctggaataccgaaagaccgacgcttttaggcgaagaaggtggcgtcgccgaatggaaccgctcgagaaaactggcccggcggccgtgttcgccttggagggagctcttggaggtgtcatggatgataagtctgaggattcaatgtcggtctccacgctatcgtttggcgtcaaccgccccaccatctcctgtatatttgactatggcaaccggtatcatttacgttgctatatgtaccaagcgcgagacctagccgctatggacaaagattcgtttagcgatccctatgctatcgtctcgttcttacatcagagccaaaagactgttgtcgtcaagaataccctgaatcccacgtgggaccaaactttgattttttatgagattgagatctttggagagcccgccacagtggcagaacaaccgccttcaatcgtagtggaactgtatgatcacgacacgtacggcgccgacgagttcatgggccggtgcatatgccagcccagcctggagcgaatgcctcgtttggcatggtttcccctgacgaggggatcacagcccagtggcgaactgcttgccagctttgaactgatacagagggaaaagccagccatacatcatatcccaggttttgaggtgcaggagacgagccgcatcctggacgagagtgaggacactgacctgccgtatccgcctcctcagcgcgaagcgaacatctacatggtgccacagaatatcaagccggcactgcagcgcaccgcaatcgagattctggcatgggggttaaggaatatgaaatcctatcagctcgcaaatatctcctccccgagtctggtggtagagtgcggcggccaaacggtgcaatcttgcgtgatccgcaacctgcgaaagaatccgaactttgacatttgtacgttgttcatggaagtgatgctgcccagggaggagctctactgcccgcccataaccgtaaaggtgattgataatcggcagttcgggcgtaggcccgttgtcggtcagtgtactatcagatccctggaaagctttttgtgcgacccctactccgccgaatctccgagtccacaaggcggtcccgacgatgtctctctgttgagcccgggcgaggatgtcttaatagacatagatgataaggaaccgcttattccaatccaggaagaagagtttattgactggtggagtaaatttttcgccagcatcggcgaacgtgagaagtgcggatcatacctggaaaaggacttcgacaccctcaaggtctacgacacgcagctggaaaacgtcgaggcatttgaaggactgtctgatttctgcaatactttcaaattgtaccggggcaagacccaggaggaaacggaagatccctccgtgataggagaattcaaggggctcttcaaaatctacccactgcccgaggatccggcaattcctatgccgccgagacagttccaccagctcgccgcgcagggaccccaggagtgcctggtgcgaatctatattgtccgtgctttcgggcttcagcccaaagacccaaatggtaaatgtgatccctatattaagatcagcatcggcaaaaagtctgtctccgaccaagacaattacataccatgcaccctggagccggtgtttggcaagatgttcgaactaacgtgcaccctgccgttggagaaggatttgaagataacgctgtacgactacgatctactgtcgaaggacgagaagatcggagagaccgtagttgatctcgagaatcgtctactgtcgaagttcggcgcccggtgcggactgccgcagacatattgcgtatccggccccaaccagtggcgcgatcagctacgaccaagccaactgctccacttgttctgccagcagcaccgtgtgaaggcccccgtctatcgcacagaccgagtcatgttccaagataaagaatacagtatagaagagatcgaggccggacgcattccaaacccgcatctaggcccagtggaagagcgcctcgcgctgcatgtgttgcaacagcaaggtctcgtgccggaacatgtggaatcccgccctttgtactccccactgcagcccgacatcgagcagggtaagcttcagatgtgggtggatctatttcccaaggcgcttgggcgtccgggaccccccttcaacatcacaccgcgccgagcccgcaggttctttttacgatgtatcatttggaacacgcgcgatgttatcttggatgacttgtcgttgaccggtgagaagatgagcgacatttacgtaaagggatggatgattggcttcgaagaacacaagcagaagacagatgtccactacaggagtcttggaggtgaaggaaacttcaattggcggtttatctttcccttcgactatctgcctgctgagcaagtttgtacaattgctaagaaagatgccttttggcgcttggacaaaactgagagcaagattccagctcgtgtcgtcttccagatctgggataatgataagtttagtttcgatgactttttgggcagcttgcagctagatctcaaccgcatgccaaagccggctaaaacagccaagaaatgcagcctagaccagctggacgatgcctttcatcccgaatggttcgtgtctctgttcgaacagaaaacagtgaagggttggtggccgtgtgttgccgaagagggggagaagaagattctggctgggaaactcgaaatgaccctggagattgtagctgagtccgagcatgaagaacgacccgcgggccaaggacgtgacgaaccaaatatgaatcccaagttggaggatccgcgtcgccctgacaccagtttcctgtggttcacctcgccctacaaaaccatgaagttcatcctctggcgccgcttccgctgggccattatcctgtttataatcctgtttatcctattgttgtttctggccatctttatttacgccttcccgaattacgcagccatgaagctggttaagccgttctcc

SEQ ID NO: 48035 - DNA, 6243 bp, Artificial Sequence
  derived and/or modified sequence
atgctgtgttgtcttctggtgcgcgcgtctaacctgccgtcagcgaaaaaggatagacggagcgacccagttgcttccctgactttccgcggcgtgaagaaacgcacaaaagttatcaaaaacagcgttaacccggtctggaatgaaggattcgagtgggacctgaaaggcattcctctggaccaaggtagcgagctgcacgtggtcgtcaaggatcatgagaccatggggcgaaaccgctttctgggtgaggcgaaagttccactccgtgaggtcttggcgaccccttcgctgagcgccagctttaatgcaccactgctggacacgaaaaagcaaccgaccggtgcaagcttggtgctgcaagtgagctacactccgctgccgggcgcagttcctctttttccaccgcctaccccactggagccatcaccaaccctgcccgatctggacgttgtggcggatacgggcggggaggaggacaccgaggatcagggtctgacaggtgatgaagctgagccatttctggatcagagcggcggtccaggtgcccctacgacgcctaggaaactgccttcacgaccccctcctcattacccgggcataaaacgcaaacgtagcgcgccaacctccaggaagctgcttagcgataagccacaggactttcagattagagttcaagttatcgagggtcggcagctgccgggcgtgaacatcaagccagttgttaaggtgaccgccgccggtcagacgaagcgcactcgcatccacaaaggcaattccccgttgttcaacgagaccctgttctttaacctatttgacagcccaggcgagctcttcgatgaacctattttcatcactgttgttgattctcgctctttgcgcaccgatgcactgctgggcgaattccgaatggacgtcggaaccatctaccgggagccgcgccatgcgtatctgcggaaatggttattgctgagtgatccagatgacttctctgcaggcgctcgaggttacctaaaaacttcactgtgtgtgctggggccgggagacgaagcgccactggaacgcaaagatccgagcgaagacaaagaggatattgaatcaaacctgttgcgcccaactggcgttgctctgcgaggtgcgcacttttgtctgaaggtgtttcgcgctgaggatctcccgcagatggatgatgcggtaatggataatgtcaaacaaatttttgggtttgaaagcaataaaaaaaatctggtcgatccattcgtggaggtatccttcgcaggcaaaatgctgtgttctaagatactggagaaaaccgctaatccacagtggaaccagaacatcacgctgccggccatgttccctagcatgtgtgagaaaatgagaatccgcattattgattgggatcgcctgacccataacgacattgtcgctaccacgtacctgtcgatgagtaaaattagcgcgccgggtggtgagatcgaggaagaacctgccggcgccgtgaaaccgagcaaggcaagtgatctggacgactacctgggttttctgccgactttcggtccttgctacatcaatttatacggtagccctcgcgagtttactggtttcccggacccttacactgagttgaataccggtaagggtgagggggttgcgtaccggggacgactgctgcttagcctggaaaccaaactggttgagcacagcgagcagaaggtggaagatctgccagcggatgatatccttcgggttgagaagtacttaaggaggcgaaagtactccctgttcgcagcgttttatagcgcgaccatgcttcaagacgtcgacgacgcaatccaattcgaagtctctattggcaattacggtaacaagtttgatatgacttgcctgccactggcctcgactacccaatactcccgcgccgttttcgacggttgccattattactacctgccgtggggtaacgtgaagcctgttgtggtcctctccagttattgggaggacattagccaccgcattgagactcaaaatcagcttctgggtatcgctgacaggctggaagctggattagaacaagtgcacctggcgctgaaagcgcagtgctcgaccgaagacgttgactcgctcgtagcacagctgactgacgagctaatcgccggatgcagccagccgttaggcgatatccacgagactccctcagcgactcatctggaccagtatttatatcaactgaggactcaccatctgagccagatcacggaggccgcgctggccctgaaactgggtcacagtgaactgccggctgccctggaacaagcagaggactggctgctgcgcctgagggcgctggcagaggaaccacagaactctttgccagacattgttatctggatgttgcagggcgataaacgcgtcgcctaccagcgcgttcccgcccaccaggtcctgttcagccgccgtggcgccaattactgcggcaaaaattgtggtaaactgcagaccattttcctgaagtacccaatggagaaggtcccaggagcgagaatgccggtgcagattcgcgtcaaactgtggtttggactgagcgttgacgagaaagagttcaaccaatttgccgaaggtaaattgtcagtattcgcggaaacctacgagaacgaaactaaactggcgctggtgggtaattggggcaccaccggtttgacctacccaaagttcagcgatgtcaccggtaagattaagttaccaaaagactcatttcggccgagcgccggctggacctgggctggggattggttcgtttgtccagaaaaaactttgctgcacgatatggacgctgggcacctgagctttgtcgaggaggtgttcgagaaccaaaccaggctgcctggtggtcagtggatctatatgagcgacaactatacggacgtcaacggtgaaaaggtcctgccgaaagatgatatcgagtgcccactgggttggaagtgggaagacgaagagtggagcactgatctgaatcgtgcggttgacgagcaaggctgggaatacagcattaccatcccccctgagcgcaagccaaagcactgggtgccagcggagaagatgtattatacgcaccgacgccgaaggtgggtgagactgcgccgcagagacctgagccagatggaggcactcaaaaggcaccgccaggctgaagcggaaggggaaggttgggagtatgcaagcctcttcggctggaaatttcacctggagtatcgcaagaccgatgcatttcgacgtcgaaggtggcgcagacgcatggagccgctggagaaaaccggtccggcggccgttttcgccttggagggcgcattaggcggcgtgatggacgacaaatctgaagacagcatgagcgttagcactctgtctttcggagttaaccgacctaccatctcgtgtatcttcgattacggcaatcgttatcatctgagatgttacatgtaccaggctcgggacctggcggcgatggacaaagatagctttagcgatccgtacgccattgtcagctttctgcatcaaagccagaagaccgttgtcgtcaagaacacgctgaatcctacctgggaccagactcttattttctatgagattgagatctttggcgagccggcgactgttgctgaacagcctcctagcatagttgtggagttgtatgaccatgatacctacggcgcagacgaattcatgggtcgctgcatatgtcaaccttccttagaacgcatgccaagactggcgtggttccctctaacccgcgggagccagccatccggtgagctgctcgcctcttttgaactgattcagagagagaaaccagcaatccatcatatccctgggtttgaagtgcaagagaccagccgtatcttggacgagagcgaggacacagatctgccgtacccgccaccgcagcgggaggccaatatttacatggtgccacaaaatatcaaaccagccctgcagcgcaccgcaattgagatcttggcatggggcttgagaaacatgaaaagctatcaattagcgaatattagttcaccttcactggtggtggaatgtggggggcagaccgtacagtcttgtgtcattcgcaacttgcgcaaaaaccctaattttgacatctgtaccctgtttatggaggtgatgctgccacgtgaggaactgtactgcccacctataaccgtcaaagtgattgataatagacagtttggccgccggcccgtggttggccaatgtaccatccgctctctggaatcttttctctgcgacccatattcagctgaaagcccatcccctcaaggcggcccggatgatgtaagcctgttgtcaccaggtgaggacgtcctcattgacattgacgacaaagagccgctgatccctattcaggaagaagaattcatcgactggtggtccaagttcttcgcctcaatcggtgaaagggaaaagtgtggttcctacctggagaaagactttgacaccctgaaagtctatgatacacaactggagaacgtcgaagctttcgaaggtctgagcgacttctgcaacacgttcaaattgtatcgtggtaagactcaggaagaaacggaagacccgagcgttataggcgaatttaaaggcctgttcaagatttaccctctgcctgaagaccccgcaattcctatgccaccgcgccagttccaccagctggcagcccagggcccacaagagtgtcttgttcgaatctatatcgtgcgggcattcggcctgcagcccaaggatccgaatggtaagtgcgatccctatatcaagatttccatcggcaaaaagagcgtgtccgaccaagacaactacatcccttgtaccctggagccggtgtttggcaaaatgtttgagctgacttgcactttacctctggaaaaggacctgaagatcacattgtacgactatgatctgttgagcaaggatgaaaaaataggagaaaccgtggtcgacctggaaaatcgcctgctgagtaagttcggagcgcggtgtggccttccccagacctactgcgtgtcaggaccaaatcagtggcgcgaccagctgcgcccaagtcaactgctgcatctgttttgccagcagcatcgcgttaaggcgcccgtttaccgcaccgatagggtgatgttccaagataaggaatatagtattgaggagatagaagcaggtaggatacctaatccccacctggggccggtggaggagcgcttagcactgcacgttctacagcagcaggggctggttcctgagcacgttgagagccgcccactgtactcgcctctgcagccggatatcgaacaaggaaagctgcagatgtgggttgatctgttcccgaaggcgttgggtcgcccaggtccgccgttcaacattactcctcgtcgggcgcgccgtttctttctgcgttgcattatctggaatacgcgagacgtcattctggatgacctgtccctgactggtgaaaagatgagcgacatttacgttaagggctggatgattggttttgaggaacataaacaaaaaacggacgtccactatcggagcctgggtggcgagggtaactttaactggcgcttcatcttccctttcgactacctgccagccgaacaggtttgcaccattgccaagaaggatgctttttggagactggataaaacggagtcaaagattcctgcgcgagtggtctttcagatctgggataatgataagttctccttcgatgactttctgggctctctgcagctggacttgaataggatgccgaagcctgcaaaaacggcaaagaagtgctccctggaccagttggatgacgcatttcatccagagtggtttgtttccttgtttgaacagaaaacggttaaaggctggtggccttgtgtggctgaagaaggtgagaaaaagatcctggcggggaagctagaaatgacgctggagattgtggcagagagcgagcacgaggagcgtccagcaggccaaggccgcgatgagccaaacatgaaccccaagctggaggaccctcgccgcccggatacttcctttttgtggttcacgagtccctacaagacaatgaagtttattttgtggcgccgttttcgctgggccattatcctttttattatcctgttcattctgttgctgtttctggccattttcatttatgcctttcctaattacgccgccatgaagctcgttaaacctttcagc

SEQ ID NO: 48036 - DNA, 6243 bp, Artificial Sequence
  derived and/or modified sequence
atgctgtgttgcctcctggttagggcaagcaaccttccttcagctaaaaaagatcgcagaagcgatccagtcgcttccttaacttttcgtggggtgaaaaaacgaacaaaggtcattaagaacagtgtaaatcctgtgtggaatgagggctttgagtgggacctgaaggggattcccctggaccagggctcagagctccatgtagtcgttaaggatcacgagaccatgggccgcaacagattcctgggagaagccaaagtcccacttcgagaagtgctggctactccctccctctcagcttcttttaatgcccccttactggacacgaaaaaacaacctacgggggccagcctggtgttgcaagtttcatatactccgctccccggtgcggtgccacttttcccaccaccgacccccctcgaaccgtcacccaccctcccagaccttgatgtggtggctgacacaggcggagaggaggatacggaggatcagggattaaccggagatgaagctgagccattcctggatcaaagcggtggccccggggcgcctaccactcctcggaagctgccatcacggcctccaccgcactatcccgggattaaacggaagcgttcagctccaacatcaagaaaactactcagtgataaaccccaggacttccagatacgggtccaggtgatcgaggggcggcagctccctggggttaacatcaagccagttgtgaaagtgactgctgccgggcaaaccaagagaactagaattcacaagggcaattctcctctgtttaacgaaacactgttcttcaatctgtttgacagccccggcgagctgtttgacgagcctatcttcatcacggttgtggacagccgatcactgcgcaccgacgcactgctgggcgagtttcgaatggatgtcggcactatatacagagagccccgacacgcctacctgcgtaagtggttgctccttagcgacccagacgatttctctgctggagcccgggggtacctaaaaacctctctctgcgttcttggtcctggcgacgaagctccccttgagcgaaaggatcctagtgaggataaggaggatattgagtcaaacctccttcgacctacaggcgttgccctgcgcggagctcacttttgtttgaaggtttttagggccgaagacttgcctcagatggacgatgccgtgatggacaatgtgaagcagatcttcgggttcgagagcaacaagaagaacctggtagacccctttgtagaagtgagcttcgccggtaagatgttgtgcagtaagattctcgaaaaaaccgcaaacccacagtggaatcagaacattactttgcctgccatgtttccaagcatgtgtgagaagatgagaatccgtatcattgactgggataggctgacacataatgacatcgttgcaaccacttatttatcgatgtcaaaaatcagtgcccctgggggagaaatagaggaggagcctgccggggccgttaagcccagtaaagccagtgacttggacgattatctaggtttcctgcccacatttggcccatgttacattaacctctatggtagtcctcgcgagtttaccggtttccccgacccttacaccgagctgaataccggaaaaggcgaaggtgtcgcgtacaggggacgtctcctcctgtcccttgagactaagctggttgagcactcagagcagaaggtcgaagaccttccagcagacgatattctgagggttgaaaagtaccttcgacggcgtaagtatagcctcttcgccgctttttattccgccaccatgctgcaagatgtggatgacgctattcagtttgaggtgtcaatcgggaattatggtaacaagtttgacatgacgtgtcttcccctggcatctactacacagtacagcagagccgttttcgatggctgtcattattattatctgccttggggaaacgtgaaacccgtggtagtgttatcatcttactgggaggatatcagccatagaatcgagactcagaaccaactgctggggattgccgataggctggaggctgggctcgagcaggtccacttggccctgaaagctcagtgcagtaccgaagacgtcgattcgctggtcgctcagctcaccgacgagctgatagctggctgttctcaacctctgggagatatccacgaaacaccaagcgcaacacacctagaccagtatctgtaccagttgcgaacccaccacctgagccaaatcacagaggctgcacttgctcttaagttagggcattcagagcttccagctgcactggagcaggcagaggattggctcctgaggctccgagctctcgctgaggagccccagaattcgctgcccgatattgtgatctggatgctgcagggagataaaagagtggcatatcaaagagttcctgcccatcaggttctcttctcgcgacgtggagctaactactgtggtaagaactgcgggaagctccagacaatttttcttaagtacccaatggagaaggttcctggagcccggatgcccgtgcagatcagagtcaagctttggtttggcttgagcgtggacgaaaaggagtttaaccagttcgcggagggcaagctgtctgtctttgccgagacctacgagaacgagaccaaattggctctagttggcaattgggggacgaccggcctcacctacccgaaattcagtgacgtcacggggaagatcaagttgcccaaggattcattcagacccagtgcaggttggacgtgggcaggcgattggtttgtttgtcccgaaaaaacattgctgcacgatatggacgccggacatttgtctttcgtggaagaggtatttgagaatcagactagactgcccggaggacagtggatctacatgagcgataattacaccgatgtgaacggtgaaaaagtcctacctaaagatgacatcgaatgtcccttgggttggaaatgggaggatgaagagtggtccacagatctgaaccgggcagtggacgagcagggctgggagtattccattactatccctcccgaaagaaaaccaaaacattgggtgcctgcggagaagatgtattacacccatcgccgaaggcggtgggtgaggctccgccgaagggacctgagccagatggaagcactcaagaggcacaggcaggccgaggctgaaggggaaggttgggaatacgcctcactgtttggttggaagtttcatcttgagtaccgaaaaactgacgcattccggaggcgcagatggcggcgcaggatggaacccctagagaagaccggccctgctgccgtattcgccttggagggggctctcgggggggtaatggacgacaagtccgaggattcaatgtctgtatctaccctgagcttcggcgtgaatagacccaccattagctgcatctttgattatggaaatcgataccacctccgctgctacatgtaccaggctagggacctagccgcgatggacaaagactcattttctgatccatatgcgattgtttcttttttgcatcagtcccagaagactgtggtggtgaagaatacactgaaccccacatgggaccagacgctgatattttacgaaattgagatcttcggcgagccagcaaccgtcgctgagcagcctccctccattgtggttgaactctacgaccacgacacatacggagcagatgaattcatggggcgctgtatctgccagccctctctagagcggatgcctcgcctggcctggttccccctgacacgaggctcccagccaagcggcgaactgctggcctcttttgagctgattcaaagggaaaagcctgccattcaccacatccccggattcgaagtgcaagagacatcacgtattctagatgagagtgaagacacggatcttccataccctccgcctcagcgtgaggcgaatatttatatggttcctcagaacatcaagcccgccctgcagcgaacagccatagagatcctggcgtggggcttaagaaatatgaagagttaccagctggccaatattagctctccaagtttagttgtcgaatgtggcggccagacagtgcaaagctgtgtaataagaaatttacgcaaaaaccccaatttcgatatctgtaccctgtttatggaggtaatgttgccgcgcgaggaactgtactgccctcctattacagtgaaggtcatcgacaataggcagtttggcagacgccctgtggttggacagtgcacaattcgctcactagaatcgttcttatgtgacccatattctgctgagtctccgagccctcaagggggtccagacgacgtgtctctgttatctccaggggaggacgtgttaatcgatatcgacgacaaggagcccctcattccgattcaggaagaggagttcatcgactggtggagcaaattttttgcgagcattggcgagagagagaagtgtggaagctacctagagaaggacttcgataccctaaaagtatatgatacacagttagagaacgtagaggcctttgagggtctttctgacttctgcaacactttcaaattgtatcgtgggaagacccaagaggaaactgaggaccccagtgtcattggcgagtttaaaggtttgttcaagatctaccctctccccgaagacccagccataccaatgccaccaaggcagtttcatcaactggcagctcagggccctcaggagtgtttggtgcgcatctatattgtccgcgcattcggcctgcagcccaaggacccaaacggcaagtgtgatccttacattaaaatcagtattgggaagaaaagcgtgagcgatcaggataactacattccctgtaccctggagcccgtattcgggaagatgttcgagcttacctgtactctccccctggagaaggacctgaagattacgctctacgactacgacctcctcagcaaggatgaaaagatcggtgagacagtcgtggacctggaaaaccgcttgctgagtaagttcggggcacggtgcggtttgccccagacatactgtgtgagcggtccaaatcagtggagagatcagctgcggccgtcccagctgctgcacctcttctgccagcaacatcgggttaaagcgcctgtatatagaactgatagggttatgttccaggacaaagagtacagtattgaagaaatagaggcgggaagaatccccaatcctcatctggggcctgtagaggaaaggcttgcgttgcatgtgctccagcaacagggattggtccccgaacacgttgaatcaagaccattatatagccccttgcagccagacattgaacagggtaaactgcaaatgtgggtcgaccttttcccaaaggccctgggccgacccggacccccatttaacattacaccacgacgcgcaagacgcttctttctcaggtgcataatatggaacacccgtgacgtgattttggatgatctgtcattaaccggtgaaaagatgagcgatatctatgtgaaaggctggatgattggctttgaggagcacaaacaaaagacagacgtccattacaggtctcttggcggcgaggggaacttcaactggagatttattttcccctttgattatctcccagctgagcaggtttgtactatcgccaagaaagacgccttttggcgcctcgacaaaaccgaaagcaaaatcccagcaagggtggtcttccaaatttgggataacgataagttttccttcgacgatttccttggatccctgcaattggacctaaaccgcatgcctaagccagctaaaactgccaagaagtgctctctcgatcaactcgatgacgccttccaccccgagtggtttgtctctttattcgaacaaaagactgtgaagggctggtggccgtgcgtggcggaagagggcgaaaagaagattttggcgggcaagctagaaatgaccttggagatagtcgccgagtccgagcatgaggagaggcccgcaggccaggggcgagacgagcccaacatgaatcccaagctggaagaccccagacgaccagacacaagcttcttgtggtttacgagcccatataagactatgaagtttatcctgtggcggcggtttcgttgggccatcatcctgttcattatcctgttcatcctgctcttgtttctggctatattcatctacgcgttccccaattacgctgccatgaagcttgtgaaaccattcagc

SEQ ID NO: 48037 - DNA, 6243 bp, Artificial Sequence
  derived and/or modified sequence
atgctgtgctgcctcctggtgagagcttccaatctgccgtcggctaagaaggatagaagaagcgacccggtggcgagcctcacgttccggggcgtgaagaagcggaccaaggtcatcaaaaactccgtcaacccggtgtggaacgagggattcgagtgggatctgaagggaatcccgctcgaccagggctcggaacttcatgtcgtggtcaaggaccacgagacgatgggccggaatcgcttccttggtgaagcgaaagtgccactgcgggaggtcttggcaacgccgtcgctgagcgccagcttcaatgcccctctgttggacacgaaaaagcaacccactggagcttccctggtgttgcaggtgtcatacacgccgcttccgggagccgtcccgctgttcccaccaccaaccccgttggaaccaagccctactctgcctgacctggacgtggtggccgatacgggtggagaggaggacaccgaggaccagggcctgactggagacgaggctgaaccgttcttggaccaatcaggaggaccgggtgcgcctaccactccacgcaaattgccgagcaggcctcctcctcattaccctggaatcaagcgcaaaagatctgcaccaactagccgcaaattgttgtcagacaagccacaggacttccagatcagagtgcaggtgatcgagggccgccaacttccgggcgtgaacattaagccagtggtgaaagtcactgcggccgggcaaactaaaagaacccgaatccataaaggaaattctccattgtttaatgagactctctttttcaacctgttcgatagcccaggagaactctttgatgaaccaattttcatcactgttgtcgactcccgctcactcagaaccgacgcgctgctgggcgaattccgcatggatgtcggaaccatctaccgcgagccgcgccacgcatacttgcgtaaatggctgctgttgtccgaccccgatgacttctcggctggcgctcgaggatatctgaaaacttcgctgtgcgtgctgggaccaggagatgaagcaccgctcgagcgcaaagatccttctgaagataaggaggacatagagtcgaacctcctcagacctaccggtgtcgctctgcggggcgcgcacttctgtctgaaagtctttcgcgcagaggatctgccgcaaatggatgacgcagtgatggataacgtgaaacagatttttggtttcgaatcaaacaagaagaatctcgtggacccatttgtggaggtgtcgtttgccggaaagatgctttgctcaaaaatcttggaaaaaaccgccaatccgcagtggaaccaaaacattaccctgccggcaatgttcccttccatgtgcgaaaagatgagaatccgcatcattgactgggatcggcttactcataacgatattgtggccaccacctacctgagcatgtcaaagatcagcgcgccgggtggcgaaatcgaagaagagccagctggagcggtgaaaccctccaaggcatcggacctggacgactacctgggattcctccctaccttcgggccatgctatatcaacctgtacggttcgccgcgggaatttactgggtttccggacccgtacaccgagctcaatacgggcaagggtgaaggagttgcctaccgcggacgccttctcctctcgctggaaactaagctggttgaacattcggagcaaaaggtggaggatttgcccgccgatgacatcctccgcgtggaaaagtacctccggagacggaagtattccctgttcgccgccttctactccgccaccatgctgcaagacgtggacgatgccatccagttcgaagtgtcgatcggcaattatggaaacaaatttgacatgacctgccttccgctggcgagcactactcaatactcccgggctgtgtttgacggatgccattactattacctgccttggggaaacgtcaaaccggtggtggttctctcgtcgtactgggaggacatatcgcaccgcatcgaaacccagaatcaactcctgggcatcgctgatcgactggaggcgggactggagcaggttcacctggccctcaaggcccagtgctcaactgaggacgtggactcgttggtggcccagttgactgacgaactgatcgcgggatgcagccaaccactgggggacatccacgagacgccgtccgccactcatctcgaccagtacctgtaccagcttcgcactcatcatctgagccagatcaccgaggcggcgttggccttgaagctcgggcactcggaactgccagccgcactggaacaggcagaggactggctcctgcgcctgcgcgccttggcagaagagccacagaactcgttgccggacatcgtgatctggatgctccagggagataagagggtggcctaccagcgcgtcccggcgcaccaggttctcttctcccgccggggcgcgaattactgcggcaagaattgtggaaaactgcagaccatctttcttaagtacccaatggagaaggtgcctggagcgcggatgccggtgcagattcgcgtgaagctgtggttcggactctcggtggatgaaaaagaattcaaccagttcgccgagggaaagctgtccgtgttcgcagaaacgtatgagaacgaaaccaagctggccttggtgggaaactggggtactaccggtcttacctacccaaagttctccgacgtcaccggaaagatcaagctcccgaaggactcattccgcccatctgctggttggacgtgggctggtgattggttcgtttgtccagaaaagactctcctgcatgacatggatgcgggccacctctccttcgttgaggaggtgttcgaaaatcaaactcgcctgccgggaggacagtggatctacatgtcggacaattacactgacgtgaacggcgaaaaggtgctgccgaaggacgatatcgagtgcccgctcgggtggaagtgggaggatgaggaatggtcgaccgacctgaaccgcgcggtcgacgagcaggggtgggagtactcaatcaccatcccaccagagcgcaagccgaaacattgggtccccgctgaaaagatgtactacacccacagacggcggaggtgggtccgcttgaggcggcgggacctgagccaaatggaggcccttaagcggcatagacaggcagaagctgaaggagaagggtgggaatacgcatcgctgtttggctggaaattccacctcgaatacagaaagaccgacgcgtttcggaggcggcggtggcgccgccgcatggaaccattggagaaaaccggtcccgccgcagtgttcgccctcgaaggggcgctcggaggagtcatggacgataagagcgaagattcaatgtcagtttccacccttagctttggtgtgaaccgccccaccatcagctgcatcttcgactacggaaatcgataccacttgagatgctacatgtaccaagcccgggacttggcagcgatggataaggactcattttcggatccttacgccatcgtgtccttcctgcaccagtcccagaaaactgtggtcgtcaaaaacacgctcaacccaacttgggatcaaaccctgatcttctatgagatcgaaatcttcggcgagcccgcgacggtcgcggaacagcccccttcgatcgtggtggaactctacgatcacgacacctacggagcggatgaattcatggggcgatgcatttgtcagccttcactggagcgcatgccgcggctggcctggttccctcttacgcgcggaagccagccatcaggagaactgcttgcgtcattcgagctgattcagcgcgaaaagccggccatccaccacattccgggcttcgaggttcaagaaacttctcgcatcctggacgagagcgaagataccgatctcccttacccgccgccccaaagagaagctaatatctacatggtcccgcaaaacatcaaaccggccttgcaaagaaccgctattgaaatcctggcctggggccttcgcaatatgaagtcctaccaactggccaatatctcctcgccgtcactcgtggtggagtgcgggggtcagactgtgcagtcatgcgttatccggaaccttagaaaaaacccgaactttgatatttgcactctcttcatggaggtgatgctgccgcgtgaggagctgtactgtccgccaatcaccgtgaaggtgatcgacaaccggcaattcggtagacggcctgtcgtcggacagtgcaccatccggagcctggagtccttcctctgtgacccatactcagcggaaagcccttccccacaaggaggccccgatgacgtgtctctcctgtcaccgggagaagatgtgctcatcgatatcgacgacaaggaacctctgatcccgatccaagaagaggagtttatcgactggtggtccaagtttttcgcaagcatcggagagcgagaaaagtgcggatcctatctggaaaaggatttcgatactctcaaggtttacgatactcagctggaaaacgtggaggcttttgaaggcctctccgacttttgtaataccttcaagttgtaccgcggcaaaacccaggaggaaaccgaggacccgtcggtcataggcgaattcaagggacttttcaagatctaccctctccccgaggacccagcgatccccatgcccccgcggcagttccaccaactggcagcgcagggaccgcaagaatgtttggtgagaatctacatcgtccgggcatttggactccaacccaaggaccctaacggaaagtgtgatccctacatcaagatctccatcggaaagaagtccgtgagcgatcaagacaactacattccatgcactcttgaaccggtctttggcaagatgttcgagctcacttgcactctccccctcgagaaggacctcaagattactctttatgactacgacctgctgtcgaaggacgaaaagatcggagaaactgttgtggatctggaaaatcggctgctttccaaattcggagctcgctgcgggttgcctcaaacctactgtgtttcgggacctaaccagtggcgggaccagcttagacccagccaactgttgcacctgttctgccaacagcaccgcgtcaaggccccggtgtaccggactgaccgcgtgatgttccaagataaggagtactcgatcgaagagatcgaagcaggaaggatcccgaacccgcacctggggccggtcgaagagcggctggcacttcacgtgttgcagcagcaagggctggtgccagaacacgtggagtcccgcccactttactcccctctccaaccagacattgaacagggcaaactgcagatgtgggtggacctgtttccgaaggccctgggtaggccgggtccaccgttcaacatcaccccccgccgtgctcgcagattcttcctcagatgcatcatctggaacactagggacgtgatcctggacgatctctcgctgaccggcgagaagatgagcgacatttacgtcaaaggatggatgattggctttgaggagcataagcagaaaacggacgtgcattaccggtcgctgggcggcgaaggcaatttcaattggcgattcatctttccgttcgattacctccctgctgaacaagtgtgcaccattgccaagaaggacgccttctggcggctcgataagactgagtcgaaaatcccggcccgcgtggttttccagatctgggataacgacaagttcagctttgatgactttctgggctctctgcagctggaccttaacagaatgccgaagccagcgaaaaccgctaagaagtgctcgctggaccagctggatgatgctttccatccggagtggttcgtctcactcttcgagcaaaagaccgtgaaggggtggtggccgtgtgtggcagaagagggcgagaaaaagatcttggcaggaaagctggaaatgactttggaaattgtcgccgagtcagaacacgaagaaagacccgcggggcaagggcgcgatgaacccaatatgaacccgaagctcgaggatccccgtcggccggatacctcattcctgtggttcactagcccgtacaaaaccatgaaattcatcctctggcgccggttccgttgggccatcattctgtttatcatcctgtttatcctgctcttgttcctggcgatcttcatctatgcgttccctaactacgcagctatgaaattggtcaaaccgttctcc

SEQ ID NO: 48038 - DNA, 6243 bp, Artificial Sequence
  derived and/or modified sequence
atgctttgctgtctattagttagagcttctaatttaccatcagctaaaaaggatagaagaagtgatcctgttgcatctttaacatttcgaggtgttaaaaaacgaactaaagttataaaaaatagtgttaatccagtatggaatgaaggatttgaatgggatttaaagggaattccattagatcaaggtagtgaacttcatgtagtagtaaaagatcacgaaactatgggtagaaataggtttcttggagaagcaaaagttccattaagagaagtattagctacaccatcattatctgctagttttaatgcaccacttctagatacaaaaaaacaaccaactggagcttctcttgtgcttcaagtatcatatacaccacttcctggagctgttccattattcccaccaccaactccattagaaccatcaccaacattaccagaccttgatgttgttgcagatactggaggagaagaggatacagaagatcaaggacttacaggtgatgaagcagaaccatttcttgatcaaagtggtggaccaggtgctccaacaacaccaagaaaattaccaagtcgtcctccaccacattatccaggtattaaaagaaaaagatcagcaccaactagtagaaaattattatcagataaaccacaagattttcaaatacgtgtccaagtgattgaaggacgtcagcttccaggagttaacattaaaccagttgtaaaagttacagctgctggtcaaactaaaagaacaaggatccacaaaggaaactcaccattatttaatgaaacattattttttaatttatttgatagtccaggtgaactttttgatgaaccaatttttattacagttgttgactctcgttcacttagaactgatgcattacttggtgagtttaggatggacgttggaacaatttatagagaaccaagacatgcttatcttagaaaatggttacttctttcagatcctgatgacttctcagcaggggctagaggatacttaaaaacttctctttgcgttcttggaccaggagatgaagcaccattagaaagaaaagacccttcagaagataaggaagacatagaatcaaatcttttaagaccaactggagttgcattacgtggagctcatttctgtttaaaagtattcagagctgaagatttacctcaaatggatgatgctgttatggataatgttaagcaaatttttggatttgaatcaaataaaaaaaatttggtcgatccatttgtagaggtttcattcgcagggaaaatgttatgttcaaaaattttagaaaaaacagcaaacccacaatggaatcaaaatattactttaccagcaatgtttccttctatgtgtgaaaaaatgcgtataagaattattgattgggatagattaactcacaatgatattgttgccacaacatatttatctatgtcaaaaatttcagcaccaggaggagaaattgaagaagaaccagcaggtgcagttaaaccatccaaggcaagcgatttagatgactatcttggatttttaccaactttcggaccatgttatattaatctttatggatcaccaagagaatttacaggatttccagatccatatacagaattaaatactggaaaaggagaaggagtagcttatagaggaaggcttttattatcacttgaaacaaaattagtagaacattctgaacaaaaagttgaagatttaccagctgatgatatcttaagagttgagaaatatctacgaagaagaaaatattcattatttgctgctttttatagtgcaactatgcttcaagatgttgacgatgctatccaattcgaagtaagtattggtaattatggaaataagttcgacatgacatgtttaccattagcatctacaacacaatactctagagcagtttttgatggttgtcattactattatttaccatggggaaatgtaaaaccagtagtagtattatcatcatattgggaggatattagtcatagaattgaaacacaaaaccaattacttggaattgcagatagattagaagctggtcttgaacaagttcatttggcacttaaagctcaatgttccacagaagatgtggatagtttagttgcacaacttacagatgaattaattgctggatgtagtcaacctcttggagacattcatgaaacaccttcagcaactcatttagaccaatatctttatcaacttagaacacatcatcttagtcaaattactgaagctgctcttgcactaaaattgggacattcagaattaccagcagcattagaacaagctgaagactggttacttcgtcttcgtgcattagcagaagaaccacaaaattcacttccagatatagtaatttggatgcttcaaggagataaaagagttgcttatcaaagagttccagctcaccaggttttattttcaagaagaggagcaaattattgtggaaaaaattgcggaaaattacaaactattttcttaaaatatccaatggaaaaagtaccaggggcacgtatgccagttcaaattcgagttaaactttggttcggtttatcagttgatgaaaaagaatttaaccaatttgctgaaggtaaattgtctgtattcgcagaaacttacgaaaatgagaccaaattagcacttgttggaaactgggggactacaggattaacatatccaaaattcagtgacgtaacaggtaagattaaattacctaaagattcttttcgtccatcagcaggatggacatgggcaggtgattggtttgtttgtccagaaaaaacattacttcacgatatggatgcaggacatttaagttttgttgaagaagttttcgaaaaccaaactcgtttgccaggaggacaatggatttatatgtcagataattatactgatgttaatggagaaaaggttttaccaaaggatgatattgaatgtccattaggatggaaatgggaagatgaagaatggtcaacagatcttaatagagcagttgatgaacagggatgggagtactcaattactatacctccagaaagaaaaccaaaacattgggtaccagctgaaaaaatgtattatacacataggagaagaaggtgggttcgtcttcgtagaagagacttatcacaaatggaagctttaaaacgtcatagacaagcagaagctgaaggtgaaggatgggaatatgcatctttatttggatggaagtttcatcttgagtatcgtaaaactgacgcatttagaaggagaagatggagaagaagaatggaaccattagaaaaaacaggaccagctgcagtatttgcattagaaggagctcttggaggtgttatggatgataaatcagaagactctatgtctgtttctactctttcattcggtgttaatagaccaactatttcctgtatttttgactatggaaatcgataccatctcagatgttatatgtatcaagcaagagatcttgctgcaatggataaagattcttttagtgacccttatgctattgtttcatttttacatcaatcacaaaaaactgttgttgttaaaaatactcttaatcctacatgggatcaaactcttattttttatgaaattgaaattttcggagagcctgcaacagttgctgaacagccaccatcaatagtcgttgagttgtatgatcatgatacttatggtgctgatgaatttatgggaagatgtatttgtcaaccatcattagaaaggatgccaagattagcttggttcccattaaccagaggatcgcaaccatcaggagaacttctagcatcatttgagcttattcaaagagaaaaaccagctattcatcatattccaggatttgaagttcaagaaacttccagaattttagatgaatctgaagatactgatcttccttatcctccaccacaaagagaagcaaatatttatatggttccacaaaatattaagccagctcttcaacgtacagctatagaaattcttgcttggggtttaagaaatatgaagtcttatcaattggcaaatatttcttcaccatcattagttgttgaatgtggaggacaaacagtacaaagttgtgttataagaaatctaagaaagaatccaaattttgatatttgtacattgtttatggaagttatgttaccaagagaagaactttattgccctccaattactgtaaaggtaattgataacagacaattcggaagaagaccagttgtaggacaatgtactattagatcattagaatcattcttatgtgatccatatagtgcagaatcaccatcaccacagggaggacctgatgacgtttcattattaagtccaggtgaagatgtattaattgatattgatgataaagaaccattgattccaatccaagaagaggaatttatagattggtggtcaaaatttttcgcttctattggagaacgtgaaaaatgtggatcatatttagaaaaagatttcgatacacttaaggtttatgatactcagcttgaaaacgtagaagcatttgaaggtttatcagatttttgtaatacttttaaactttatcgaggtaaaacacaagaagaaactgaagatccttcagttattggagaatttaaaggtctttttaaaatttatccacttccagaagatccagctattccaatgccacctagacaatttcatcaattagcagctcaaggaccacaagagtgtttagtaagaatttatattgttagagcttttggattacaaccaaaagatccaaatggaaaatgtgatccttatattaaaatttcaattggtaaaaaaagtgtttctgatcaagataattatattccatgtactcttgaaccagtttttggaaaaatgttcgaattaacgtgtactcttccacttgaaaaagacttaaaaattactctttatgactatgatttactttctaaagatgaaaaaattggagaaactgtagtagatttagaaaatagattactttcaaagtttggagctagatgtggattaccacaaacatactgtgtttcaggaccaaatcaatggagagatcaacttcgtccatcacaattattgcacttattttgtcaacagcatcgtgtaaaagcaccagtatatagaacagatagagttatgtttcaagataaagaatattcaattgaggaaattgaagctggaagaattccaaatccacatttagggcctgttgaagaaagattagctttacatgttttacaacaacagggattagtaccagaacatgtcgaatcaagaccactttattctccattgcaaccagatattgaacaaggaaaattacaaatgtgggttgatttgtttccaaaagcattagggagaccagggccaccattcaatattactccaagaagagcaagaagatttttcttaaggtgtattatttggaatacacgtgatgttattcttgatgatctttcacttactggtgaaaagatgtcagatatttatgtaaagggatggatgattggatttgaagaacataaacaaaagacagatgttcattatagaagtttaggaggtgaaggaaatttcaattggagatttatcttcccattcgattatcttccagctgaacaagtttgtacaattgcaaaaaaggatgctttttggagattagataaaacagaaagtaaaattccagcaagagttgtttttcaaatttgggataatgataaattttcttttgatgattttttaggaagtttacaattagatttaaataggatgcctaagccagctaaaactgctaaaaagtgttcacttgatcaattggatgatgcattccatccagaatggtttgtgtcattatttgaacaaaaaactgtaaaaggatggtggccatgtgttgcagaagaaggagaaaaaaaaattttagctggaaaattagaaatgactttagaaattgttgctgaaagtgaacatgaagaacgacctgctggtcaaggtagagatgaaccaaatatgaatccaaaacttgaagatccaagacgaccagatactagttttctttggttcacatcaccttataaaactatgaaatttatcttatggagaagatttagatgggctattatacttttcattattttattcattttattattatttttagcaatttttatttatgcatttcctaattatgcagctatgaaattagttaaaccatttagt

SEQ ID NO: 48039 - DNA, 6243 bp, Artificial Sequence
  derived and/or modified sequence
atgctatgttgtttattagtgcgggccagcaacttaccatcagccaaaaaggatagaagatcagaccctgtggcaagcctaacattccgcggcgttaagaaaagaaccaaggtcataaaaaactcagtgaacccagtgtggaacgagggatttgaatgggatctgaaaggaataccactcgatcagggatccgaactccacgtggtggtgaaggaccacgaaaccatgggccgcaaccgttttttgggcgaggctaaagtgcccctgagagaagttctcgctacccccagcctgtccgctagcttcaatgcacccttacttgacacaaagaagcagcccaccggggccagcctggtgctacaggtgagctacacccctctgcccggggctgtgcccctatttcccccccctacacctttagagccgtcaccaaccctgcctgatctagatgtggtggccgataccggcggcgaggaggacaccgaggaccagggactgaccggcgacgaagccgaaccatttctagaccagagcggtggtcccggggcacctaccactccaagaaaactgccatctcgccctcctccacactacccaggcatcaaacggaagcggtccgctcctacttctcgcaaactgctgtccgataaaccccaggattttcaaatccgcgtgcaggtcatagagggccgacagttgcctggtgtcaacattaagcctgtggtgaaggtgactgcagctggccaaaccaagcgtacccgcatccacaagggcaattccccactattcaacgaaaccctgttcttcaatctgtttgattctcccggcgagctattcgacgagcctattttcatcaccgttgtcgactcccggagtctgcgaactgacgccctgctcggggagttcaggatggacgttggcaccatctatcgggagcctaggcacgcctatttgaggaaatggttgctactgtccgatcctgacgattttagcgcaggcgcacgcggctacttaaaaacttccctctgtgttctgggaccaggcgatgaggcaccactggaaagaaaggacccaagtgaggataaagaagacatagaaagtaacctactgcggccaactggcgtggctctgagaggcgcacacttttgcctgaaagtgttccgtgccgaggatctacctcaaatggatgatgccgttatggacaatgttaagcagatctttgggtttgaaagcaataagaaaaatctggtggaccctttcgtggaagtttcttttgccggaaagatgctttgctccaagatcctcgaaaaaactgccaacccccagtggaaccagaacataactttacctgccatgtttccctcaatgtgcgaaaaaatgcggatccgcatcatcgactgggaccgtttgacccacaacgatattgtggccaccacctacctgagcatgagcaagatatccgcaccaggcggagagatagaggaggaacctgccggcgccgttaaaccttccaaggcctctgacctggacgactacctcggcttcctgccaacttttggcccctgttacattaatctctacggctcaccaagggagttcaccgggtttcctgatccatatacagagttaaacacaggtaagggcgagggcgttgcctatagaggccgcctattgctatccctcgagaccaagttagtcgagcatagcgagcagaaggtggaagatctcccagccgatgacatcctccgcgtggagaaatatcttcgcagacgtaaatattcattattcgccgcattttactctgccacaatgctgcaagatgtggatgatgcaatacagttcgaagtttctatcggcaattacggtaacaaatttgatatgacctgtctgcctttagcaagcactacccaatatagccgcgccgtttttgacgggtgccactattactatctgccatgggggaacgttaagcccgtggtggtgttatcaagctactgggaagacatttctcacaggatcgagactcagaaccagctgctcggcatcgccgacagactggaagctggcctggaacaggttcaccttgccctgaaggcccagtgttcaaccgaggatgtggactccctggtggctcagttgacagacgaactgattgctggatgtagccagcctttgggcgatatccacgagaccccctctgctacccatctagaccagtacctgtaccagttacggacccatcacctgtctcagatcacagaggctgctctggctttaaagctggggcactctgaactacctgccgctttagagcaggcagaggactggctgctgcgcctccgtgccctggctgaggagccacagaactctttgccagacattgtcatttggatgctgcagggcgacaagagggttgcataccaacgtgtgcctgcccatcaggtgctgttctccaggagaggggccaactattgtggtaagaattgcggcaagctccagactatatttctgaaatacccaatggagaaagtcccaggcgcaaggatgcctgttcagattcgggtgaagctgtggtttgggctgagtgtggatgagaaagaattcaatcagtttgccgaaggcaagctgagtgtgttcgctgaaacttacgagaatgagaccaaactggcactagtgggaaattgggggaccaccggcctgacctaccccaagttctctgatgtgaccggtaaaatcaagcttccaaaagacagttttaggccctctgcagggtggacctgggccggagactggttcgtttgccccgaaaagaccctccttcacgacatggatgccggtcatctaagtttcgtggaggaggtttttgagaatcagactagactccccggtggacagtggatttatatgagcgataattatacagacgtgaacggcgaaaaggttttacccaaggatgacatagagtgcccactgggatggaaatgggaggacgaagagtggtccaccgacttaaatagggctgtggatgaacaaggatgggaatatagcataacaattccccccgagagaaaaccaaagcactgggtgcctgcagaaaaaatgtattacacccaccggagaagacgatgggttagactgcgacgacgagatctgtctcagatggaagcccttaagaggcatagacaggctgaggccgaaggggagggatgggagtacgcttccctattcggctggaagttccatctggaataccggaaaaccgatgcatttaggagaagacgctggcgacgccgtatggagcctctggagaaaactgggcctgctgccgtgtttgccctggagggcgctctaggcggtgtgatggacgacaagagcgaggattccatgagtgtatccacattatcctttggagtcaatcggcctactatttcctgtattttcgattacggaaatcggtaccatctcaggtgttacatgtatcaggctcgggacctcgccgccatggataaggatagttttagtgacccatatgctatagtgagctttctgcatcagtcccagaaaacagtggtggtgaaaaatacactcaaccctacctgggaccagaccctgatcttttacgagattgaaatcttcggagaaccagctaccgtggccgaacagcctccttccatcgttgttgagttatacgaccacgatacctatggcgcagacgaattcatgggacgttgtatttgtcagcctagcctagaaagaatgcctagactcgcttggttccccctcactaggggctctcaacccagtggcgagctgctggccagcttcgagctgatccagagggagaagcctgcaatccaccacatccccggattcgaggttcaggagactagccgaatacttgacgaatctgaagacacagatctcccgtatcctcctccccagcgagaggcaaacatatacatggtcccccagaatatcaaaccagccctgcagcggaccgcaattgaaattctagcctggggactgcgcaacatgaagtcctaccagctggctaacataagttctccaagcttagtagttgaatgtggcggacagactgttcagtcctgtgtgatacgcaatctacgaaaaaatcctaatttcgacatctgcactctgttcatggaagtgatgctgccacgggaggaactatattgtcctcctataacagtaaaagtgattgataatcggcagtttggcaggcggccagtggtaggacaatgtactatccgctcactcgagtctttcctatgcgatccatactctgccgagagtccttcccctcaggggggccctgatgacgtgtccctgctgagccctggggaagacgtgctgatcgatatagacgacaaagaacctctgatacccattcaggaagaagagtttatagactggtggagcaaattctttgctagcataggcgagcgggaaaagtgtggcagctacttagaaaaggatttcgacaccctaaaggtgtacgacactcaacttgagaacgtagaagccttcgaaggcttaagtgatttctgcaacactttcaaactttacagggggaagacccaggaggaaactgaagaccctagcgttattggggaatttaaaggcctatttaaaatttatccactgcctgaagatcccgctattccaatgccaccaaggcagttccatcagctggcagcacagggcccacaggagtgcctggtgagaatctacatcgttcgggccttcggtttacagcctaaggatccaaacggtaagtgcgacccatacataaaaattagcatcggtaaaaagtctgttagtgaccaggataactatatcccatgtactttagaacccgtgttcggcaagatgttcgagctaacatgtactctgcctctggagaaagacctgaaaattaccctctatgattacgaccttctgagtaaagacgaaaagataggtgagacagtggtggacctcgagaatcggttactgagtaaatttggagccagatgtggccttccccagacatactgcgtttctggccccaatcagtggcgcgatcagctaaggccaagtcagctgttacacttattctgccagcagcacagagtgaaagcaccagtttacaggaccgatcgggttatgtttcaagataaggaatatagcattgaggagatcgaagctggtagaatacctaatccacaccttggtcccgtggaagaaaggttggccctgcacgtactgcagcagcagggtctggtgccggaacacgtggaaagtcgtccactctactctccattacagccagatatagagcaaggcaagttacagatgtgggttgatttatttcccaaggccctggggaggcctggccctccttttaatattacacctcggagagcccgtaggttctttttaagatgtattatatggaacacccgagacgtcatcctagatgatctgtcccttacaggggagaagatgtccgacatttacgtgaagggctggatgataggttttgaagaacacaaacagaagaccgatgttcattaccggtccctgggcggtgaaggaaacttcaattggaggtttatattcccctttgactatctgccagctgagcaggtgtgtactattgcaaaaaaagacgcattttggcgactggacaaaaccgagagtaagatcccagctcgggtggtgttccaaatatgggataacgacaagttctcttttgacgatttcctaggatccctacaactggatttgaacagaatgcccaagcccgccaaaacagccaagaaatgctccctcgatcagctcgacgacgcatttcatcctgagtggttcgtcagcctgtttgagcagaaaaccgttaagggatggtggccttgcgttgctgaggaaggcgagaagaaaattctggccggcaaactggagatgactctcgagatcgtagcagagagcgaacacgaggagcgtcccgcagggcaggggcgcgatgaaccaaacatgaaccctaaattagaagatcctcggcggcccgacacctctttcctgtggtttacaagcccctataaaacaatgaaattcattctctggcgcagattccggtgggccataatcctgtttattattctgtttatcctgctgctgtttctagctatcttcatctatgctttccccaactatgctgctatgaagctggtgaagcctttttcc

SEQ ID NO: 48040 - DNA, 6243 bp, Artificial Sequence
  derived and/or modified sequence
atgctatgctgcctgcttgtccgagcgagcaatcttccatctgcaaagaaggatagacggtcagatcccgtcgcatccctgaccttccgaggtgtcaaaaagcgcacaaaagtgatcaagaattccgtcaatccagtctggaacgaaggatttgagtgggacctcaagggcatcccactcgatcagggcagtgagctgcatgttgtcgttaaggatcatgaaacgatgggtcggaaccgttttctcggcgaagcgaaggttcccctgagggaggtcttggccacgcctagcctgtccgcatcgttcaacgcacccctactggacaccaagaagcagccgacgggcgccagcttggtcctacaggtttcatatacccccttgcctggggctgtgcctcttttccctccacccacgccacttgagcctagtccgacactccccgatctggacgttgtggccgataccgggggagaagaagatacagaagatcaaggtttaacaggcgatgaagccgagccgtttctggaccaatctggtggaccaggagcccctactacccctcgcaagttgccctcccggccgccgccccactatcctggcatcaagcgaaagcgctcggctccgacaagccgcaagctcttatccgataagccccaggatttccagattcgggtacaggtgatcgagggacggcaattgcccggagttaacattaaacctgttgtaaaggtcaccgccgctggtcagacgaaacgcacacgtatccacaagggaaactcgcctctcttcaacgagactttgttcttcaatctcttcgattcgcctggtgaactgttcgatgaaccaatattcattactgtcgttgacagccgatccctacgcactgatgcactactcggtgagttcagaatggacgttggcaccatttatcgtgagcctagacatgcctaccttcgaaaatggttgcttctctcggacccggacgatttttcagcaggtgcgcgtggttatttaaaaaccagtctgtgtgtgcttggtccgggagacgaagcgccccttgagcgcaaggacccgtctgaagacaaggaggacattgagtcgaacctacttagacccaccggcgtcgccctccgtggagcccatttttgtctgaaagtgttccgcgccgaagatctcccgcagatggacgatgccgtgatggataatgtcaagcagatttttggcttcgaaagtaacaaaaaaaaccttgtcgacccttttgttgaggtgtcttttgctggcaagatgctgtgctcgaaaatcctagagaaaacggcgaacccccaatggaaccagaatatcaccctgccagcgatgttccctagtatgtgcgagaaaatgcgcatcaggatcatcgattgggatagattgacacataatgacattgttgctacaacttatctttccatgtccaagatctctgcgccgggcggcgagatagaggaggaacctgctggggccgtcaagccatcaaaagccagtgatctagacgattatctgggtttcttgccgacgttcggtccctgttacatcaacctgtacgggtctccccgtgagttcaccggctttccagacccgtatactgagttgaacacaggtaaaggagagggggtcgcatatcgtggtcgccttctgctgtcacttgagactaagctagtagaacactcagagcagaaggtggaggacctcccggccgacgacattctccgcgtagaaaaatacctacgaaggcgaaaatattcactatttgctgccttctactcggccacgatgcttcaagatgttgacgacgctatccagttcgaggtttccatcggcaattatggtaacaaattcgacatgacgtgcttgcccttggcttcgacgactcagtactcgcgggcagttttcgatggatgtcattactactacttaccttggggcaacgtcaagccagtcgtcgtgcttagctcgtactgggaggatatctcgcatcggattgagactcagaatcagttattgggcatcgccgaccgtctcgaggctggtctcgaacaggttcatctcgcgttgaaggcccaatgtagtactgaggacgtcgattccctcgtcgcccagcttacagatgaactcatcgccggatgcagccagccactcggggatattcacgaaacaccatcggcaactcatctggatcaatacctctatcagttgaggacccatcatctctctcagataacggaagccgctcttgctttaaagcttggacatagcgagttgcctgccgcccttgagcaggccgaggattggctccttcggcttcgcgccttggccgaggaaccccagaattcactccccgatatagtaatctggatgctgcaaggcgacaaaagggtcgcgtaccagagggtccctgcccaccaggtgcttttctctcgccgaggtgcaaattattgtgggaaaaactgtgggaagttacagaccatcttcctaaagtatccgatggagaaagttccgggagctaggatgcctgttcaaatcagagtaaagctttggttcggtctcagtgtcgatgagaaagagttcaaccaatttgctgagggcaagttatctgtgttcgcggagacctacgagaatgagacgaagttggctcttgtcggtaactggggtaccaccgggttgacatatccgaaattttcagacgtaaccgggaagattaagctgccgaaggactctttccggccgtcggcggggtggacttgggccggcgactggtttgtttgcccggagaagacgctcttgcatgacatggacgccgggcacttgtcgttcgtggaggaagtgttcgaaaaccagacgcgtctgcccggaggacaatggatttacatgagtgacaactacactgatgtgaacggcgaaaaagtcttaccaaaagacgatatcgagtgcccccttggttggaagtgggaggatgaggaatggagcacagatctaaaccgggccgtcgacgaacagggatgggagtactccattacgattccacccgaacggaagccaaagcactgggtgcccgctgagaaaatgtattatacccatcgccgtcgtcgatgggtgcgccttagaaggcgggacctatcgcagatggaggccctgaagcgccatagacaagcagaggccgagggagaaggctgggagtatgcatctctgtttggatggaaatttcatttggaataccgaaagaccgacgcattccgccgtcggcggtggcgccggaggatggagcctttggagaagactgggcccgccgctgtgttcgctctcgaaggtgcgctcggcggtgtcatggacgacaaatccgaagattccatgagcgtctctacactcagcttcggagtaaatagaccgactatttcctgtattttcgattacggcaatcgatatcatctgcggtgctacatgtatcaggcgcgagaccttgcggctatggataaggatagtttctccgacccgtatgcgattgtgtcgttccttcatcagtctcaaaaaacagttgtcgttaaaaacacgctaaaccccacctgggaccaaacactaatcttctacgaaattgagatctttggcgagcccgccaccgttgctgaacaaccaccgagcattgtggtggaattgtacgatcacgatacctacggggcagacgagttcatggggcgatgtatctgccagccttcgctagaacgtatgccgcgactagcctggttcccattgacccgtgggtcacaaccgtccggtgaacttttggcaagctttgaattgatccaacgggagaaaccggcaatccatcacattccaggcttcgaggtccaggaaacgagtcgtattttagacgaatctgaggataccgatctcccctacccgccacctcagcgtgaagctaacatctacatggttcctcagaatattaagccggccctgcaaaggacagcgatcgaaatcctcgcgtgggggttgcgcaatatgaagtcgtatcagttggccaacatcagtagtccgtcgctcgtagtcgagtgtggtggtcaaacagtacaatcctgcgtcattcgaaatttgcgaaaaaatcccaactttgacatctgcacccttttcatggaagtgatgcttccacgggaggaactctactgtcctccgatcacagttaaggtgatcgacaaccgccaattcggacgacgcccggtcgttggacagtgtaccattcgcagccttgagtcattcttgtgtgatccctactctgcggagtcccctagcccgcagggggggcccgatgatgtgagcctcttgtctcccggggaggacgtcctgatcgacatagacgacaaagagcctctcatacccatacaagaggaagaatttattgattggtggtcgaaattcttcgcatcgattggcgagcgggaaaagtgcggttcatacctagaaaaggatttcgatacattaaaggtatacgatacgcagctggaaaatgtcgaggcgttcgagggtctctcggatttctgcaacacttttaaactctatcggggaaaaacgcaagaggaaacagaagacccaagcgtaattggggagtttaagggcctcttcaaaatttatcctttgcctgaggaccctgcaatacctatgccgccgcgacagttccatcagcttgctgcacagggtcctcaggaatgcctggtgcgtatatacatcgtgcgcgcgtttggccttcagccgaaggacccaaatggcaaatgcgatccatacatcaaaatcagtattggtaagaagtccgtctccgaccaggataactacataccatgtaccctcgagccagtttttggaaagatgttcgaactgacatgcaccctgccactcgagaaagatttgaaaattactttgtacgactatgacttgcttagcaaggatgaaaaaataggcgaaacggtcgtggatctcgagaaccgactgttgtccaagtttggtgcccgctgcggtctccctcagacctactgcgtaagcggtccgaaccaatggcgcgaccagcttcgtccaagccaactccttcatctgttttgccaacagcatcgtgtcaaggctcccgtctatagaaccgatagggtgatgttccaggacaaggagtattccattgaggaaattgaagcgggaagaatcccgaacccacatctcggtcctgtggaagagcgcctggcactgcatgttttgcaacaacagggactggtcccagagcacgtggagtcccgacctctttattcgcctcttcagcccgacatcgaacaagggaaattgcagatgtgggttgatctattcccgaaagcgctggggcgcccaggtccacctttcaacatcacgccgcgccgtgccagaaggttttttcttcgctgcatcatatggaacacacgcgacgtgatcttagacgatctctctcttacaggcgagaagatgtccgatatctacgtgaagggctggatgatcggctttgaagaacacaagcagaaaactgatgtgcattaccggtcgcttggcggcgaaggaaattttaattggcgctttatcttcccgttcgattatctgcctgcagagcaggtatgtacgatcgcgaagaaggatgcattctggcgccttgacaagaccgagtcaaaaatcccggcgcgtgtggtgttccagatctgggataacgataagttctctttcgacgactttttggggtccctccaactagacttgaaccgtatgcctaaaccagcaaaaacagctaagaagtgctctctagatcagctggacgacgcatttcatcccgagtggttcgtcagcctgtttgagcagaagaccgttaagggctggtggccttgcgttgctgaggagggggaaaagaagatcctggctgggaagctcgagatgaccttagagattgtggcggaaagcgagcatgaagaacgacccgcaggccaaggcagggacgaaccaaacatgaatccgaagttggaagaccctcggcgcccggacacctctttcctctggtttacgtccccctataagactatgaaattcatcctttggcgtagattccggtgggccatcatactatttataattctgttcattctgctcctgtttcttgcaatcttcatatatgcttttcccaattacgccgcgatgaagttggttaagccattttcc

SEQ ID NO: 48041 - DNA, 6243 bp, Artificial Sequence
  derived and/or modified sequence
atgctttgctgcttgctggtgcgggccagcaacctgcctagcgccaaaaaggatagacgctcggacccagtggcttccctcactttccggggtgtgaagaaacgcacgaaggtgatcaagaactcagtgaacccagtatggaacgagggattcgaatgggaccttaagggcatcccgctcgaccaaggaagcgaactgcacgtagttgttaaggatcacgagactatggggaggaatcgctttctcggagaagccaaagtccctctgagagaggtccttgccactccgtcactcagtgcctccttcaacgctccacttctggacactaaaaagcaaccaaccggcgcttcgctggtgctgcaagtgtcgtatactcctctgcccggagctgtgccgctgtttcctccaccgactcccttggagccatccccaactctgcctgacctcgacgtcgtggccgatactggaggagaggaggacaccgaggatcagggattgacgggtgacgaagcggaaccatttctggatcagtctggtggcccaggcgcaccgaccaccccgagaaagctcccgtcccgcccacccccgcactacccaggaatcaaacggaagaggagcgcgccgacgagccggaagctgctttccgacaaaccccaggacttccagattagagtccaggtgattgagggccgccagctgccgggagtgaatatcaagccagtcgtaaaagtcaccgccgccggccagactaagagaactagaatccataaaggaaattcaccgctcttcaacgagactctgttctttaatctgttcgactccccaggagaactctttgacgaaccgatcttcattaccgttgtggattcgcgcagcctccgcaccgacgccctgttgggagaattccgcatggacgtgggcaccatctaccgtgaaccgcggcacgcctacctgcggaagtggctgttgctgagcgacccggatgacttcagtgccggcgcccgcggttacttgaaaacttcgctctgcgttctcgggcccggagacgaagccccgctcgaacgcaaggatccgagcgaggacaaggaggatatcgagtcgaatctcctcagacccaccggtgtggccctcaggggtgctcacttctgcctcaaggtgtttcgggcagaagatctgccgcaaatggatgatgccgtgatggacaacgtcaagcagatctttggttttgaatcgaacaaaaagaacctcgtcgacccgttcgtggaggtgtcattcgccgggaagatgctctgcagcaagattctggaaaagactgccaacccacagtggaaccagaacatcacgcttccggcaatgttcccgtcgatgtgtgaaaagatgcggattaggatcatcgactgggacagactgacccacaacgacatcgtggccactacctacctgagcatgtccaagatctccgccccgggtggagagattgaggaagaaccggcgggagccgttaagccctccaaagcgtccgacctggacgactacttgggtttcttgccgaccttcggcccgtgctatatcaatctgtatggttcaccacgcgagttcaccggattccccgacccttacactgaactcaacaccggaaagggagaaggagtcgcataccgcggaaggctcctgctctcgctggaaaccaagctggtggagcattcggaacaaaaggtggaggacctgccggctgatgacatcctccgcgtcgaaaagtacctgagacgacgcaagtacagcctgttcgcagctttctacagcgccactatgcttcaggacgtggacgatgcaatccagttcgaagtgtcgatcggtaactacgggaataagttcgatatgacttgcctgccgctcgcttcaaccacccaatactcccgggccgtgttcgacggatgccactattactacctgccgtggggaaacgtgaagccggtggtggtgctgtctagctactgggaggatatctctcaccggatcgaaacgcagaatcaactgctgggaatcgccgacagactggaggcaggccttgagcaggtccacttggccctgaaagcacagtgctcgactgaagatgtggacagcctggtggctcaactcaccgacgagctcatcgcgggttgctcccagcctctcggcgacatccatgaaactccttcagcgacccacttggatcaatacctctaccaattgcggactcatcatttgagccagatcaccgaagcagcactggcacttaagctggggcactcagagctccctgcagctctggaacaggcagaagattggctgctgcgcctgcgcgccctggctgaagaaccacagaattcgctcccggacatcgtaatctggatgctccagggggacaagagagtggcttaccagagagtgccagcgcatcaagtgctgttttcgcgccgcggagcgaactactgcgggaagaactgtggcaagttgcaaacgatctttctgaagtaccccatggagaaggtgccaggcgcacgcatgccggtgcaaatccgcgtcaagctctggttcgggctgtctgtggatgaaaaagaattcaaccaattcgccgagggcaagctgtccgtgtttgccgaaacctacgagaatgaaaccaagttggcactggtcggcaactggggaaccaccggcctgacttacccgaagttctcggacgtcaccggcaagattaagttgcctaaggattcgttccgcccttccgccggctggacctgggccggggattggttcgtctgtccggaaaagaccctgctgcatgatatggacgcgggacacctgtcctttgtggaggaggtgtttgaaaaccagacccgactgcctgggggacagtggatctacatgtccgataactacaccgatgtgaacggggaaaaagtccttccaaaagatgacatcgaatgcccactgggatggaaatgggaggacgaggaatggtccactgaccttaacagggcggtggatgaacagggatgggagtattcaataacgatcccgccagagcgtaaacccaagcactgggtgccggctgaaaagatgtactacacgcatcgtagaaggcgctgggtcaggcttagacggcgggatttgtcgcagatggaagctctgaagcgccaccggcaggcggaagctgaaggggaggggtgggagtacgcaagcctgttcggatggaaattccaccttgaataccgcaaaaccgacgcttttagaaggcggaggtggagaaggcggatggaaccacttgaaaagacgggacctgcagcagtgttcgcactggagggagcactcggaggagtgatggacgataagtcagaagattccatgtcagtctctaccctgagcttcggagttaaccggccaacgatctcctgcatcttcgactacgggaacaggtaccatctgcgctgctacatgtaccaggcccgggacctggccgcgatggataaagacagcttctccgacccgtacgctatcgtgagctttttgcaccagtcccaaaagactgtcgtcgtgaagaatactttgaaccctacctgggatcaaacgctgatattctacgaaatcgaaatctttggagaaccggccaccgtggcggaacagcctccgagcatcgtggtggagttgtacgatcatgatacctacggggctgacgagttcatgggacggtgcatctgtcagccttccctcgagcggatgccccgcctggcgtggttcccgttgactcgcggcagccagccctccggagagctgctcgccagcttcgaattgatccagagagaaaagccagcaattcaccatatccccggattcgaagtgcaagaaacttctcggatcctggacgagtctgaagatactgacctgccgtaccctccaccgcaacgggaggctaatatctacatggtgccgcagaacattaagccagccctgcagagaaccgccattgaaattctggcttggggcttgcgcaacatgaagtcctaccagctggccaacatctcgtcgccgtctctggtcgtggagtgtggaggacagaccgtccagagctgcgtgattaggaatctgcggaagaacccgaacttcgacatctgcactctcttcatggaggtgatgctgccgcgggaggaactttattgtcctcccatcacggtcaaagtgatcgataaccggcaattcggaagaaggccggtggtgggccagtgtactatccgctcgcttgagtcctttttgtgcgatccttactcagcagaatccccaagccctcaaggcggacccgacgacgtgtcactgttgtcgcctggggaagatgtgctgatagatatcgatgacaaagaaccgttgatcccaattcaggaagaagaattcattgattggtggtccaaattcttcgcctccatcggagagagggagaagtgtggatcgtacttggagaaggatttcgacactctgaaggtgtatgacacccaactggaaaatgtggaagccttcgagggactgtccgacttttgcaacactttcaagctctaccggggaaagacccaagaggagactgaggacccgtcagtcatcggcgaattcaagggcctgttcaaaatctaccctctcccagaagatccggcgatcccgatgccaccgcgccaattccatcagctcgccgcgcagggcccacaggaatgcctggtgcgcatttacatcgtgcgggcattcggcctgcagccaaaagatccgaacggaaagtgcgatccgtacatcaaaatctcaataggaaagaagtcagtctcagaccaggacaactacataccatgcaccctcgaacccgtgtttggaaagatgttcgagctgacctgtactcttcctctcgagaaggacctcaagatcactttgtatgattacgatctcctgtccaaggatgaaaagatcggggaaactgtggtggatctcgaaaaccgcctcttgtccaagttcggcgcgcggtgtggactgcctcagacctactgcgtgtccgggccgaaccagtggagagatcaactccgaccttcccagctgctccatctcttttgccagcagcaccgggtgaaggcgccagtgtaccggactgatcgcgttatgttccaagacaaagagtactcaatcgaggagatcgaggcaggccggattccaaaccctcacctgggtcctgtggaagagagacttgccctgcacgtcctgcagcaacagggactcgtcccggaacatgtggagtcgcgcccactgtactcaccactgcagccggacatcgaacaaggcaaactgcagatgtgggtcgacctgtttccgaaagcgctggggcgcccgggaccacctttcaacatcacgccaaggagagcacggcgcttctttctccgctgtatcatttggaatacccgggatgttatcctcgatgatctgtcactgactggagagaagatgagcgacatttatgtgaaggggtggatgataggtttcgaggagcacaaacaaaagaccgacgtgcattatcgcagcctgggaggcgaaggcaatttcaattggcggtttatctttccattcgactacctgcctgcagagcaagtgtgcaccatcgctaaaaaggatgctttctggcgcctggacaagaccgaatcaaaaatcccggcccgcgttgtattccaaatctgggataatgacaagttttcctttgacgactttctgggatcgctgcagctcgacctgaatcggatgcctaaaccggctaagactgcgaagaagtgctcgctcgaccaactcgatgacgcgttccaccctgagtggttcgtctcgctgtttgaacagaaaaccgttaaaggttggtggccttgcgtcgccgaagaaggagagaagaaaatcctcgcgggaaaattggagatgactctcgagatcgtggcggaaagcgaacacgaggaacgcccagcaggccaaggacgcgacgagcctaatatgaatcctaagttggaagatccgcgccgacctgacacctctttcctgtggtttacttcaccgtacaagactatgaagttcattttgtggaggcggttcaggtgggccatcatcctcttcattatcctgttcatcttgctcctgttcctggccatctttatctacgccttccccaattacgccgctatgaaattggtcaagccgttctca

SEQ ID NO: 48042 - DNA, 6243 bp, Artificial Sequence
  derived and/or modified sequence
atgctgtgctgcctgttagttagggcttccaacctaccatctgcgaaaaaggatcgccggtctgatccagtggcaagcttgacattccgaggagtcaagaagagaaccaaggtgattaaaaactccgttaaccctgtttggaacgagggattcgaatgggatttgaagggcatacccctcgatcagggatccgagcttcacgtcgtagtcaaagatcatgagacgatggggaggaacagatttctgggggaggcaaaggtccctcttcgagaggtgctggctaccccgagcctgtccgctagtttcaatgcgcctcttctggacaccaaaaaacagcctacaggggcgtcactggtcctgcaggtctcctatactcctctgcccggtgctgtgcccctctttccaccaccaacacctctggaaccgagtccgactctgcctgatctggacgtagtggctgacactgggggtgaggaagatacagaagatcaaggactgactggagacgaggctgagccgtttttggaccagtcaggtgggcccggagcgcccacaacgcctcgcaagctcccaagccgcccccccccacactatcctgggatcaagagaaagcggtcagcaccaacaagtcgcaaattactgtccgataagccccaggacttccagatcagagtgcaggtgattgaaggccgtcaactgcccggggtgaacatcaagcctgttgtgaaggtgacggcagccgggcagacaaagaggacccgcatccacaaggggaactcccctctgtttaatgagactctgttttttaacctctttgatagtcccggagaattgtttgatgaacctatattcattacggtagtcgattccagaagtttgaggactgacgccctgctcggcgagtttcgcatggatgtgggcactatctaccgagagcctaggcacgcctacctgaggaagtggttgctcctgtctgatcctgatgacttttccgcaggagcgaggggctatctgaaaaccagcctttgcgtcctgggccctggagacgaagcccctctggaacgaaaggatcctagcgaagacaaggaggacatagaaagcaacctgctgcggcctactggtgttgcgttgagaggcgcacacttttgtttgaaggtcttcagagctgaagatctgccgcaaatggatgacgccgtcatggacaatgtgaaacagatttttggcttcgagagtaataaaaagaacctggtcgatccttttgtagaagtgagttttgccgggaaaatgctttgctccaaaatcctcgaaaagactgccaaccctcaatggaatcaaaatattaccttaccagccatgttcccctcaatgtgcgagaaaatgaggattaggatcatagactgggataggcttacacataatgacattgtagcaaccacatacttaagcatgtcaaaaattagcgctccaggcggggagatcgaagaggagccagctggagccgttaagccttccaaggctagcgatttagatgattacctgggcttcttgcccaccttcggcccatgctatatcaacctatacggcagccccagggaattcacgggctttccagatccatatactgagctaaatactggcaaaggggaaggtgtggcctacagaggaagacttcttctttccctcgagaccaagctggttgagcacagcgaacagaaggtggaggatctccctgccgacgacatcttacgggtcgaaaagtacctgagaaggcgcaaatactctctgtttgcagcgttttattccgccaccatgctgcaggatgttgacgacgctattcagttcgaggtttctatcggcaattacggcaataaattcgacatgacatgcctcccactcgctagcaccacccagtactcacgggccgtgttcgatggatgtcattactactacctgccctggggtaatgttaaacccgttgttgttctgagtagctattgggaagatatctcgcacagaatcgaaactcaaaaccaactgctcggaattgctgataggctggaagctggtttagagcaggtgcatctcgcccttaaggcacaatgctccacggaggacgtggactcgctggtcgctcagctcaccgacgagcttattgcaggatgctcccaacctcttggtgatattcatgaaactccaagcgccacccacctcgaccagtacttgtatcagctgcggactcatcatctctcccagatcaccgaagctgcactggctctgaagctgggtcattccgagctgccagctgccctggagcaggcagaagactggctactgaggctacgggccctcgctgaggagccacagaatagcctacccgatatcgtcatatggatgttacagggcgacaagcgggtggcctaccagcgggttcccgcccaccaagtattattctctcgccgcggcgcaaattactgtggcaagaactgcgggaagttacagaccatttttttgaagtatcctatggaaaaggtccctggcgcccgcatgccagtgcagatcagagtcaaactgtggttcggtctgtctgttgatgagaaagagtttaaccagttcgctgaaggaaagcttagcgtgttcgcggagacttacgagaacgagaccaaattagccctcgtggggaattggggcaccactgggctcacgtacccaaagttcagcgacgtgaccgggaagatcaaacttcctaaggattcatttaggccttccgccgggtggacgtgggctggggactggttcgtgtgccctgaaaagacacttctgcacgacatggatgctggccacctgtcatttgtagaagaggttttcgaaaaccagactaggcttcccgggggccagtggatttacatgtccgacaactacaccgatgtgaacggcgagaaagtgcttccaaaggatgacattgagtgccctctgggctggaaatgggaagatgaggaatggtcaacagacctcaatcgcgcagttgatgaacagggatgggaatattctatcacgattcctcctgagcgtaaacccaagcactgggtgccagccgagaaaatgtactacactcatcgaaggaggcgctgggtgcggttacgccgcagagatttgtcacagatggaggctcttaagcgtcaccggcaggctgaggccgagggggaggggtgggaatacgcctcactattcggttggaagttccacctggagtaccggaagacagatgctttcagaaggaggcgatggagacgcagaatggaaccgctcgaaaaaacaggccctgcggcagtgttcgctttagagggagccctagggggcgtgatggacgataagtctgaggacagtatgtcagtcagtacgcttagttttggcgtcaataggcccacaatctcgtgtattttcgattacgggaacagataccatctgcggtgttacatgtatcaggcccgagacctggcagcaatggataaggactccttttcggatccctacgccattgtgagcttcctccatcaatcccaaaagaccgttgtggtcaaaaacaccctgaatcctacttgggaccagactctgatattctacgagatcgagatcttcggggaacccgccaccgtagccgaacaaccacccagcatcgtggttgagctatatgaccacgatacatacggcgccgatgaatttatgggccgctgtatctgccagccatctctggaacgcatgcccagattggcctggttccccctcacaaggggctcgcaaccaagcggcgagctgctggcctcatttgagctcattcaacgcgagaaacccgccatccatcacattccaggattcgaggtgcaggagacgtcgcggattcttgacgagagcgaagatacagacctcccatatcctccaccacagcgcgaggcaaacatctacatggttccacaaaacatcaagccagcgcttcagcgcactgcaattgagattcttgcatgggggctgcgcaatatgaaatcttaccagctggccaatatttcatcacccagcctggttgttgagtgtggcggtcagaccgtacagtcctgtgtgataagaaacttgaggaaaaacccaaacttcgacatctgtaccctttttatggaggtcatgctgcctcgcgaggaattatattgtcccccaattacagtgaaggtcatcgacaacagacagttcggaagaagacccgtagtgggccagtgcaccatcaggtcgctcgaaagtttcctatgcgacccttactcagccgaaagccctagcccacagggaggaccggacgacgtatcactactgagcccaggtgaggatgtcctgattgacatcgacgacaaggaaccactgatacccattcaggaagaagaatttatcgattggtggagcaaattctttgcatccattggggaacgcgagaaatgcggctcatatctcgagaaggactttgacacactgaaggtttacgacacccagttggagaacgtggaagcttttgagggcctttcggatttctgcaatacatttaagctgtatcggggcaaaacccaggaggaaactgaagatccaagtgtcatcggcgaatttaagggtttgtttaagatttaccctcttccggaggatccagctatacctatgcccccccgtcaatttcatcagctggccgcccagggcccccaggagtgcctggtgcgcatatatatcgtgagagcgtttggtctgcagcctaaagatcctaacggaaagtgcgacccctatataaagatttcaatcggcaagaaaagcgttagcgaccaagacaactatatcccatgtacactggaaccagttttcggcaagatgttcgaactgacttgtacgctgcctctagaaaaggacctgaagattactttgtacgattatgatttgttgtccaaagatgagaagatcggggagacagtggttgacctggaaaacaggctgctgtcaaagtttggcgcgcgttgtggcctgccacagacatactgtgtgtcgggtccaaaccaatggagagatcagctgagaccaagccagcttctacacctcttctgtcagcagcaccgggtgaaggctcctgtctaccgcaccgatcgcgttatgttccaggataaagaatacagcatagaagagattgaagctgggcggattccaaatccacacttggggcctgtggaagaaaggttggctctccacgtattgcagcagcagggccttgttcctgagcatgttgaatcaaggcccctctactctccgctgcagcccgatatcgagcaggggaagttacagatgtgggttgacttgtttcccaaagcactggggagaccaggtcctccatttaacataacaccacggcgcgcacgcagattctttcttcgttgtattatctggaacactcgggacgttattctcgatgatcttagcctaaccggtgagaagatgtctgatatctatgtcaagggatggatgataggcttcgaggaacataaacagaagactgacgttcactaccggtcgcttgggggcgagggcaatttcaattggaggttcatcttccccttcgactatctccctgctgagcaggtgtgcaccattgccaagaaggacgccttctggagactggataagactgagagtaagattccagcccgcgtggttttccagatttgggataatgacaagttctcatttgacgacttcctcggctctctacagctggacctgaaccgcatgcctaagcccgctaagaccgccaaaaaatgttctctggatcagctggacgatgctttccatcctgagtggtttgtctctctgttcgagcaaaagacagtgaaggggtggtggccatgcgtggcggaggagggggaaaagaagatccttgccggtaaactggaaatgaccctggagattgtggcagaatccgaacacgaggaacgacccgcggggcaaggccgcgatgagcccaatatgaatcccaaattggaagacccaagacggccagatacatctttcctctggttcacctccccttacaagacgatgaaattcatcctgtggcgcaggttcagatgggctatcatattgtttatcatcctattcattctcttgctgttcctggctatcttcatatacgccttccctaactacgccgctatgaaactggtaaaaccgttcagt

SEQ ID NO: 48043 - DNA, 6243 bp, Artificial Sequence
  derived and/or modified sequence
atgctctgctgtctactggttagggctagcaatctcccctcggccaagaaagaccgcaggagcgatcccgtggcgagcctcactttcaggggagtcaagaaacgcacaaaggtcatcaagaatagcgttaatcccgtctggaacgagggtttcgagtgggacctcaagggcatccccctcgaccaaggctccgaactgcacgtcgtggtcaaggatcacgagacgatggggcgtaaccggttcctcggcgaggcgaaagtgcctctccgcgaggtgctggccaccccgagtctgtccgctagcttcaacgccccccttctcgacaccaagaaacagcccaccggcgcttcgttggtgctccaggtctcatacacaccgctgcccggcgccgtgcccctcttccccccccctacaccgttggagccctcccccaccctcccagacctagacgtcgtcgccgacaccggtggagaggaggatactgaagaccagggtctcacaggcgatgaagccgaaccatttcttgaccagtccggtggtcccggtgcccccacgacaccccgtaaactgccgagtcgccccccgcctcactaccccggcatcaagcgtaagcgctccgcgcccactagccgaaagctactatctgataagccacaggactttcaaattcgggtccaggtcatcgagggccgccagctgcctggcgtgaatatcaagcccgtggtgaaggttactgccgctgggcagacgaagcggactcgcatccacaagggcaacagtccgctcttcaacgagactttgttctttaaccttttcgactctcccggggaattgttcgacgagcctatctttattaccgtggtcgattcccgttccttgcgaacggacgcacttctgggtgagtttaggatggacgtgggtaccatttatcgcgagccgcgacatgcatacctccggaagtggttgcttctgagtgatccagatgacttttccgctggtgcccgtggttatttgaaaacctctctatgtgtcttgggccctggtgatgaggctcctttagagcgtaaggacccctccgaagacaaggaagatatcgaaagcaacctcttgaggccaaccggtgtagcgttgcgtggagcccatttctgccttaaggtgttccgggccgaggacttgcctcagatggacgatgccgttatggataacgtcaagcagatctttggctttgagagtaataagaagaacctggtcgacccgttcgtggaagtctcgtttgctggtaagatgctgtgttcgaagattctcgagaagacggccaacccgcagtggaaccagaacattacgctacctgccatgttccccagcatgtgcgaaaagatgagaatccgtatcattgattgggaccgcctgacgcacaacgatatcgttgcaaccacgtacttgtccatgtcgaagatcagcgccccgggcggagaaatcgaggaagaacccgctggggccgtcaagcctagcaaggcctcggatctggacgactacctgggcttcctgcctaccttcggtccgtgttacattaacctgtacggctcgcctcgtgagttcaccggctttcccgacccttacacggaactgaacacgggcaagggcgaaggagtggcctaccgcggcaggctccttctctccctcgagaccaagctcgttgagcactcggagcagaaggtcgaggacctgcctgcagacgacatcctccgcgttgagaagtacctccggcggcgtaagtacagtttgttcgccgccttttactcagcgaccatgctgcaggacgtggacgacgctatccagttcgaggtctccatcggcaactacggtaataagttcgatatgacgtgccttccgttagcttctaccacgcagtacagccgagctgttttcgatggttgtcactactactatcttccctggggcaacgtcaagcccgttgtcgtcctgtctagttactgggaagatatttcgcaccggatcgagactcagaatcagctgctaggtatcgccgatcggctggaggccggtcttgagcaggtgcacctcgcccttaaagcccagtgctctaccgaggatgtagacagcctggtggcccaactgacggatgagctgattgcaggctgtagccagcccctaggagatatccacgagactcccagcgccacccatctggaccaatatctgtaccagcttcggacccaccacctaagccagatcactgaagccgccctggctctcaagcttggccactccgaattaccagccgctctggagcaggccgaggattggttgctccggctgcgcgccttggcggaggagccccaaaactctcttccagacatcgttatttggatgttgcaaggcgacaagcgcgtcgcgtaccagcgtgtgccggcccatcaggtgctgtttagccgccgcggtgcaaactactgcggcaagaactgtggaaagttgcagactatatttctgaagtaccccatggaaaaggttccgggagcgcgtatgcccgttcaaatccgtgtcaagctgtggtttggcctctccgttgacgagaaggagttcaaccagttcgccgagggtaaactgagcgtcttcgctgagacttatgagaacgaaaccaagctcgccctagtgggcaactggggtaccaccggcctcacctacccgaagttctccgacgttaccgggaagatcaagctgccgaaggattcattccgtccctccgctggatggacgtgggcaggtgactggttcgtctgtccggagaagacgttgttgcacgacatggatgccggccacctctcgtttgtggaggaggtcttcgaaaaccagacccgtcttcccggcggccaatggatttatatgagcgacaattacaccgacgtcaacggcgagaaggtactgcctaaggacgacatcgagtgtcctctcggatggaaatgggaagacgaagaatggtcaacagacctcaaccgcgcggtcgacgaacagggttgggaatattctattaccattcctcccgaaaggaagcctaagcattgggtgccggccgagaagatgtactacacccaccgccgccggagatgggtacgtctgcgtcggcgtgatctgtcgcaaatggaagcactgaagagacaccgccaggcagaagcggagggcgagggatgggagtatgccagcttgttcggttggaagtttcacctggagtatcggaagacagatgcattccgcagacgccgctggaggcgtcgtatggagcctttggaaaagaccggtcccgccgccgtttttgcgttggaaggcgccctcggcggagtcatggacgacaaatccgaagattcaatgtccgtcagcactttgagctttggtgtaaacagaccgacgatcagctgcatcttcgactacggcaataggtaccatctgcgctgctacatgtaccaagcacgcgaccttgcggctatggataaagattctttctcggatccttacgccatcgtcagcttcctccatcagagccaaaagaccgtcgtcgttaagaacacactcaacccgacatgggaccaaacgcttatcttctacgaaatcgagatctttggagagcccgctactgtggctgaacaacctccaagcatcgtggttgagctgtatgaccatgatacttacggtgccgacgaattcatgggacgttgcatatgtcagccctctctggaacgtatgccccgtttggcgtggtttcccctcacccgcggtagccagcccagcggcgagctcctcgctagcttcgagcttatccagcgggagaagccggccatccaccatatccctggctttgaggtccaagagacctcacgcatcctagatgaatctgaggacaccgaccttccgtacccgcccccacagcgcgaagccaatatttatatggttccccagaacatcaagcctgcccttcagcgcacggccatcgagatccttgcttggggtctgagaaacatgaagtcctaccagctcgccaacatctcaagtccctccctcgtggtggaatgcggcggtcagacagtccagtcgtgcgtcattcgcaaccttcgcaagaacccaaacttcgacatatgtactctgtttatggaggtgatgttgccccgcgaggagctctattgccccccgatcacagtgaaggtcatcgacaataggcaattcggacggcgccccgtcgtcggccaatgcactatccgctccctggagagttttttgtgcgatccttattccgcagaaagccccagcccgcagggcggccctgacgacgtctcccttctttccccgggagaggacgtcctaatcgacatcgacgataaggagcccttgatccctatccaggaggaggagttcattgactggtggtctaagtttttcgccagcattggcgagcgcgaaaaatgcgggagttacctcgagaaggacttcgatactctgaaggtctacgacactcagctcgagaacgtggaagccttcgagggtctttctgacttctgcaacaccttcaagctctatcgcggcaaaacccaagaggagacggaggatccttcggtgatcggggagtttaagggactgtttaagatctaccctttgcccgaagatcccgcaattcccatgccgccgcgccagttccatcagttggcggctcagggtccacaagaatgcttggttcgcatctacattgtccgggctttcggccttcaacctaaagacccaaatggtaagtgcgatccttacatcaagatttcgatcggtaagaagtccgtctcagaccaggacaattatattccttgcaccctggagcctgtcttcggtaagatgttcgagcttacatgcaccctgccactcgagaaggacctcaagattaccctctacgattacgaccttttgtccaaggatgaaaagatcggcgagactgttgttgatctggagaaccgtctccttagcaagtttggtgctcgctgcggtttgccccaaacgtattgcgtaagcggtcctaaccagtggcgtgaccaactccgacctagccagctcctccatctcttctgtcagcagcatagggtcaaagcgcctgtctaccgtaccgatcgcgttatgttccaggataaggaatactcgattgaggagatcgaagccggccgtatccccaacccgcacctcggtcccgtcgaagagcggctcgctctgcacgtgctgcagcagcagggcctcgtgcctgagcacgtggaatcccgcccgctatacagccccctccaacccgacattgaacagggtaagttgcagatgtgggtcgatttgttccctaaggctctcggacgtcctggccctcccttcaacataaccccccgcagggcccgtcggttcttcctgcgctgcatcatttggaacacccgcgatgtgattctggacgacctttcactgaccggcgaaaagatgtccgatatctacgtcaagggttggatgattggcttcgaggaacacaagcaaaaaacagacgtgcactacagatcccttggaggcgagggcaatttcaactggcgcttcatttttccttttgactacctccccgctgaacaggtgtgcaccatcgcgaagaaggacgccttctggcggctggataagaccgagtccaagatccctgcccgcgttgtgttccaaatttgggataacgacaaattctcgtttgacgacttcctgggctccttgcagctcgacctgaaccgcatgccaaagcctgccaagacggctaaaaagtgcagcctcgaccagctcgatgatgctttccacccagaatggtttgtctctttgttcgaacagaagactgtcaagggttggtggccttgtgtcgctgaggagggcgaaaagaagatcttggccggtaagttggaaatgaccttggagatcgtcgcagagtctgagcacgaggaacgcccggctggtcagggtcgggacgagcccaatatgaaccccaagctggaagaccctcggcgtcctgatacctcgttcctctggttcacctccccttacaagacgatgaagttcatcctttggcgtagattccgctgggccatcattcttttcatcatcctcttcatattgctgctcttcctggcaatctttatctacgccttccctaactatgccgccatgaagctggttaagccattctcg

SEQ ID NO: 48044 - DNA, 6243 bp, Artificial Sequence
  derived and/or modified sequence
atgttgtgttgtctattagtccgcgcctctaacctgcctagtgctaagaaggaccgtcggagcgatcccgtcgcctcgctgactttcagaggagtcaaaaagcgcaccaaagttatcaaaaacagcgtcaaccctgtttggaatgaagggtttgagtgggatctgaagggaatcccactggatcaggggtctgagctacacgtcgtggttaaggatcacgagaccatgggcagaaaccgctttttaggggaggccaaggtcccactgagagaggtccttgctaccccctccctgagcgcgagctttaatgccccattacttgataccaaaaagcaacccaccggagcctccttggtcctgcaggtcagctacacaccgctgccaggagccgtgcctcttttcccaccacctacccctctagagcctagccccaccctgccggatctcgacgttgtcgctgatactgggggagaggaggatactgaggaccagggcctcaccggcgatgaggctgagccatttctggatcagtctggaggaccaggtgccccaaccacccctagaaagctaccctctagaccccctccacactatcctggtattaagaggaagaggtccgccccaacctcccgcaagctgttgagtgacaagcctcaggactttcagattagggtgcaggtaatcgagggccgccaacttcccggcgtgaatataaagcccgtggtgaaagttaccgcagcaggacagaccaagagaacacgcatccacaaaggtaactctcctctgtttaacgaaacattgttttttaacctctttgactcgccgggtgaattgttcgacgagccaattttcattacagtagtcgattctagaagcctaagaaccgacgccctgttaggggagtttcgcatggatgtggggaccatctatcgggagcccagacatgcctacctgcgaaaatggctgctgctgtctgaccccgacgatttcagtgccggggctcgcggatacttaaaaacttcgctttgtgtccttggtcctggcgacgaggcgcccctggagcgcaaagatccttcagaggacaaggaggatatcgaatccaacctgctcaggcctactggagtggccctgcggggcgcccatttttgcctgaaagtgtttagggccgaggacctgcctcaaatggacgatgcggtgatggacaacgtgaaacagatattcgggttcgagtcgaataagaagaatctggttgacccttttgtcgaggtgtccttcgccgggaagatgctttgcagtaagatactggaaaaaacggcaaatccgcagtggaaccaaaacatcacccttcctgctatgttccccagcatgtgcgagaaaatgcggattagaattattgactgggataggctcacgcacaatgacatcgtagctaccacatatctcagtatgtctaagataagtgctcccggaggcgagatagaggaagagccggccggcgcagtgaagccttccaaggcatctgacctggacgattacctcggttttttgccaacctttggaccatgctacatcaacctctatggctctcccagggaattcaccggattccccgatccttacacggagctgaatacgggaaaaggcgagggagtcgcgtatcgcgggagactcttgttatctttggaaacaaaactggtcgaacacagcgagcagaaagtagaggatttgcccgccgatgatatcttgagggtagaaaagtatcttagacgccgcaagtattctctcttcgcagccttttacagtgccaccatgctgcaagatgttgacgacgccatccagtttgaagtatctatcggtaattacggaaacaaattcgacatgacctgcctgccccttgcatctactacacagtacagccgtgcagtgttcgacggttgccactattattacctgccttggggcaatgtcaaaccagtcgtggttctcagctcatactgggaagacatatcccatcggatcgagacacagaatcagcttctgggcatagcagataggctggaagcgggcctggaacaggtgcatctcgctcttaaggcccagtgcagcacggaagatgtggatagcttggtcgcccagcttaccgacgaactgatagccggctgtagtcaacctctgggtgacattcatgagaccccttccgccacacatctggatcagtatctctaccaactgcgtacccaccatctatcccaaattactgaggctgccctggccttgaagcttgggcacagtgagctcccggccgcccttgagcaagctgaagactggctgctgcgcttgcgagctctggcagaggaacctcagaatagcctccccgatattgtgatctggatgctccagggcgacaagagggtagcctaccaacgtgtccccgcccatcaagttctgttcagcaggcgtggtgccaactactgcgggaagaactgtggaaagctgcagactatcttcttgaagtaccctatggagaaagttcccggggctaggatgcctgtccagattcgggttaaactgtggttcggtctcagcgtggacgagaaggagtttaaccagtttgcggaggggaagctcagcgtttttgcagaaacatatgagaatgagactaagctggctctggtgggcaattgggggaccaccggtctgacatatccaaagttcagtgacgtgaccggcaaaattaagctgccaaaagatagcttccgcccttcagcaggctggacatgggcaggagattggttcgtgtgtccagagaagaccctcctacatgatatggatgccggccatttgtcattcgtcgaagaggtgttcgagaatcagactcgcctccctggggggcaatggatctacatgtccgacaattataccgacgttaatggtgagaaagttctgcccaaagacgatatagaatgtccactgggatggaagtgggaagacgaggagtggtccactgatctaaaccgtgctgtcgatgagcagggctgggagtatagtatcactatccctcctgagagaaagcctaaacattgggttcctgctgagaagatgtactacacccatcgacggcgcagatgggtcagattacgccggcgagatctatcacagatggaggccctcaaacgtcatcgccaggctgaggccgaaggcgagggatgggaatacgcgtccctttttggctggaagtttcacctggagtataggaagactgatgcattcaggcgaaggagatggagaaggaggatggaacctctcgaaaagacaggaccagctgcagtgttcgcactcgaaggagcactagggggagtgatggatgacaagtctgaggatagcatgagcgtgtccaccctgagtttcggcgtgaaccgcccgacaatatcttgcatttttgactacggtaatcggtatcacctgcgctgttatatgtatcaggcccgggaccttgccgcgatggataaggactccttttctgacccgtatgccatcgtctcttttctgcaccagtcccagaagaccgtggtcgtcaagaacactctgaatcccacatgggaccagacactaatcttttatgagattgaaatcttcggagagcctgcgacagttgccgaacagccaccgagtatagtcgtcgagctctatgatcatgatacctatggcgccgacgagttcatgggacggtgcatttgccaaccctcactagagcgcatgccccgcctggcctggttccccttgacacgcggctcccagccctctggcgaactcctcgcttcgtttgagctgatccagagggaaaagcccgccatacaccacatcccaggattcgaggtgcaggaaacgtcccgaatactggacgaaagcgaggatactgatctcccctatccacctccgcagagagaggcaaatatttacatggttccgcagaacatcaagccagcactccagcgaactgccattgagattctggcatggggccttagaaatatgaagtcctatcagctcgcaaatatctcaagtccctctctggtggtggagtgcggaggacaaacagttcaatcttgcgtgatccgcaatctacgaaagaacccaaattttgacatctgtactctcttcatggaagtgatgctgccacgggaggagttgtactgcccaccgattacagtgaaagttatagacaatcggcaatttggtcgccgccctgtggtgggacagtgcacaatcaggagtctggaaagcttcctgtgtgacccatactcggcggagtcgccctcacctcaaggcggtccagacgatgtgtcactactgagcccaggcgaggatgtgctcattgatatagacgacaaagagcctctcattccaatacaagaggaggaattcatagactggtggtcgaaattttttgcttccataggagagcgggagaaatgtgggtcataccttgagaaagacttcgacaccctgaaggtgtatgatacgcagcttgaaaacgtggaagcctttgaagggctgtcggatttctgcaatacctttaaactatataggggtaagacccaggaggaaactgaggatccctccgtaataggtgaatttaaagggctgtttaagatataccccttgccagaggaccctgcaattcctatgccaccacgccagttccaccagttagccgcacaagggcctcaagagtgtcttgtcagaatctatatcgtgagagcgtttggactccagccaaaggacccaaacggaaagtgcgatccttacatcaaaatcagcataggcaaaaagtcggtctcagatcaggacaattacatcccctgcacactggagccggtttttgggaagatgtttgaactgacttgtaccctgcccctggaaaaggatcttaaaatcacattgtacgactacgacctgctgtccaaggatgagaagatcggggagactgtggtggacttagaaaatcggctgctctcgaaatttggggctcgctgtgggctgccacagacgtactgcgtgtctggaccaaatcagtggagagatcaacttcgtccctcccaactcctgcatctgttttgccagcagcatcgtgtgaaggctccagtgtaccggacagaccgggtcatgtttcaagataaggagtattctatcgaagagatcgaagccgggaggatcccaaacccacatctcgggcctgtagaggagcgtcttgcgctccatgtgcttcagcagcagggtctggtgcccgagcacgtcgaaagccggcccctatacagtccacttcagccggacattgagcaagggaagctgcagatgtgggtagacctgttcccaaaggctctggggaggcctggccccccgtttaacattacccccaggcgtgcaaggcgattcttccttcgatgtatcatttggaatactcgggacgtgatcctcgatgacctgagcctaaccggtgagaagatgtcagatatttatgtgaagggctggatgattggttttgaggaacacaaacaaaagaccgacgtgcattatcgctccctggggggggagggcaactttaattggcgttttatttttccattcgattatctccccgctgagcaagtttgcacaattgctaaaaaagacgccttctggagattagataagactgagtctaaaatacccgcccgcgttgtgttccagatctgggacaacgataagttttcgtttgacgatttcctgggcagcctgcagctagatctgaatcgtatgccgaaacctgccaagacggcgaagaagtgttccctggaccaactggatgatgcttttcatcccgaatggttcgtgtccctgtttgaacaaaagaccgtaaagggatggtggccgtgtgtcgcagaggagggtgaaaagaaaatcctggcaggcaaattggagatgactctggaaatcgtggccgagagtgagcacgaagaacggccagccgggcagggccgcgatgagccaaacatgaaccccaagctggaggatccccgcagacctgacacttcctttctgtggtttacaagtccgtacaagactatgaaattcattctctggagacgattccgatgggcgattattctgttcatcatcttatttattctgttgttgttcctggcgatttttatttacgccttcccaaattatgcagctatgaagctcgtgaaaccattctcg

SEQ ID NO: 48045 - DNA, 6243 bp, Artificial Sequence
  derived and/or modified sequence
atgctctgctgtttgttagttagggcgtccaacctgccttccgcgaaaaaagatcgaagaagtgacccagttgccagtctgactttccggggagtcaaaaagagaactaaagttatcaaaaattccgtcaatcccgtgtggaacgaaggatttgaatgggatcttaaaggaataccactagaccagggatcagaattacacgtagtggtgaaagatcatgaaactatggggaggaatcggtttctcggagaggctaaagtgccgctacgagaggtgcttgccacacccagtctgtccgcttcttttaacgccccactgctagatactaaaaaacagcccactggagcctccctcgtactccaagtgtcctatacacctctccccggagctgtacccttatttcccccacccactcctctggaaccctctccaactcttcccgatcttgatgttgtggctgatactggaggggaagaagatactgaagatcagggactgacaggggatgaagctgaaccctttctggatcagtcaggaggacctggagctccaacaacacccaggaaacttccttctagacctcctccgcactatcccggaataaaaagaaaaagaagtgctcccactagtaggaaactactcagtgacaagccacaggatttccagatacgggtacaggtaatagaagggagacaactgcctggagttaatattaagcctgtggttaaagtgacggccgccggacagactaaaagaacaaggatacacaaagggaattcacctctttttaatgaaacactcttctttaaccttttcgattctcccggagaactttttgatgagccaatctttattactgtggttgattctagatccctcaggacagacgctcttcttggggaattcaggatggatgttgggacgatctatagagaaccccggcatgcatatcttcggaaatggctcttgttgagtgatccagatgatttctccgcgggggcacgcggatatcttaaaacttccctctgtgtactaggacccggggatgaagcaccgcttgagcggaaagatcctagtgaagataaagaagacatcgaatccaaccttttaagacccacaggagtagcgctgcgcggagcccatttctgtctcaaagtttttagagccgaggatctgccacagatggatgacgcagtcatggataacgtcaagcagatatttgggtttgaatccaataagaagaatctagtcgatcccttcgtcgaagtgtcttttgccgggaaaatgttgtgttctaaaatcctcgaaaaaacagcaaatccccagtggaatcagaatatcacactccctgccatgttcccttccatgtgcgaaaaaatgcgcatccggatcatagactgggatcgcctcacacataatgatattgtcgccacaacttatctatccatgtcgaaaatctccgcgcctggaggagaaattgaagaagaacctgccggggccgtgaaaccatccaaagcttccgatctggatgattatttggggtttcttccaacatttggaccttgctacatcaacttatacgggtcaccaagggaatttacagggttcccagatccatatactgagttgaacacagggaagggagaaggggtggcctatagaggacgtctccttttgagtctggaaacgaaattagtcgagcattctgagcagaaagttgaggatctccccgctgatgatatactcagagtggaaaaatacctgagacggagaaagtattccttgttcgccgctttttattcagccactatgctgcaggatgtggatgacgctattcaatttgaggtctctataggaaactatggaaacaaattcgatatgacatgcctcccactggcttctacaactcagtatagtcgggccgtatttgacgggtgccactattactatcttccctggggaaatgttaaacccgtggttgttctgtcctcttattgggaagatatctcgcacaggatagaaacacagaatcagctactggggatcgcagacagactggaagccggacttgaacaagtacatctcgccctaaaagcccagtgttctacagaggatgtcgactccctcgtggcccagttgacggacgaattaattgctggatgctcacagcctctcggagatatacatgaaacacctagtgccactcaccttgaccagtatttgtatcagttacgaactcaccatctatcccaaataactgaggctgccctcgccctgaaactaggacactcagaattgcccgctgcactggaacaggctgaagattggctcctcagactgcgggctctagctgaggaaccccagaactcactccccgatattgtcatctggatgcttcagggagataaaagggtagcatatcagagggttcccgctcatcaggtgctgttctcacgccgcggagctaactattgcgggaaaaattgtgggaaactacagactatattccttaaatatcccatggaaaaagttccaggggctcgaatgccggtgcagatcagagtaaaactctggtttgggctatccgtggatgaaaaggaattcaatcagtttgcagaagggaagttatctgtgttcgcagaaacatatgaaaatgagacaaaattagccttagttggaaattggggaacaacagggttaacttatccaaaattctctgatgtcacaggaaaaatcaaactccccaaggattcattcaggcctagtgccgggtggacatgggctggagattggtttgtatgcccagagaaaactctattacacgatatggatgccggacacttatcatttgtggaggaagtcttcgaaaatcagacacggcttcccgggggacagtggatttatatgtcggataactatacagacgtgaatggagaaaaagtgcttccaaaggatgatatcgaatgtccccttggatggaagtgggaggatgaagagtggtccactgatcttaacagagctgtagatgagcaaggatgggagtattccatcacaatcccaccagaaaggaaaccaaagcattgggtcccagcagaaaaaatgtattatacacatagacggagacggtgggtgagacttaggaggagagatctctcacagatggaagctcttaaacggcacagacaggcggaggctgaaggggaagggtgggaatatgcttccttattcgggtggaaatttcatctcgaatatcgcaagacagatgccttccgaagacgcaggtggcggcggaggatggaaccccttgaaaaaactgggcctgctgccgtttttgccctggagggagcactcggaggggtaatggacgataaatccgaagacagtatgtccgtatcaacactttccttcggagtcaaccgccctactatttcgtgcatcttcgattacgggaatcgctatcaccttcgctgctatatgtaccaggccagggacctcgctgcgatggataaagattcattctctgatccttatgctatcgtttctttcctgcatcagagtcagaaaactgtagttgtaaaaaatactttaaacccaacatgggaccagacactgatcttctacgaaatagaaattttcggggagccagcaacagtagctgagcagccacctagtatcgtcgtcgaattgtacgatcatgatacatacggagccgacgagtttatggggcggtgtatatgtcagccctcactagaaagaatgccacggttagcttggttccccttaactcgggggagtcagccctctggagaacttctagctagttttgaactcatacagcgcgaaaaaccggcaatccatcacatccctgggttcgaagtgcaagaaacttctagaatcctggatgagtcagaagatactgatctaccataccccccaccccagagggaagccaatatatatatggtacctcagaatataaaacccgccctgcagaggacagccatcgaaatcctggcatgggggctcaggaacatgaaatcctatcagctggccaatatctcctctccaagtttagtagtggaatgtgggggacagactgtccagagttgcgtgatccgaaatctacggaaaaatcctaatttcgatatatgcacactgttcatggaagtaatgctccccagagaagaactttattgccctcccattactgtgaaagtgatagataacaggcagtttgggaggaggcctgtggtcgggcagtgcacaataagatccctcgaatccttcctatgtgatccatactcagccgaatcgccgtcacctcaaggagggcctgatgatgtatctcttctctcacccggggaagatgtcctaattgatatcgatgataaggaacccctaattcctattcaggaagaagaatttatagattggtggtccaaattcttcgcctctatcggagaacgggaaaaatgtggatcttatctagagaaggattttgatacactcaaggtttatgacactcaactggaaaatgtcgaagcattcgaaggactatctgacttctgtaatacttttaaactatatcgcgggaagacacaggaagaaactgaggatccaagtgtgatcggagagtttaaagggctctttaaaatatatccacttcccgaggatccagccatccccatgccccctagacagtttcatcagcttgctgcccaaggaccacaggaatgtctagtcagaatctatatagttagagcgttcgggcttcagccaaaagatcccaacgggaagtgtgatccatacataaaaatatccatcgggaaaaagtccgtgagtgatcaggataattatatcccctgcactctagaacctgtgttcggaaaaatgttcgaattaacatgtacactacctctggaaaaagacctaaaaataacattgtacgattatgatcttttatccaaagatgagaaaattggggaaacagttgttgatctcgaaaatcggctgttaagtaaattcggagcgcgctgtggattaccccagacttactgcgtgtccgggccaaaccagtggcgtgatcagctcagaccctcacagctcctccatttattctgtcagcaacatagggtgaaagccccagtttataggactgatcgagtaatgtttcaggataaagaatactccattgaagaaatcgaagcagggcgaatccctaatcctcatttagggccagttgaggaaaggttggccctccatgtactccagcagcaggggctggtgcccgaacacgttgaatctcgcccactgtattctccgctacagcccgatatagagcagggaaagctccagatgtgggtcgatttgttccccaaagcattgggaaggcccggacctcccttcaatatcacacccaggcgggctcggcggttctttctcaggtgtatcatttggaatactagggacgttatcctggatgatctatctctgactggggaaaaaatgagtgacatctatgtaaaggggtggatgatcgggtttgaggaacacaagcagaaaactgacgtgcattatcgatcactcggaggagaaggaaatttcaactggcgattcatttttccatttgattatctccccgccgaacaagtctgtacaatcgcgaaaaaagacgctttttggaggctagataaaacagaatctaaaattcccgctagagtggtcttccaaatatgggataatgataaattttccttcgatgatttcttgggatccctccagctagatctcaaccgcatgcccaagccagcaaaaactgctaaaaaatgttctcttgaccagctcgatgatgctttccaccccgaatggtttgtctccctcttcgaacagaaaactgtgaaagggtggtggccctgcgttgctgaagaaggagaaaaaaaaattcttgcagggaaacttgaaatgactcttgagattgtcgctgagagtgaacacgaagagagacctgcagggcagggaagagatgaacctaacatgaaccccaagcttgaagatcccaggcgaccagatactagtttcctgtggtttacatccccttataaaactatgaaatttatcctctggaggaggtttaggtgggccatcatactctttataatactgtttatcctactgctattcctggctatcttcatctatgcttttcctaactatgccgctatgaagcttgtgaaacctttctca

SEQ ID NO: 48046 - DNA, 6243 bp, Artificial Sequence
  derived and/or modified sequence
atgttgtgctgcctgctggtgcgcgcttccaacttgccgagcgcaaaaaaggacagacggagcgaccccgtcgcctcgctcaccttccggggagtcaagaagcgcaccaaagtgatcaagaattcagtgaatcccgtgtggaacgagggattcgagtgggacctcaagggaattcctctcgatcaaggctcggaactccatgtggtggtcaaggatcacgagactatgggtcggaatcggtttctcggagaagcaaaagtgccactgcgagaggtgctggcaaccccatccctgtccgcctcctttaacgctcctcttctggacaccaaaaagcagccgaccggagcgagcctggtccttcaagtctcgtacacgccacttccgggcgccgtgccactgttcccgccgcccaccccgctcgaaccctcccctacccttccagacctcgatgtggtcgccgacaccgggggagaagaggacaccgaggaccagggccttaccggagatgaagcggaaccgtttcttgatcagtccggcggccctggtgcacctaccaccccgcggaaactgccctcgcgcccgcccccgcactacccggggatcaagcggaagcggtccgccccgactagccggaaactgctgtccgacaagccgcaggattttcagatccgggtgcaggtgatcgaaggaaggcagctgccgggcgttaacatcaagcctgtggtgaaagttaccgcagctgggcagaccaaacgaactcggatccacaaaggtaactcgccactgttcaacgaaaccttgtttttcaacctgttcgactcgccaggagagctgtttgatgaaccgattttcatcacggtggtggactcgagaagcctgcgtaccgatgccctgctgggcgagtttagaatggacgtcggaacgatttaccgcgagccgagacacgcttacctccgcaaatggctgctgcttagcgatccagacgattttagcgctggggcccgggggtatctgaaaacgtcgctgtgcgtgctgggaccaggcgacgaagcacctctggagcgcaaggatccaagcgaagataaagaggacattgaatcaaacctgctgcggcctactggagtggccttgaggggagctcacttctgtctgaaagttttccgggccgaggacctcccgcagatggacgacgcggtgatggacaatgtgaaacaaatcttcgggttcgaatctaacaaaaagaaccttgtggatccttttgtggaagtctcctttgcggggaagatgctttgctccaaaatcctcgaaaagactgcgaatccacagtggaaccagaatatcacgctgccagccatgttcccctcgatgtgtgagaagatgcgcattagaatcatcgactgggaccgcctgacgcataacgatatcgtggccactacctacctctcgatgtccaagatctctgccccaggaggcgagatcgaggaggagccggctggagcagtgaagccttccaaggctagcgatcttgatgattacctgggattcttgccgacctttggaccgtgctacatcaacctttacggctcgccacgcgaattcaccggcttcccggacccgtacaccgaactgaacaccggaaagggcgaaggagtggcctacagagggaggctcctgctgtctcttgaaaccaagctggtcgaacattcggagcagaaggtggaagatctcccggctgacgatatcctgcgcgtcgagaagtacctgaggcgcagaaagtactccctgtttgccgctttctactcggcaaccatgctgcaagacgtggacgatgcgatccaattcgaggtgagcatcggtaactacggaaacaagtttgatatgacctgcctgccgcttgcgtccactacccagtacagccgggctgtgttcgacggatgccactactactacctgccgtggggaaatgtgaagccggtggtggtgctgtcctcgtactgggaagatatctcacaccgcattgaaactcagaaccagttgctcggcatcgcagatcggctggaagctggactggagcaggttcatctggccctcaaggctcaatgctcgactgaagatgtcgactcgctcgtggcccaacttactgacgagctgatcgctgggtgctcccagccgctgggagacatccacgagactcccagcgccacccacctggatcagtacctttaccagctgcgcactcatcacctgtcccagatcactgaagccgctcttgctctgaaactgggtcactccgagctcccggctgccctggaacaggccgaggactggctgcttagactgcgcgccctggcggaggagccacaaaacagcctcccggacatcgtgatctggatgcttcaaggagataaaagggtggcctaccagagggtgccggctcaccaagtgctgttttctcgtcggggtgccaactactgcggtaagaactgcggaaagttgcagactatctttttgaagtacccaatggaaaaagtcccgggtgcacggatgccggtccaaatcagggtcaagctgtggttcggactgtcagtggatgaaaaagagttcaaccagttcgccgaagggaaactgtccgtgttcgcagaaacttatgaaaatgagactaagctggcgctggtcggaaattgggggacgaccggactgacctacccgaagttcagcgacgttaccggaaagatcaaactgccgaaagactcgtttagaccatcggcaggatggacctgggccggagactggtttgtgtgccccgaaaagaccctcttgcacgacatggacgccggtcacctgtcgttcgtggaagaagtgttcgagaatcagactcgcctgccgggagggcaatggatctatatgtcggacaactacacggacgtcaatggagaaaaggtgctgccaaaggacgacatcgaatgtcctttggggtggaaatgggaggacgaggaatggagcaccgacctgaatcgcgccgtggatgagcagggttgggaatattccatcactatccctccggagagaaaaccgaagcattgggtgccggccgagaagatgtattacacccacagaagaaggcgctgggtccggctgcggcgacgcgatctgtcacaaatggaagcgctcaagcggcacaggcaagcggaagcagaaggggagggatgggagtacgccagcctgtttggatggaagttccatcttgagtaccggaaaactgacgctttccgccggcgcagatggcgccggcgcatggaaccgctggagaaaaccggcccggctgccgtgttcgccttggagggcgcgctcggaggagtgatggacgacaaatcagaggattcgatgtcggtgagcactctttccttcggtgtcaaccgcccaacgatcagctgcatcttcgattacggcaaccgctaccatctccgctgctacatgtaccaggcgcgcgatctggccgcgatggacaaggactcattttccgatccatacgccatcgtgagcttcctccaccagtcacaaaaaactgtggtggtgaagaacaccttgaacccaacctgggaccagactctcatcttttacgaaattgaaatcttcggtgaaccggctaccgtggcggagcaacctccgtcaatcgtggtggagctttacgaccatgacacttatggagccgacgaattcatgggacgctgtatctgccagccttcgctggagaggatgccacgcctcgcctggttcccgctcactcggggctctcagccgagcggagaactgttggcgtcgttcgagctgatccagagggagaagccggcgattcaccacatcccgggtttcgaagtgcaagaaacttcacgaatcctggatgagtcggaagatacggacctgccttaccccccgccacaacgcgaggctaacatatacatggtcccacaaaacatcaagccagcactccaaagaactgcgattgagatcttggcatggggactgcggaacatgaagtcataccaactcgcaaatatctcgtccccgagcttggttgtcgaatgcggtggacaaactgtccagtcctgcgttatcaggaatctccggaaaaaccctaacttcgacatctgcaccctctttatggaggtcatgctcccacgcgaagagttgtactgtccccccatcactgtgaaggtcatcgacaatcgccagtttggtagacggccggttgtgggtcaatgcactatcagatcgttggagtctttcctctgcgacccttactcggctgaatcaccatcaccgcagggaggtccggacgacgtctccctcctgtcacccggcgaggatgtgctcatcgatatcgacgacaaggagccactcatccctatccaggaagaggaattcatcgattggtggtccaagttcttcgcctcgatcggagagcgggaaaagtgcgggtcctaccttgagaaagactttgataccctcaaagtctacgatacccagctcgaaaatgtggaagcctttgaaggacttagcgacttctgtaacaccttcaaactttaccgcggcaaaactcaagaagaaaccgaagatccctcggtgatcggagaattcaaggggctgtttaagatttacccgctgcccgaggacccggccatccccatgccacctagacagttccaccaacttgccgcccagggaccccaggagtgcctggttagaatttacatcgtgagggccttcggcctgcagccaaaggacccgaatggaaagtgtgatccgtacatcaagatctcgatcggaaagaaaagcgtgtcggaccaggacaattacattccctgcaccctcgaaccggtgttcggaaaaatgttcgaactgacctgcacgctcccgcttgaaaaggacttgaagatcaccctgtacgactacgaccttctcagcaaggacgagaagatcggagaaaccgtcgtcgatctggagaatagattgctgtcgaaatttggagcacggtgtgggctgcctcagacttactgcgtctcaggtcctaaccagtggcgggaccaactgcggccctcccagctgcttcacctgttctgccaacaacaccgcgtcaaggcgccggtctaccgcactgacagagtgatgttccaggataaggagtactcaattgaggagattgaagccggaaggatcccgaatcctcacctgggtcccgtggaagaacggctggcgctgcacgtgctccagcagcaaggcctggtgcccgagcacgtggagtcgcgcccgctttactccccactgcagccagatatcgagcaaggaaaattgcagatgtgggtggacctcttcccaaaggcgttgggcagaccaggacccccgttcaacatcactccgagaagagcgcgccgcttctttctccggtgtatcatctggaacaccagagatgtgatcctggatgatctctcactcactggagaaaagatgtcagacatctacgtgaaggggtggatgattggatttgaggagcacaagcagaaaacggatgtgcactacagatcgctgggaggagaggggaacttcaactggaggttcatctttccgttcgattatctgcccgctgaacaggtgtgtactatcgccaagaaggatgccttctggagactggataagaccgaatccaagatcccggctcgcgtggtgtttcagatctgggacaacgacaaattctcgttcgacgactttctcggatcactgcagcttgacttgaatcggatgccaaagccggcaaagactgctaagaaatgctccctcgaccaactggacgacgcgtttcaccctgagtggttcgtttccctcttcgagcagaaaactgtgaaaggatggtggccatgcgtcgccgaagagggagaaaagaagatcctggcaggcaagctggagatgactttggagatcgtggccgaaagcgagcatgaggagcggccggcgggacagggccgcgacgaaccgaacatgaatccaaagctcgaggatccgcggcggccggacacgagcttcctctggttcacttcaccgtacaaaaccatgaagttcatcctgtggcgtcgcttcaggtgggcgattatcctgttcataatcctgtttatcctccttttgttcctggccatcttcatctatgcgttccctaattacgcggcgatgaaactggtgaagccgtttagc

SEQ ID NO: 48047 - DNA, 6243 bp, Artificial Sequence
  derived and/or modified sequence
atgctttgttgtctgcttgtccgcgccagcaatctgccaagcgccaagaaggacagacggtcggatccggtggcctccctgacttttagaggggtgaagaagagaactaaggtcattaagaactctgtcaatccggtgtggaatgagggatttgagtgggatctgaagggcatccctctcgatcaaggttccgaactgcacgtggtcgtgaaagaccatgagactatgggacgcaacagatttcttggggaagcaaaggtgccactgagggaggtgctcgccactccttcgctgtcggcatcgtttaatgcaccactgctggatactaagaagcagcctactggggcatcgcttgtgctgcaggtcagctacaccccactgcccggggcagtgccactttttcctccgcctacccctctggaaccttccccaactctccctgatcttgacgtggtcgccgatacgggcggtgaggaggacacggaggatcagggtctgaccggtgacgaagcagaaccattcctggaccaatctggtggaccgggagcgcctaccaccccacgaaagctgccttcacggcccccaccacactaccccggaatcaagcggaaaagaagcgcaccaaccagccgcaagctcttgtcagataagccgcaagattttcagatcagagtgcaagtcatagaagggagacagctcccgggtgtgaacattaaacctgtggtgaaggttactgcagccgggcagactaagagaactcgcattcataaaggtaactccccactgttcaacgaaaccttgttctttaacctttttgattcaccaggagaactctttgatgaacccattttcatcaccgtggtggactcgagatcgctgcgaactgatgcactcctcggagaatttcgcatggacgtgggtactatttacagagagccaaggcacgcatacttgcgtaaatggctcttgctgtcggatccggatgatttttcagcgggtgcaaggggataccttaagacctcgctctgtgtccttggaccaggagatgaagccccgcttgaacggaaggaccctagcgaagataaggaggacatcgaatcgaacctcctgaggcctaccggagtcgcccttagaggagcgcatttctgtctgaaagtttttcgggccgaagatctgccccaaatggacgatgccgtgatggacaacgtcaagcagatatttggctttgagagcaacaaaaagaacctggtggatccatttgtggaggtgtcctttgcgggaaaaatgctgtgttcgaagatactcgaaaagacggccaatccacaatggaaccagaatatcactcttcctgcgatgtttccttcgatgtgcgagaagatgaggattcggattatcgactgggatcggcttacccacaacgatattgtcgctactacctatttgagcatgtcgaagatctccgcaccaggtggagaaattgaagaagagccagcaggagccgtcaaaccttcgaaggcctcggaccttgatgactaccttgggttcctgcctacttttggtccttgctacatcaacctgtacggaagcccacgtgaattcactggattccctgatccttacactgagctgaacaccggcaagggtgaaggcgtggcatacagggggagactgctgcttagcctcgagactaaactcgtggaacactccgaacagaaggtggaggaccttccagcagacgacatcctgcgcgtggagaaatacctgcgtcggagaaaatactccctctttgcagccttttactcggcaactatgctgcaagacgtggatgacgcaatccaatttgaggtgtccattggtaactacggaaacaagtttgatatgacttgccttccactggcatcgaccacgcaatattcgcgagcagtgttcgatggatgccattactactacctgccctggggcaatgtgaagccggtcgtggtcctttcctcctactgggaagatatctcccatagaattgaaacccaaaatcaactgcttggcattgcagatcgactggaggcaggcctggaacaagtgcatcttgcactgaaagcccagtgttccactgaagatgtggattctcttgtggcacaactcactgatgaactgatcgcaggttgttcgcaacctcttggtgacattcatgagactccttcggcaactcatcttgatcaatacttgtaccaactgcgtactcatcaccttagccaaattactgaagcagcacttgcgctgaagctgggtcatagcgaactccctgcagcgctggagcaagcggaagattggcttctgagactcagagccctggcggaagagcctcagaattccctcccagatatcgtgatttggatgctgcagggcgacaagcgtgtggcttaccagagagtgcctgcacaccaagtgctcttctcgcgtcggggagcgaactattgtgggaagaactgtgggaagctgcaaaccatttttctcaaatatcctatggaaaaggtgccaggtgcgaggatgccggtccagattagggtgaagttgtggttcggtctttccgtggatgagaaggagttcaatcagtttgccgaaggaaagctcagcgtctttgccgaaacctacgagaacgagactaaattggcacttgtcggaaattgggggactaccgggcttacctaccccaagttttcggatgtcaccgggaaaatcaagctgccaaaggatagctttcgaccctcagcaggttggacgtgggctggagattggttcgtgtgtccagaaaagacccttcttcatgacatggatgcgggacatttgtcatttgtcgaggaagtgtttgagaatcagactagacttcccggtggtcagtggatttacatgtccgataactacaccgatgtcaacggagaaaaggttctgcctaaggacgacattgaatgcccactgggatggaaatgggaggacgaagaatggtcaaccgatcttaatagggcagttgatgagcaaggatgggaatactcgattactataccacctgagcggaagccaaaacattgggtccccgcagaaaagatgtactacactcatagaagaagaagatgggtgcgattgcgcagaagagacttgtcgcagatggaagcccttaaacgtcatagacaggccgaagcagagggagagggatgggagtacgcgtcgctctttggatggaaattccatctcgaatatagaaagacggatgcctttcgtcgccgtagatggcgacggcgcatggaaccactggaaaagactggacctgccgctgtctttgctcttgaaggcgcacttggaggtgtcatggacgataagtctgaggattccatgtcggtgtcgactctgtcgttcggggtgaaccgaccaaccatttcttgtattttcgattatggtaaccgataccatctgaggtgctacatgtaccaagcgagggatcttgcagcaatggacaaggattccttctccgatccatacgcaattgtctcctttcttcaccagtcacaaaaaactgtcgtggtgaagaacacccttaatcctacgtgggatcagacgttgatcttttatgaaattgagatatttggcgaacccgcaaccgtcgccgaacagcctccatccattgtggtggaactgtacgaccatgatacctacggtgcggatgaattcatgggacggtgtatatgtcagccatcccttgagcgaatgcctagacttgcatggtttcctcttacgagaggaagccagccatccggagaactcctcgcatccttcgagcttatccaaagagaaaaaccagcgattcaccatattcctggttttgaagtgcaagaaacttcaaggattcttgatgaatcagaagataccgacctcccttacccccctccccaaagggaggcgaacatctatatggtgcctcagaacatcaagcctgctctgcagcggaccgctattgaaatccttgcatggggtcttagaaacatgaagtcctaccagctcgccaacatctcatcgccttccctcgtcgttgaatgcggcgggcagactgtgcaatcctgcgtcatccgcaacctcagaaagaaccccaatttcgacatatgcacgttgtttatggaagtcatgttgcccagagaggagttgtactgtccgcccatcactgtcaaagtgatcgacaatcggcaatttggacggcggcctgtggtgggccagtgcaccattcgatcgcttgagagcttcctgtgtgatccgtacagcgcagaatcaccctcgccccaagggggtcctgacgatgtctcactgctttcacctggtgaggatgtgcttatagacatcgacgacaaagaaccactgattccaattcaagaagaagagttcatcgattggtggtccaagttttttgcgtccatcggtgaaagggagaagtgtggttcgtacctcgaaaaagattttgacacccttaaagtttacgacacccagctggaaaacgtcgaagcgttcgaaggtctttcagatttttgcaacactttcaaactttaccgtggaaagacccaggaagagactgaggatccgagcgtgattggagagtttaaaggcctctttaagatttacccactgccggaggacccggcaattcctatgcctccgcggcaattccatcaactggccgcacagggaccgcaggagtgccttgtgaggatttacattgtgcgtgcattcgggctgcaacctaaggaccccaacggaaagtgcgatccgtacatcaaaatctcaatcggaaaaaagtcagtgtcagatcaggacaattacattccttgcacccttgaaccagtgtttggtaagatgttcgagctgacctgtaccctccctcttgaaaaggatctgaagatcacgctttacgattacgaccttctctcgaaagatgagaagatcggcgaaacggtggtcgacttggaaaatcggttgctttcgaagttcggtgcaagatgcggactcccccagacgtactgtgtgagcggacctaaccagtggagggatcaacttcgaccatcgcagcttcttcacctgttttgccagcagcaccgggtgaaggcacccgtgtaccgcactgatcgagtgatgttccaggacaaggaatacagcatagaagaaattgaggctggcagaattcccaatcctcatctgggacccgtggaagagagactggccctgcatgtgcttcagcagcaagggctcgtgcctgagcatgtggagagccgacccctgtattcacccctgcagccggacattgaacagggcaagttgcagatgtgggtggacctctttccaaaagcactcggacgcccgggaccaccattcaacatcactccaagaagagcgcggcggttttttctcagatgtatcatatggaacaccagagatgttatcctggatgatctgagcctcaccggagagaagatgtcggacatttacgtgaaaggatggatgattggctttgaggagcacaaacaaaagaccgacgtgcactaccgttcccttggaggtgaaggtaacttcaattggcgatttatcttcccttttgactacctccctgccgagcaagtctgtaccattgcaaagaaagacgcattttggaggctggacaagactgaatcgaaaattcccgcaagagtggtgtttcagatctgggataatgataagttcagctttgacgactttctgggctcccttcagcttgatctgaaccgcatgcccaagccagctaagactgcaaaaaagtgttcccttgatcagctcgatgatgcgttccatcccgaatggttcgtgtccctctttgagcaaaagacggttaagggttggtggccttgtgtggcagaagaaggtgaaaagaagatactcgcggggaaacttgagatgactctcgagattgtggccgaaagcgagcacgaggagaggccggcaggacaaggtagagacgagcctaacatgaatcctaagctcgaagatccacgccgaccggatacctcgttcctctggttcacctcgccctacaaaacgatgaagttcatcttgtggagacgttttagatgggccatcattctcttcatcattcttttcatactgctgctgtttctggccattttcatctacgcatttcccaactacgcagctatgaagttggtgaagcctttttca

SEQ ID NO: 48048 - DNA, 6243 bp, Artificial Sequence
  derived and/or modified sequence
atgctctgctgtctgttggtacgcgctagcaatctcccatcagccaagaaggaccgaaggtctgatcccgtagcctctctgacgttcaggggcgtcaagaagcgcactaaagttataaagaattcagtcaatccagtctggaacgaaggatttgaatgggacctgaaaggaatccccctggaccagggctcagaactccatgtggtggtgaaagatcatgaaacgatgggacgaaatcggttcctgggcgaggcaaaggtccctttgcgtgaggtgctagccactccaagtttaagcgcatccttcaacgcacctcttctggacaccaagaaacagcccactggagccagtctcgtccttcaagtgagctacacgccgctgcccggagccgtgcctcttttcccaccacccactccgctggagccgagccccaccctcccggacctggacgtagtcgctgatacaggaggagaagaagatactgaggatcagggcctgaccggggatgaggcggagccgttcctggaccagtctggaggtccaggagcacctaccacaccccgaaagctgcctagtcggccgccccctcactaccccgggattaaacgcaagcgcagcgcccctacctctcggaaattgctgagtgataagccgcaggattttcagatccgagtgcaggtaattgaaggcaggcagcttccaggggttaatattaaacccgtcgtgaaggtcacagcggcgggccagaccaaaagaacccgcatccataagggcaactctccactgttcaatgaaacgctcttttttaatctgttcgacagcccaggtgagctgtttgatgaacctattttcataaccgtggtcgatagtagatctctgcggacagacgccttgctgggcgaatttaggatggacgtcggaaccatctacagagaacctcgccacgcctatcttcgaaaatggcttttattgagcgaccccgacgactttagtgcaggagccagaggctacctcaagacctctctatgcgtgctgggcccaggggatgaggctccgctggagaggaaagacccaagcgaagataaggaagacattgagtctaatctcttgcggccgaccggggtggcactccggggagctcacttctgcttaaaagtctttcgggcagaggaccttccccaaatggacgacgccgtgatggacaacgtgaaacaaatctttggatttgaatctaacaagaagaatttagttgaccctttcgtagaagttagcttcgccggcaaaatgctctgtagcaagatcctggaaaaaaccgccaaccctcagtggaaccagaatatcactctccccgccatgttcccaagcatgtgcgaaaaaatgcgaatacgtatcatcgactgggaccgtttaacccacaacgatattgtggccacgacctacctttcgatgtccaagatttcagcccccggaggggaaattgaagaggaacccgcaggtgctgtaaaaccaagtaaggcatcagacttagatgactacttgggatttttaccaacctttggcccttgctatattaatttatatggatctcctcgggaattcactggtttcccggacccttatacagagctgaatactggcaagggagaaggcgtcgcatatcgcggaagactgctgctgagcttagaaaccaaacttgtggaacattccgaacaaaaagtggaagatcttcccgccgatgacatcctgcgagtggagaagtacctcaggcgacgaaagtatagtctgtttgcagccttttattcggccacaatgctgcaggatgtggacgacgcaatccagttcgaagtgtccatcggaaactacggaaataaatttgatatgacctgtctcccactcgcatcaacgacccagtatagtagggcggtatttgacggctgccactactattatttgccttggggaaatgttaagcctgtggtggtccttagctcttactgggaggatataagtcaccggatcgagacccaaaatcagctgttaggcatcgctgatcggctcgaagctggactcgaacaggtacacctagccctcaaagcccagtgcagcacagaagacgttgattctctcgtggcgcaactgacggatgaacttatcgctgggtgctctcagcctctgggggacatccatgagactccttcagccacgcatcttgaccagtatctttaccagttgcgtactcaccacctctctcaaattaccgaagcagctctggctttaaagctcggacattcggaacttcctgcagccttggagcaggccgaggattggctcctacgattgcgcgcgttggctgaggagccacaaaattctctgcctgacatcgtcatttggatgctgcagggtgataaacgagtggcttaccagcgggtgccagctcatcaagtcttgttcagcaggcgaggggccaactattgtggcaaaaactgtggcaagctgcagactatctttcttaaataccctatggagaaagtgcccggtgctagaatgcctgttcagattcgagtgaaactgtggtttggcctttcggtagacgagaaagagtttaaccagttcgccgagggaaaactgagtgtgtttgccgaaacctacgagaatgagaccaaattggcgttggtgggcaactggggcactaccgggctgacgtatccaaagttcagtgacgtgaccggcaaaatcaagctgccaaaggatagcttcagaccaagcgcaggatggacctgggcaggggattggtttgtgtgtccggagaaaactttgctccacgatatggatgccggccatctatcctttgtcgaagaagtgtttgagaaccaaacaagactgccagggggccagtggatctacatgtccgacaactacactgatgtgaacggagaaaaggtactccccaaagatgatattgagtgcccgctgggatggaaatgggaagacgaggagtggagtacagatctcaacagggccgtcgacgagcaggggtgggagtattccattacaatcccacctgaaagaaaaccgaaacactgggtgcctgcagaaaaaatgtactacactcatcgtcggaggcggtgggtccgtctccggcggcgcgacctgtctcagatggaggcactcaagcgccacaggcaggcggaggcggagggcgaagggtgggaatacgcaagcctgtttggatggaagttccatctggagtataggaaaaccgatgccttccgcagaagacgttggaggcgtagaatggagccattggaaaagacaggccccgccgccgtattcgcattggagggagccttggggggtgtgatggatgataaatccgaggattcaatgagcgtgagtacgctatcttttggggtgaacaggcctacaataagttgtatcttcgactacggaaacaggtaccatttgcgttgttacatgtatcaggctcgagacctggccgcgatggataaagattcttttagtgacccatacgccatcgtcagcttcctgcatcaatctcagaagacagtggtagtgaagaatactctgaacccaacttgggatcaaaccctcatcttctatgaaatagaaattttcggagagcctgcgaccgtcgcagagcagccccctagtatcgtcgtcgagctttatgaccatgacacttatggcgctgatgaatttatgggccggtgtatctgccagccatcgcttgagcgaatgcccaggttggcatggtttccccttacccgtggctcacagcccagcggggagttgctggcctcgtttgagctgattcagcgagagaagccggccatccatcatatccccggttttgaggtgcaagagacatcacgcattctcgacgagtcagaggacaccgacttgccctatccgcccccacagcgggaggctaacatctatatggttccacaaaatatcaagcctgccctacaacgaacagccattgagatcctggcctgggggctacgcaacatgaaatcgtatcaactggcaaacatctccagccccagcttggtggtcgagtgtggggggcaaacagtccagtcttgcgttatccggaacttacggaaaaatcccaacttcgacatttgtacactgttcatggaggtcatgctcccccgcgaagaattgtactgtccgccaattacagttaaagtaatcgacaacaggcagttcggccggcggccagtcgtggggcagtgtacaatccgatcgctggaatccttcctttgtgacccctattcagcagaatcaccatcaccccaaggcggaccagacgacgtgagtcttttatctccgggcgaggatgtgctgatagacatcgacgacaaggagccgctcattcccatccaggaggaggaatttatcgactggtggagtaagttctttgcatctattggcgaaagggagaaatgtggcagctacttagaaaaggactttgatacgctgaaggtttacgacactcaactcgagaatgtggaagcatttgaaggccttagtgatttctgtaataccttcaaactataccgggggaaaacccaagaggagacagaagacccctcagtcataggggaatttaagggcctgttcaaaatatatcccctccctgaagatcccgcgatccccatgcccccacgacaattccaccagctcgcggcacagggacctcaagaatgccttgtccgaatctacatcgtgcgagccttcggactacaacctaaggatcccaatgggaaatgtgacccatacataaagatttccatcggcaagaagagcgtgtccgaccaggacaattacattccctgtacactggaacctgtgttcggtaagatgtttgaattgacctgcacattgccacttgaaaaggacctcaaaattaccctgtacgattacgacctgctgagcaaagatgagaaaatcggtgaaaccgtggttgaccttgaaaataggcttctatcaaagtttggggcccggtgcggtttgcctcagacctattgtgtgtccgggcctaaccagtggcgcgaccagcttaggccatcccagctgctgcatctattttgccaacagcatagagtgaaggccccagtgtacaggaccgaccgagtcatgtttcaggacaaagagtatagtatcgaagaaatcgaggcgggccggatacccaatccccacctcggcccggtcgaggaacgcctggccttgcatgtgctgcagcagcagggcctagtcccggaacacgttgagagccgccctttatactcaccccttcagcccgacattgagcagggcaaattgcagatgtgggtggacctgtttcccaaagcactggggcgaccaggcccaccattcaacattactccaagaagagcacgtcgctttttcctgcggtgtataatctggaatacacgtgatgtgatattagacgacctcagcctgactggtgagaagatgagtgacatctatgtgaagggatggatgattggctttgaggagcacaagcagaaaactgatgtgcactaccggtccctcggcggagaaggaaactttaattggcgttttatttttcccttcgactacctcccggccgaacaagtgtgcacaatcgctaaaaaggacgctttttggagactcgacaagactgagtctaagattccagcaagagtggtgttccaaatctgggacaacgataaattctcttttgacgactttcttggttcattacagttagacctgaatcggatgccaaagccagcaaagaccgcgaagaagtgttccttagatcagcttgatgacgcattccatcctgagtggttcgtgagtctgttcgagcagaagactgtgaaggggtggtggccatgcgtcgcagaggagggtgaaaaaaagattctggccggtaagctggagatgaccctggagatcgtggcggagagtgaacacgaggagcgcccagcaggacagggcagagacgaacccaatatgaatcccaagctggaagacccgcgaagaccagacaccagctttctctggttcacaagtccatacaaaaccatgaagtttatcctatggaggcgttttagatgggctattatcctgtttattattctctttattttactgttatttctagcaatcttcatctacgcatttccgaactatgcagctatgaaactggtgaaacccttctct

SEQ ID NO: 48049 - DNA, 6243 bp, Artificial Sequence
  derived and/or modified sequence
atgttgtgctgcctgcttgttagagcaagcaacctgccatccgcaaaaaaggacagacggtcggaccctgtggcttcattgactttccggggcgtgaaaaaacggactaaggtcattaagaattccgtgaatccggtttggaacgaaggcttcgagtgggatttgaagggaatccccctcgatcagggctctgaactgcacgttgtggttaaggatcacgaaaccatgggaagaaatcggttcctgggagaggccaaggttccactgagagaagtcctggccacaccttctctctctgccagcttcaacgcccctcttttggacaccaaaaagcagcctactggggcctctttggtactccaggtgtcatacacacctctgcctggggctgtgcctctgttcccaccccccactcccctggaacctagccccacattgcccgatctggacgtggtggctgatactggaggagaggaggatactgaggaccagggccttactggcgatgaggccgagcctttcctcgatcaatcgggcggccccggtgcacccaccactcccagaaaactcccttccagaccgccaccccattaccctggcatcaaaaggaagcggtctgcaccaacttcacgcaagctgctgagcgacaaaccccaggacttccaaatccgcgtgcaggtcatagagggcaggcagctccccggtgtcaacatcaagccggttgttaaggtgacggctgccggtcaaacgaaacgcaccagaatccataagggaaactcccctttgtttaacgaaacgcttttcttcaatctgtttgactcacccggtgaactgtttgacgaacccatcttcattactgtggtggatagccgttcattaagaactgacgcgctgctgggagagtttagaatggacgtcggaactatatacagagaaccgcgccacgcctatctgaggaaatggctgctgctttcagatcctgatgatttttcagcaggcgcgcgaggctacctgaagacgtctctctgcgtgctgggcccaggggacgaggctccactcgaacgaaaggatccatccgaggacaaagaggatatcgagtctaacctcctccgacccactggtgtggcactgcggggagcacacttctgcctgaaagtgttccgggctgaagatctcccacagatggacgatgccgtgatggataacgtgaaacagatattcggctttgaatccaataagaaaaatctggtagacccattcgtggaggtgtcctttgcaggaaaaatgctgtgctctaaaatcctggaaaagaccgccaaccctcagtggaaccagaacatcactctccccgctatgtttccaagtatgtgtgaaaagatgcgaatacggattattgactgggaccggctaacgcacaatgacatcgtggctactacatacttgagcatgagtaagattagcgcccccggaggagagatcgaagaggaaccagcaggcgcggtgaaacccagtaaagcctccgatctcgacgattacttagggttcctgccaacgttcggaccctgttatatcaacctctatggtagccccagagagttcacaggcttcccggacccatatacagaattgaacactgggaagggcgaaggagtggcttatagaggaaggcttctcttgtcccttgagacaaagctcgtagaacattctgaacagaaggtggaggatctcccggcggatgacatccttcgcgtggagaagtatctacgaaggcgtaaatacagcctctttgcggcattttactccgcgacaatgctgcaggacgtagatgatgctattcagtttgaagtgtccattggcaactatggcaacaagtttgatatgacgtgtctacctcttgcttccaccacgcaatactcgcgggctgtctttgacggatgccactactactacctgccctggggcaacgtaaaacctgtggttgttctcagttcctattgggaggacattagtcaccgcatcgaaactcagaatcagcttctgggtatcgccgataggctggaggctggcctggaacaggtccacttggcgctgaaagctcagtgtagcacagaagatgttgactctctcgtcgcacagttgactgacgagctgattgctgggtgttcacaaccgttgggtgatatccacgagaccccgtctgctacacacctagaccagtacctgtaccagctgcggacgcatcacctgtcccaaatcaccgaggccgccctggcccttaagttgggtcattcagagctgcctgctgccctggagcaggcggaggattggttgctacgtttgcgggccctggctgaagaaccccagaattctctgcctgacatcgtcatctggatgctgcagggcgacaagagggtggcatatcagcgggttcctgcacatcaggtgctgttttccagaaggggagccaactattgcggtaagaactgcggcaagctgcagactattttcctgaagtacccaatggaaaaagttccaggggctagaatgcccgtgcagattcgggttaagctctggttcggcttatcggtagacgagaaagagtttaatcaattcgcagaggggaagctctccgtcttcgcagaaacttacgaaaacgaaaccaaacttgctctagtggggaactggggcactacaggcctaacataccccaagttctccgacgtgacaggaaagatcaagctccctaaggacagttttaggcccagtgctggttggacatgggctggcgactggttcgtttgccccgagaagacccttcttcacgatatggatgcagggcacctgagcttcgttgaagaggtgtttgaaaaccaaaccagattgccgggcgggcaatggatttacatgtcggacaattacactgatgtcaacggggagaaagttctgcctaaagatgatattgaatgcccactgggatggaaatgggaggacgaagaatggtccaccgatctcaatagagcagtggacgaacagggctgggagtactcgatcacgattcctcctgaacgaaaacccaaacattgggttcccgctgagaaaatgtattatactcaccggcgaaggcgttgggtccggttacggaggagagatctttctcagatggaggccttgaaacgccaccgccaggccgaagccgaaggggaaggttgggaatatgctagcctgtttggctggaagttccacttggagtatcggaagaccgacgcatttaggcggagacgctggcgacgaagaatggaaccgctcgagaaaacagggcctgctgcggtgtttgcactcgagggagcactggggggagttatggacgataaatccgaggattctatgtcagtatctacgttaagcttcggggtgaacagaccgaccatttcctgcattttcgactacggaaaccgctatcatcttcggtgttacatgtatcaggctagggacctggccgcaatggacaaggacagttttagcgacccctacgccatcgtttccttccttcatcagtctcagaaaaccgtagtcgtgaaaaataccctcaacccaacttgggaccagacactgattttttatgagatagaaatttttggagagcctgcgactgtcgctgagcagccaccctctatcgtggtcgaattgtatgatcacgatacctacggggctgacgagtttatggggcggtgtatttgccagccctctctggaacgcatgccaaggctggcttggtttcccctgaccaggggttctcagccttctggcgagctgttagcgtcattcgagctgatccaaagggagaaacccgccatacaccatatccctgggtttgaggtccaggagacaagccgcattttggacgagtccgaagacacggacctcccgtacccccctcctcaacgcgaagccaatatctatatggtcccacagaacattaagcctgccctccaaagaacggccatcgagattctagcttggggattacggaacatgaagtcataccagttggcaaatatctcttctccatcacttgtggtcgagtgcggtggacaaaccgtccagtcatgcgttatcaggaacctacggaaaaatccgaattttgacatttgtaccctttttatggaagtgatgttgccgcgggaagagctgtattgtccccccatcacagtgaaggtgattgataatcgtcagtttggccggcgtcccgtcgtaggtcagtgtaccatccgaagcttggaatcctttctgtgcgacccctactcggcggaaagcccttcaccccagggcgggccggacgacgtctctttactctctcccggggaagatgtactgatcgacatagacgataaggagcccctcatcccaattcaggaggaggagttcattgactggtggtcgaagttctttgcatcaattggagagagagagaaatgcggaagttatctggaaaaagactttgacaccctaaaggtgtacgacacacagctcgagaacgtcgaggccttcgaaggactgtctgatttttgtaacacgttcaaactgtaccgggggaaaacacaggaagagacagaggatcctagcgtcatcggcgagttcaaggggctgttcaaaatctatccgctgcctgaggaccctgctatacctatgccacctcgccagtttcatcaactcgcggcacagggaccccaggaatgcttggtgcgcatctatatcgtgcgagcattcgggctccagcctaaggacccaaatggcaaatgtgacccgtacatcaagatcagtattgggaaaaaatctgtgtctgaccaggataactacatcccttgtactctggagcccgtgttcggcaagatgttcgaactaacttgcactttacccctggagaaagacttgaagatcactctgtacgattacgatcttctgagcaaagatgaaaagatcggggagactgttgtcgatttggagaacagactcctgagcaaattcggagcccgatgcggcctgccacagacctattgtgtatctgggccaaatcagtggagagaccagttgaggccttcccagctcttgcatctgttctgtcagcaacaccgtgtgaaggctcccgtttataggacagaccgtgtgatgtttcaagataaggagtacagtatcgaggaaatcgaggcaggaagaatcccgaatccacatctcggacctgttgaggagcggttggcgttgcatgtccttcagcagcagggtctggtgccagagcatgtagagtcgaggcccctctacagccccttgcagccagatatcgagcagggaaaactccagatgtgggtggacctattccccaaagctctgggcagaccaggcccacctttcaacattaccccgcggagggctaggcgttttttcttgaggtgtatcatctggaacaccagggatgtcattctggatgacctaagtctgaccggggaaaaaatgtctgatatttatgtgaagggatggatgatcggcttcgaggagcacaaacagaagacagatgtgcactacaggtccctgggtggagagggcaattttaattggaggttcatctttccattcgattacttgccagccgaacaggtttgtacaattgccaagaaagacgccttttggcgactggacaaaaccgagagtaagatccctgccagagttgtgtttcagatctgggataatgataaattcagcttcgatgatttcttggggagccttcagctggatctaaaccgtatgccaaaacccgccaagacagcaaagaaatgttcgctggatcaactggatgatgctttccatcccgagtggttcgtgtctctgtttgagcagaagacagttaaaggctggtggccatgtgttgctgaagaaggcgagaagaaaatcctagcgggaaagctcgagatgaccttggaaattgtcgctgaatcagaacatgaagagaggcctgccgggcagggaagggacgagccaaatatgaacccaaagctggaggacccaaggcggccggatacatcctttttgtggtttacgtctccgtataaaacgatgaagttcattttgtggaggcgattcaggtgggctatcatattgttcataatactgtttatcctcttacttttcctggccatcttcatctacgctttcccaaattacgccgcgatgaaactagtaaagccattttcg

SEQ ID NO: 48050 - DNA, 6243 bp, Artificial Sequence
  derived and/or modified sequence
atgctgtgttgccttctggtccgcgcatccaacctgccgagcgcgaagaaggaccgccgcagtgaccctgtggcctcgctcaccttcagaggagtcaagaagcggaccaaggtgatcaagaattccgtgaatccggtgtggaacgagggatttgagtgggacctcaagggaatcccccttgaccaaggatcagagctgcatgtcgtcgtgaaagaccatgaaaccatgggccggaacagattcctgggggaggctaaggtgccgctcagggaggtcctggctaccccatcgctgagcgccagctttaacgcgccgctcctggacacgaagaagcagccaactggtgcatccctggtgctccaagtttcatatactccgctgcctggggcagtgcccctgttcccaccgcccactccactggagccgtcacccaccctcccagacctggatgtggtcgccgacactggtggagaggaagatactgaagatcaagggttgaccggagatgaagcggagcccttccttgaccaaagcggaggaccgggagcgccgaccaccccaaggaagttgccatctcggcctcctccgcattacccgggtataaagcggaaacgctctgcgcctacttcgcggaaacttctctcggacaagccgcaagatttccagatccgggtgcaagtgatcgagggacggcaactcccaggagtcaacatcaagccggtcgtcaaggtgactgcagcgggtcaaaccaagcggacccggatacacaagggaaactcgcccctctttaacgagacgctgttctttaacctcttcgactcccccggagaactgtttgacgaaccgatcttcatcaccgtcgttgattcacgctcgctccgcaccgacgccctgctcggagaattccggatggatgtgggcactatctaccgggaaccccgccacgcatacctgcggaagtggctcctcctgtccgaccctgatgacttctccgccggtgcaagaggatatctcaaaacctccctctgcgtcctcggcccaggagatgaagcacctttggaacgcaaggatccgagcgaggacaaagaagatattgagtcgaacctgcttcggccgaccggagtggctttgagaggagcacatttctgcttgaaggtgttccgcgccgaggacctcccacagatggacgacgccgttatggacaatgtcaagcaaatctttggcttcgaaagcaacaagaagaatctggtggacccgtttgtcgaagtcagcttcgcgggcaagatgctgtgctcgaaaatcctggaaaagactgcgaacccacagtggaatcagaacatcacccttccggcaatgtttccctccatgtgtgagaagatgcgaatcagaattatcgattgggatcgcctcactcataacgacatcgtcgcaaccacctacttgtcgatgtccaagatctcggccccgggaggggaaatcgaggaagagccggccggcgcagtgaaaccgtcgaaggcgtccgacctggatgactacctgggatttctgccaaccttcggaccgtgctacattaacctctacggatcgccaagggaatttacgggattcccggacccttatacggagctcaacaccggaaaaggcgaaggggtggcctaccgcggacggctgctgttgtccctggaaaccaaactcgtcgagcacagcgagcaaaaagtggaagatctgccagcggacgatattctgagggtggagaagtacctgcgccgccggaagtactctctgtttgctgcgttctactcagccactatgctccaggacgtggatgacgctatccaattcgaagtgtcgattggaaactatgggaacaagttcgacatgacttgcctgccactggcgtccaccacccagtacagccgcgctgtttttgacggatgccactactactaccttccttggggcaacgtgaagccggtcgtggtgctgagcagctactgggaggacatttcacaccgcatcgagactcagaaccagctgttggggatcgcagatcgactggaggccgggctggagcaagtgcacctggccttgaaagctcagtgctccaccgaggacgtggacagcctggtggcccaactcactgatgaacttattgctggatgctcgcaaccgcttggagacatccacgagactccctccgccacccaccttgatcagtatctgtaccagcttagaacgcaccacctgtcccaaattacggaagcggcactcgccctcaaactgggacacagcgaactcccagcggcgctggagcaggctgaagattggctcctgagattgcgggccctcgcagaggaacctcagaactccctgccggacattgtgatctggatgctccagggcgacaagcgcgtggcctaccagcgggttccggcacaccaagtgctgttttcacgccgcggtgccaactattgcggcaagaattgtggtaagctccagaccattttcctcaagtacccgatggaaaaggtcccgggagcccggatgccagtgcaaatcagggtgaagctgtggttcggcctgtcagtggacgaaaaggaattcaatcagtttgccgagggaaagctgtcggtgttcgccgagacttacgagaacgaaaccaaacttgcgctggtggggaattggggcacgacgggattgacctacccgaagttctctgacgtgaccggtaagatcaagctgccgaaggactccttccgcccttcggcgggttggacttgggccggcgattggttcgtctgcccggaaaagactctgctccatgatatggatgcgggacacctgagctttgtggaggaggtgttcgagaaccagactcgtttgcctggagggcaatggatttacatgtcagacaactatacggatgtcaacggcgaaaaagtgctgcctaaagatgatattgaatgcccactgggctggaagtgggaggacgaggaatggtcgactgatttgaaccgggcggtggacgaacaaggctgggagtactcaatcaccattccacccgagcggaaacctaaacattgggtgccggccgagaagatgtactacacccaccgccgacgccgctgggtcaggctgaggcgccgcgacctttcccagatggaggccctgaaaaggcacagacaagccgaagctgaaggggaagggtgggaatacgcctcgctttttggctggaagttccacctggaataccgcaagacggatgccttcagacgaagaagatggcggcggaggatggaaccacttgaaaagaccggtccagctgcagtgttcgccttggaaggcgccctcggaggagtcatggacgacaagagcgaggactcaatgtcggtgtcgaccctcagcttcggagtcaatcggccgacgatcagctgcatcttcgactacggaaatcgctaccacctcagatgctacatgtaccaggcgcgcgatctggcggccatggacaaagattctttttcagacccgtacgccatcgtgtcctttctgcatcagagccaaaagaccgtggttgtgaagaacacgctgaatcctacctgggatcaaaccctcatcttctatgaaattgagatcttcggcgagcccgctaccgtggcagagcaaccgccatccatcgtggtggaactctacgatcatgatacctacggggcggacgagtttatgggccgctgcatctgtcagccaagcctcgagcgcatgccgcggctggcttggttcccgctgactcgcggatcacaaccaagcggagagcttttggcgtcatttgaactgatccaaagggaaaagcccgccatccaccatatccctggattcgaagtccaggagacgtcacggatccttgacgagtctgaggacacggacctgccgtacccgcccccgcaaagagaggcgaacatctacatggttccgcagaatatcaagccagcccttcagcggactgcgatagaaatcttggcctgggggctgcggaatatgaaatcctatcaactggctaacatctcgtcaccgtcgcttgtcgtcgagtgtggaggtcaaactgtgcagtcgtgcgtgatccgaaaccttaggaagaatccgaatttcgatatctgcactctgttcatggaagtgatgctgccgcgcgaagaactgtactgcccgccgatcaccgtcaaggtgatcgacaaccggcagtttggaaggcggccggtggttggacagtgcactatccggagcctggaatctttcctgtgtgatccgtattcggcggaatcgccctcgccacagggaggtccggatgatgtgtcacttctcagcccgggagaggatgtgctgatcgacatcgacgacaaggagcctcttatcccaatccaggaagaagagttcatcgactggtggtccaagtttttcgcgtctattggagagcgagaaaagtgtggctcatacctcgagaaggacttcgataccttgaaggtgtacgacactcaattggaaaacgtggaggccttcgagggactctccgatttttgcaacacctttaagctgtatcgcggaaagactcaagaagagactgaagatccctccgtgatcggcgagtttaaggggctcttcaagatttatccgctgcctgaagatccggccatcccgatgccaccacgtcagttccatcagcttgccgcccaagggccacaggagtgcctggtgcgaatctacatcgtgcgggcattcggcctgcagccgaaggatccgaatggaaagtgtgacccttacatcaagatctctatcgggaagaaatcggtgtcggaccaggacaactacatcccgtgcactcttgaaccggtgtttgggaaaatgtttgaacttacttgcaccctgccactcgaaaaggatctcaagatcactctgtacgactacgatttgctgtcaaaagacgaaaagatcggagagactgtggtcgaccttgagaaccggctgctctcgaagtttggagcacgctgcggactcccgcaaacttactgcgtctcagggccgaaccagtggcgggatcagctccggccttcccaattgctccaccttttctgccagcagcatcgagtgaaggcgccggtgtaccgtaccgatcgggtgatgttccaggataaggaatactccattgaggagattgaagccgggaggatccctaacccgcacctcggacctgtcgaggagcggctcgctctgcatgtcctccagcaacagggactggtgccagagcatgtggaatcgaggccgctttactccccactccagccggatatcgagcagggcaagctccagatgtgggtggacttgttcccgaaagcgttgggacgtccgggccccccgttcaacataaccccccgcagagcacggaggttctttctgcgctgcatcatctggaacacgcgggatgtgatcctggatgatctgtccctgaccggagaaaagatgtccgatatctacgtgaaaggatggatgatcggattcgaagaacacaaacaaaagaccgacgtccattacagatccctggggggcgagggaaactttaactggagattcatctttcccttcgactacctccccgccgaacaggtgtgtactatcgcaaagaaggatgctttctggcgcctcgataagactgagtcaaaaatcccggcacgcgtggtgttccagatctgggataacgacaaattctcctttgacgacttcctgggcagcctgcaactcgatctgaaccggatgccaaagcccgccaaaactgccaagaagtgcagcctggaccagctggacgatgctttccacccagagtggtttgtgtcgctgttcgagcaaaaaaccgtcaagggatggtggccctgtgttgccgaggagggcgaaaagaaaatcctggctggcaagctcgagatgaccctcgagatcgtcgcagaaagcgagcacgaagaacgcccggcaggccagggacgggacgagccgaacatgaatccaaaactcgaggacccgaggaggcccgacaccagctttctgtggttcactagcccatacaagaccatgaagttcatcctgtggcgcagattccggtgggccatcattctcttcatcatcctgttcatcctgctgctctttcttgccatcttcatttacgccttcccgaattacgccgcgatgaagctcgtgaagcctttttcc

SEQ ID NO: 48051 - DNA, 6243 bp, Artificial Sequence
  derived and/or modified sequence
atgctctgttgtcttctcgttcgagcttcgaacctgcccagtgctaaaaaagacaggcgatccgaccccgtggcgagcctgaccttcaggggtgtaaagaagaggaccaaggtgatcaaaaatagcgtgaatcctgtttggaacgaaggtttcgagtgggatttgaaaggaattcctcttgaccagggaagcgagttacacgtggtggtcaaagatcacgagaccatgggtaggaacaggtttttgggcgaggctaaggtgccacttcgggaggtactggcaactccatcactgtccgcctcttttaacgcccccttgcttgacaccaagaaacagccaacaggtgcttcactggtgctccaggtgtcctataccccgctaccaggggccgttcctctgttcccgcctcctacccccttggagccctcacccaccctccccgatttggatgttgtggctgatacggggggggaggaagacactgaggatcaggggctcacaggagatgaggccgagccattcctggatcagtctggcggtcctggtgcccctaccactccccgaaagctgccatctaggcctcctccgcactatcctgggataaagaggaaacgctccgccccaacttctaggaagttattgtccgacaagccccaagatttccagatcagggtccaggtgatcgaagggagacagttaccgggggtgaatataaaacccgtggtcaaagtgaccgccgcggggcaaaccaagaggacacggatccataagggtaattcgccattgttcaatgaaacactattcttcaatcttttcgacagccccggcgaactgtttgatgagcccatctttatcaccgtggtagactcccggtcactcaggacagacgccttgcttggcgagtttaggatggacgtgggaacaatttaccgcgagccacgccatgcttatctgcggaaatggctactcctttctgatccagacgattttagcgctggggctaggggctacctcaagacatcgttgtgtgtgctgggtcccggcgatgaagcacctttagaaaggaaagatccttccgaggataaggaggacatcgagtccaacctcctgcgccctacaggagtggcactgcggggagcccacttttgcctaaaggtatttagagccgaagatctgccccaaatggacgatgctgtgatggacaatgtcaaacagattttcggattcgaatccaataaaaagaacctggtcgatccttttgtggaagtctcatttgccggaaaaatgttgtgcagcaagatcctggaaaagaccgcaaacccccagtggaatcagaacatcaccctgccagcgatgttccccagtatgtgtgaaaagatgcggataagaatcatcgactgggatcgcctgacgcacaatgacatagtagccactacatatctgtcgatgtccaagataagtgccccggggggggaaatcgaggaagaacccgcaggtgccgtgaagccatctaaggcatcagacctggatgattacctaggttttcttcctacatttgggccttgttatatcaacctgtacggaagcccacgtgagtttactggatttccggatccgtacacagagctgaatacaggcaagggtgagggggtcgcttaccggggcagattgctcctgagcttggaaaccaagctggtggaacacagtgaacagaaagtggaggacctgccggctgacgacatcctgagggtggagaaatacctgagacggaggaagtatagcctgttcgccgctttttattctgcaacaatgctccaggacgtggacgatgctatccagttcgaggtgagtattgggaactacggaaacaaatttgatatgacctgcctaccactggcgagcaccacccagtactctagggccgtctttgatggctgccactactattatctgccatgggggaatgtgaaacccgttgtagttcttagttcctattgggaggatatctcccataggatcgagactcaaaatcagctgctgggaattgccgatcgcctcgaagcgggcctggaacaggttcacctagcactcaaggcccaatgttcaaccgaggatgtagatagtctggttgctcagttgacggacgaattgatcgccggatgtagccagcctctcggagacatccatgagaccccttccgccacgcatcttgaccaatatctctaccagctccgaactcaccatttatcccagatcaccgaagcggcactggccctcaagctgggacactctgaactacctgcggcccttgagcaagcagaagactggctgttacggctgcgagccctcgctgaagaacctcaaaattccctgcccgatatcgttatatggatgctgcagggggataagagagtagcataccagagagtccctgcacaccaggtgttattctctagacgaggtgcaaattactgtggcaaaaattgtggcaaattgcagactatcttcctgaaataccccatggagaaagtccccggagccagaatgccagtgcagatccgcgttaagctgtggtttggactgtcggtggatgagaaagagtttaatcagttcgccgaggggaaactgtctgtctttgcagaaacttacgagaatgagactaagctggctctcgtgggcaactggggcacgacgggtttaacctaccctaagttcagcgacgtgacaggaaagattaagctacccaaggattccttcagaccctcagctgggtggacctgggctggggactggtttgtgtgtcctgagaagacgctattgcatgatatggatgctggccacctttcatttgtggaggaggtctttgagaatcagactcgcttacccggaggtcaatggatctacatgtctgataactacaccgatgttaacggggagaaggtactgcccaaggatgatatagagtgccctcttggctggaagtgggaggacgaggagtggtctaccgacctgaatcgcgcagtggatgaacaaggttgggagtactcaatcacgatccctcctgaaagaaaacctaaacactgggtacccgctgagaaaatgtactacacacatagacggcgaagatgggtacggttgcgacgacgtgacctctctcagatggaggctttgaaacgtcaccggcaggccgaggcagagggtgaggggtgggaatatgcttctttgttcggttggaagttccacctggagtatcgaaagacggacgcattcagacgtaggcgatggagaagaagaatggaaccgttggagaagacggggccagctgcggtctttgcacttgaaggggctctcggtggtgtgatggacgacaaaagtgaggattccatgagcgtgagcacactatcatttggagtcaatcgacctaccattagctgtatctttgattacggaaaccgctatcatctgcgctgttacatgtaccaggcgcgggacctagcggccatggacaaagattccttctcagacccttacgcgatcgtatcttttttgcatcagtcccagaaaactgtggtggtaaagaatactctcaatcccacttgggatcagaccctcatcttctatgaaatcgagatttttggcgagccagccacagtggccgaacagccaccaagcatagtggtcgaactgtacgatcacgacacatacggcgctgacgaattcatgggtagatgtatctgccagccaagcttagagaggatgcctaggctggcctggtttccactgacgcgaggctctcaaccatctggggaactgctcgcctcttttgaattgattcagagggagaagcctgcaattcatcatatcccagggtttgaggttcaggaaacatctagaattctggacgaaagtgaagacacggatttgccttaccctccaccacagagagaggcaaacatatacatggttccccagaacattaagcccgctttgcagcggaccgctatagaaatacttgcatggggactgcggaacatgaaatcttatcagctcgccaatatcagctcaccaagtttggtagtggagtgcggcggccagaccgtacagagttgtgtcattagaaacctccgaaaaaatcccaattttgatatctgcactctcttcatggaggtgatgctgcccagagaggagctgtactgcccacctattacggtaaaggttatcgataataggcagtttggaaggcggcctgttgtcgggcaatgcaccatcaggtcgctggaatctttcctctgtgacccctacagcgccgagtcaccaagcccccagggtggacctgacgacgtctccctgctgagccccggcgaagatgtattgatcgatatagacgacaaggagcctttgatccccatacaggaagaggaattcatcgactggtggtctaagtttttcgctagcatcggagaaagggaaaagtgcgggtcatatctggagaaggatttcgacacccttaaggtctacgatactcagctagagaacgtcgaagctttcgagggactgtctgacttctgtaatacgtttaaactatacaggggaaagactcaagaggagacagaagacccctcggtcatcggagaattcaaaggactgtttaaaatttaccctcttcccgaggatccagcaatcccaatgccccccagacagttccaccagctcgcggcccagggaccacaggagtgtctcgtgcgcatctatattgtgcgcgcgttcggacttcagccgaaggatccaaatggaaaatgtgacccctatatcaaaatcagcatcgggaaaaaaagcgtaagtgaccaggataattatatcccctgtacgctggaaccagtgttcgggaaaatgttcgagctgacatgcacgctccccctcgaaaaggatttgaagattactctttacgactacgaccttttatctaaagatgagaagatcggggagaccgtggtggatttggaaaatcggctcctgagtaagtttggggcccgctgcgggttaccgcagacctattgcgtctccgggcctaaccagtggagagaccaattaagacccagtcagttgttgcacctcttctgtcagcagcaccgagttaaagcccccgtctacagaaccgatagggtgatgttccaggacaaggaatacagtattgaagagatcgaggctggtcggatccctaatccccacctcggtcccgttgaggagagattggcccttcatgtgctgcaacagcaggggctggtgcccgagcacgtagagagtcgtcccctgtactccccactccagcccgatatcgagcagggtaaattgcagatgtgggtggatttattccctaaggccctaggaagaccagggcccccgtttaacatcacgcccaggagggctcgacggttctttctacgctgtattatatggaatacacgagacgtgatactggacgatctgtctctgaccggcgagaagatgagtgacatctatgtgaaaggttggatgatcggtttcgaggagcacaagcagaagaccgacgtccactaccgcagcttagggggcgaggggaacttcaattggagattcattttcccattcgattacctgcctgcagagcaagtgtgcacaatcgccaagaaagatgctttctggcggctggataagaccgaaagtaagattccagcaagagtcgtcttccaaatatgggataacgacaaattttccttcgatgatttccttggcagtctgcaactagaccttaaccgaatgcctaagcctgccaaaacagccaagaagtgttctctggatcaactggatgatgcattccaccctgagtggttcgtttccttgttcgaacagaagaccgttaagggctggtggccatgcgttgccgaagagggcgagaaaaaaattcttgccgggaaactggaaatgacattggaaattgttgccgagtcagaacacgaggagcgaccggcgggccagggccgcgacgagcctaatatgaatccaaaactggaagatccacgcaggccagatactagtttcctatggttcactagcccgtacaagactatgaagttcatcctgtggcggaggttccgatgggccattatcctttttatcatcttgttcatactcttattatttctcgccatctttatctatgctttccccaattacgccgcaatgaagttggtgaagcctttctca

SEQ ID NO: 48052 - DNA, 6243 bp, Artificial Sequence
  derived and/or modified sequence
atgctttgctgtctgctggttagagcctccaacctgccttccgcaaaaaaggataggcgttccgacccagtggctagcctgactttcagaggcgtgaagaaaagaactaaggtgattaagaactcggtgaatcctgtctggaatgaaggattcgaatgggatctcaagggtatccctctcgatcaaggctcggagctccacgtggttgtgaaagatcatgaaaccatgggaaggaaccgcttccttggtgaagccaaggttccgcttcgagaggtcctcgccactccctcgctcagcgcatcattcaacgccccgctgcttgatactaaaaagcagcctacgggggcctctctcgtcctgcaagtgtcatacacccctctgcctggcgcggtccctctttttcctccccctactcctctggaaccatccccaaccctccccgatctggatgtggtcgcagacaccggcggagaagaagatacggaagatcaaggcctcactggtgacgaagcggagccattcctggatcaatccggtgggccaggagcaccaaccaccccccgcaaattgccatcgcgaccgccgcctcactatccaggaatcaagcggaaaagatccgcacctacttcgcggaagctgctgagcgataaaccccaggatttccagattagagtgcaagtgatagagggtcgccagctccctggtgttaacatcaaaccagtcgtgaaggtcaccgctgcaggtcaaaccaagaggaccagaatacataagggaaactctccacttttcaatgaaaccctgttcttcaacctttttgattccccaggcgaactgttcgatgaaccaatctttatcacggtggtcgattcgcgttcgcttcgaacggatgcgctgcttggcgaattcagaatggacgtcggtactatataccgggagccacgccatgcatacctcaggaagtggctgttgcttagcgacccggacgacttttctgcaggtgcacgaggatatcttaagacttcgctttgcgtgctgggaccaggtgatgaagcacctcttgaacggaaagatccatcagaagataaggaggacatcgagagcaacctgctgcggcccactggagtggcacttcgtggcgcacacttctgcctgaaggtgttcagagcagaggacctccctcagatggatgacgccgtcatggacaatgtcaagcagatctttggatttgaatcaaataagaagaaccttgtcgatccgttcgtggaagtctcgtttgcagggaagatgctttgtagcaagattcttgaaaagaccgcgaatccccagtggaatcaaaacatcaccctgcctgccatgttcccctctatgtgtgagaaaatgcgaattcggatcatcgactgggaccgccttactcataacgacattgttgcaaccacttacttgtcgatgtccaagatctcggcacccggtggagaaattgaagaggaacctgccggagcggtgaaaccatcaaaggcgtccgacctcgatgattacctgggatttcttccaacgtttggtccttgctacatcaatttgtacggcagccctcgtgaattcaccggctttccagatccttacactgaacttaacacgggaaagggagaaggagtggcctaccgcgggcgactgctgctgtcgctggaaactaagctggtcgaacattcagagcagaaggtggaggatctccctgctgacgatatccttagagtggagaagtacctcaggcgccgtaagtacagcttgtttgcagccttctatagcgccaccatgctccaggatgtggacgacgccatccagtttgaggtgtcgattggtaactacggaaataagtttgacatgacctgccttccactcgcatcgactacccagtattcccgcgccgtgtttgatggatgtcattactactatctcccgtgggggaacgtgaagccagtggtcgtcctcagttcatactgggaagatatttcccatagaatagaaacccagaatcaacttctcggaatcgcagaccggctggaggcaggtctggaacaagttcatcttgcactcaaggcacagtgctcgacggaagatgtggattcactcgtggcacagcttaccgacgagctgatcgcaggatgtagccagcctctgggagacattcacgaaacgccctcagccacccatcttgaccagtacctctaccaactgaggacccatcacctttcgcaaattaccgaagcagcacttgctctcaaactcggccactccgaactgccagcagcactggagcaggcagaggattggcttttgcggcttagagccctcgccgaagaaccccaaaactcgctccccgacattgtcatttggatgctgcaaggggacaaacgggtcgcataccagcgggtgcccgcccatcaagtgttgttttcacggcggggagccaactactgtggtaaaaactgcggaaagctgcagacgattttcctgaagtaccctatggaaaaagtgcctggggcccgcatgccagtgcaaattcgagtgaaactttggtttggactttccgtcgatgaaaaggagtttaaccagtttgccgaaggaaagctctcagtgtttgcagaaacctacgaaaatgaaacgaagttggcactggtgggtaattggggcacgaccggtcttacgtatccaaagttttcagacgtgactggtaagattaagctcccgaaagatagctttaggccgagtgcaggatggacgtgggcaggggactggtttgtgtgtcctgaaaaaaccctccttcatgatatggacgcaggccacttgagttttgtggaagaagtgttcgagaaccaaactagacttccaggcggacagtggatttacatgtcggataactacaccgatgtcaacggcgaaaaagtgctccccaaggatgacattgagtgccctctgggatggaagtgggaggacgaggagtggtccaccgatctcaatagggcagtcgacgaacaggggtgggaatactcgattacgattccgccagaacgaaagcctaagcactgggtgccagccgaaaagatgtactatactcatcgtaggagaaggtgggtgagactcagacgacgggatcttagccagatggaagcgctgaaacgccatagacaagcagaggctgagggagagggatgggaatacgcgtcacttttcggatggaagtttcatctggaataccgcaagaccgatgcattcagacgcaggcgctggagacgccggatggaaccacttgaaaagactggtccggccgcggtattcgccctggaaggcgcgctggggggcgtgatggacgataagagtgaggattccatgtccgtctctacccttagctttggggtgaaccgtcctactatcagctgcatatttgactacggaaatcgataccatctgcgctgttacatgtaccaagcacgcgacctcgctgccatggataaggactcattctcggacccgtacgcgattgtgtcgtttttgcatcaatcacagaaaaccgttgtggttaagaataccttgaacccgacttgggatcaaactcttatcttctacgagatagagatcttcggagagccagcaactgtggctgaacaacctcctagcattgtggtggaattgtacgatcacgacacttacggggcagatgagttcatgggtcgctgtatctgccaacctagcctggaacggatgcctcgactggcatggttcccgctcacccgcgggagccaaccttcaggagagcttctggcgtcctttgaactgattcaacgtgagaagcccgcaattcatcatatccccgggtttgaggtccaagagactagtcggatcttggatgagtcggaggacaccgatcttccataccccccaccccagagggaggcaaacatttacatggtcccacaaaacattaagcctgcgctccaaagaactgccatagagatccttgcgtgggggctgaggaatatgaaatcgtaccagcttgccaatatctcttccccttccctggtcgtggagtgcggcggacagaccgtccagtcctgtgtgattagaaacctgcggaagaaccctaactttgatatctgtactctgtttatggaggtgatgctgcctagggaagagctttactgtcctccaattaccgtgaaggtgattgacaacagacaatttggtaggcgccccgtggtcggacaatgtactatccgatcgctcgagtcgttcctctgcgatccctacagcgcagaatcgccgtccccgcaaggaggccccgacgacgtgtcgcttctgtcgcctggtgaggatgttcttattgacatagatgataaagaacccctgatcccgattcaagaagaggaattcatcgattggtggtcgaagttctttgcttccattggggaacgagaaaaatgtggttcatacctcgaaaaggatttcgatactctgaaagtctacgatactcaactggaaaatgtggaggcctttgaaggcctgtccgatttttgcaacacgtttaaactgtaccgcggcaagactcaggaagagactgaggacccttcggtgatcggagagtttaagggtctgttcaagatctacccccttccagaagatccagccattccgatgccacctagacagttccatcaattggcggcacaagggcctcaggaatgtctggtaagaatctacatcgtccgcgcgttcggactgcagcctaaagacccgaatgggaagtgcgatccatacatcaaaatctccattggaaagaaatccgtgtccgaccaggataactacatcccttgtacccttgagccggtgtttggaaaaatgtttgagctcacttgtaccctcccactggagaaggatctgaagattaccctttatgattacgatttgctctccaaggacgaaaagattggagaaactgtcgtggatctcgaaaatagactgctgtccaagtttggggcaagatgtggccttccccagacttactgtgtgtcaggtcccaatcaatggcgcgatcaactgcggccatctcagctgctgcacctgttttgccagcaacaccgtgtgaaggcgcctgtgtacaggactgaccgcgtgatgtttcaagataaggaatactccatcgaagagatcgaagcaggacgcatcccaaaccctcatctgggtcccgtcgaagaaagactggcactgcacgtgctccagcaacaaggactggtgcccgaacatgtggaatccagacccctctacagccccctgcagccagacatcgaacaaggcaaactgcagatgtgggtcgacctctttcctaaggcacttggtcgcccgggccctccatttaacattacccccagacgtgcgcgccgctttttcctccgttgcatcatatggaacacccgggatgtgatattggatgatctgtcccttacgggggagaaaatgtcggatatctacgtgaaggggtggatgattggatttgaggaacacaagcaaaaaactgatgtgcactacagatctcttggaggggaaggaaactttaactggagattcatttttccttttgattatctgcctgccgaacaagtgtgtactattgcgaagaaggatgccttttggagactcgacaaaactgagtcgaagattcccgcgagggtcgtgttccagatctgggataacgataagttcagctttgacgatttcctgggatcgctgcagcttgaccttaatcgaatgcccaaaccagcaaagaccgctaagaagtgtagcctcgatcaactggatgatgcttttcaccccgagtggtttgtgtccctttttgagcaaaaaaccgtgaagggttggtggccatgtgtggcagaggagggcgagaagaagattctggcgggaaagctggaaatgaccctcgagatcgtggcagagtcggaacatgaggaaaggcccgccggtcagggaagagatgagccaaacatgaaccccaaactggaagatcccaggcgcccagatacctcgtttttgtggtttacgtcaccttacaagacgatgaagtttattctttggaggagatttcgctgggcgatcatcctctttatcatcctgtttattcttctcctttttctggcgatcttcatctatgcatttcctaattacgcagccatgaagctggtgaagcccttttca

SEQ ID NO: 48053 - DNA, 6243 bp, Artificial Sequence
  derived and/or modified sequence
atgctttgttgtctgcttgtgcgtgcaagcaacctcccatcagcaaagaaagatcgaagatcagatcccgtcgcatcactgaccttcagaggggttaagaagcgcactaaggtgatcaaaaacagcgtgaatcctgtgtggaatgaagggttcgagtgggatttgaagggcattccgcttgaccaaggatccgaactgcatgtggtggtgaaggatcatgaaaccatggggcgcaaccggttccttggtgaggcaaaggtcccgttgagggaagtgctcgccaccccttccctctcggcgagctttaacgcccctcttcttgacactaagaagcagcctaccggtgcatcactggtgctgcaggtcagttacaccccccttcctggcgcggtcccactgttcccaccacctacccctcttgaaccgtcgccgacgctccccgatctcgacgtcgtcgcggataccggcggtgaagaggacaccgaggatcagggattgaccggagacgaagctgaacctttcctggatcaaagcggaggaccaggtgcacctaccaccccaagaaagttgccttcgaggccacctccacattaccctggcattaagaggaagcgttcggcgccaacgtcccggaagctgctgtctgataagccacaagatttccaaattagagtgcaagtgattgaggggaggcagctgccaggcgtgaacatcaaacccgtcgtgaaggtcaccgcagcaggacagactaagaggactcggattcataagggcaactctcctcttttcaacgaaaccctgttcttcaacctctttgactcccctggcgaactgttcgacgaaccaatctttatcactgtggtggattcaaggtcgctccgcaccgatgctctgctgggtgaatttcgaatggatgttggaacgatttaccgcgaaccgaggcatgcatacctccgaaagtggttgcttttgagcgatcctgatgacttttctgcaggtgctaggggttaccttaagacttcactctgcgtgctgggccctggagatgaagcaccactggagcgtaaggatccatcggaagataaggaagatattgaatcgaacctgctcagaccgaccggagtggcactgcggggggcacatttttgtttgaaagtctttcgggccgaggacctgccgcagatggatgatgccgtgatggacaacgtgaagcagattttcggttttgagtctaataagaagaacctggtggacccatttgtcgaggtgtcgtttgcgggtaagatgctgtgttcgaaaattctggaaaaaaccgccaacccacaatggaaccagaacattactctcccggcaatgttcccttcgatgtgcgaaaagatgcgaatccgcataatcgattgggatcggctgactcataatgacatcgtcgcaactacgtacctgtcgatgtcgaagatttccgcaccagggggagaaattgaagaagagccagccggcgccgtgaagccatcaaaagcctcagacctggacgattaccttggattcctgcctacctttggcccttgttacattaatctttacggatcccccagagaatttaccggatttccggatccttacaccgaactgaataccggaaagggagaaggagttgcgtacaggggtaggcttcttctgtcactggaaaccaagctcgtggaacatagcgaacaaaaggtggaagatctgccggccgatgatattctgcgagtcgagaagtaccttagacgccggaaatactcactcttcgcagcattttacagcgcaactatgctgcaagatgtggatgatgcaatccagtttgaggtgtccatcggaaactacggcaacaagttcgacatgacctgtctgcctctggcaagcaccacgcagtacagcagggcggtgtttgacggatgtcattactactacctgccatggggcaatgtgaagccagtcgtggtgctcagctcctactgggaagatatttcacatcggattgagacgcaaaaccagctgctcgggattgcagatagactggaagctggactggaacaagtgcacctcgcactgaaggctcaatgctcgaccgaggatgtcgatagcttggtggcacagcttactgacgagctgattgcaggatgttcccagccactgggtgatattcacgaaaccccttccgcaacgcatctggaccaatatctttaccaactccggactcatcacttgtcgcaaatcacggaagccgcactggcactgaagttgggtcattcggagcttcccgcagctctggaacaagccgaggactggcttcttcgcctgcgcgcacttgccgaagagccccaaaactcgctgcctgatattgtgatttggatgcttcagggagataaacgcgtggcgtaccagagggtgcctgcacatcaagtgcttttctcccgacgaggtgcaaactactgtggtaagaattgtggcaaacttcagaccatctttctgaagtacccaatggagaaagtgccaggcgcacgcatgcccgtgcagattagagtgaagctctggtttgggctgtccgtggatgaaaaggagttcaatcagtttgcagagggaaagctgagcgtgtttgccgaaacctacgagaacgagacgaaactggcccttgtggggaactggggtactactggactgacttaccctaagttttcggacgtgactggtaagataaagttgcctaaggattcatttcggcccagcgcagggtggacttgggcaggtgactggtttgtgtgtcccgaaaaaaccttgctccacgacatggatgccgggcaccttagctttgtggaggaagtctttgaaaaccagaccagactgcctgggggacagtggatttacatgagcgacaactataccgacgtgaatggcgaaaaggtgctgccaaaggatgatatcgaatgtccactgggttggaagtgggaggacgaagagtggagcaccgacctgaatagagccgtcgacgagcaaggatgggagtactcgataactattccgccagaacgaaagcctaaacactgggtgccagcagaaaagatgtactacacccatcgtcgccgtagatgggtccgcctgcgccggagagatctgtcccaaatggaagcactcaagcgccataggcaagcagaagcagaaggcgaaggctgggaatacgccagccttttcggttggaagtttcacctcgaatacaggaaaaccgatgcgtttagaagaaggcgttggaggagacgtatggaacctttggagaaaactggacctgctgcagtgttcgcactcgaaggtgcgctgggcggggtcatggatgataagtcggaggatagcatgtcagtctccaccctgtcgtttggtgtgaatagacccaccatttcatgtatattcgactacggaaaccgttatcatctgcggtgctacatgtaccaggccagagatcttgcggccatggataaagactcgttctccgacccctacgcaattgtgtcgtttctgcatcagtcccaaaagaccgtggtggtcaagaacacccttaatccaacctgggaccagactctgatcttttacgaaatcgagatttttggtgaacccgccactgtggccgaacaacctcctagcatcgtcgtcgaactttacgatcatgatacttacggggcagacgagtttatggggagatgtatttgccaaccaagcctcgaacgaatgcctagacttgcctggtttcctctcacccggggatcacaaccttccggcgagttgctcgcgtcctttgaactcatccaaagagaaaagccagctatccaccatattccagggtttgaggtccaagagacgtctcgaattttggatgagagtgaagatactgatctgccatatcctcctccccaaagagaggccaacatttacatggtcccacagaacattaagccagcactgcagagaaccgccatcgagattctggcttggggccttcgtaacatgaagtcatatcaactggccaacattagctcgcctagcctggtcgtggagtgtggaggacaaactgtccagtcctgtgtcattcgcaacctccggaaaaatccaaacttcgatatctgtacccttttcatggaggtgatgcttccacgagaggagctctactgtcctcctattactgtaaaggtgattgataaccggcagttcggacggcgtccagtggttggacagtgtactattagatcgctggaatccttcttgtgcgacccctactcagcggagagcccctctcctcaaggtgggcctgatgatgtcagcctgctgtcgcctggtgaggacgttcttattgacatcgatgacaaggagcccctgatccctatccaggaggaagaattcattgattggtggtcaaaattcttcgcctccatcggcgaacgggaaaagtgcggttcgtaccttgaaaaagactttgataccttgaaggtgtacgatactcaacttgaaaatgtcgaagcatttgaaggactcagcgatttctgcaacacttttaagttgtatcgtggaaagacgcaagaagaaaccgaagatccgtcggtgataggcgagttcaaaggtctgtttaagatttaccctctgccggaggatcctgcaattcctatgccgcctcgacaatttcatcagctcgcagcacagggaccccaagaatgcttggtgcggatatacatagtgcgtgcctttggacttcaaccgaaagatccaaatggaaaatgtgatccatacatcaagatctcgataggaaagaagtcggtgagcgaccaggacaattacattccctgtacgttggaaccagtgtttggaaaaatgttcgaactgacctgtactctgcctctcgagaaagatcttaagattactctttacgattacgatcttctcagcaaggacgaaaagatcggtgaaaccgtggtggatcttgaaaatcgcctcctcagcaagttcggtgcacgctgcggcctgcctcagacctactgtgtgtccggaccaaaccaatggcgtgatcagctccgcccttcccaacttcttcaccttttctgccaacaacaccgcgtcaaagctccagtgtacagaaccgaccgagtcatgttccaagacaaggaatactccattgaagagattgaagcaggtcgtatcccgaaccctcatcttgggcctgtggaggagaggcttgccctgcatgtgcttcaacaacaaggacttgtgcctgagcacgtggaaagccggccgctgtactccccgctccagccagatattgagcaaggtaaacttcaaatgtgggtcgatctttttccaaaagccctggggcggcctggacctccgtttaacataactcctcgccgagctagaagattctttctgcgctgcattatctggaacacccgagatgttatacttgatgacttgtcgttgacgggcgaaaagatgtccgacatttatgtcaaaggttggatgattggttttgaggaacataagcagaaaaccgacgtgcactacaggagcctgggaggtgaaggaaacttcaactggcgattcatttttccgttcgactaccttccggcggagcaagtgtgtaccatagccaaaaaggacgcattttggagactggacaaaaccgagtccaaaatacctgcaagggtggtgtttcaaatttgggataatgataagttttcgtttgacgattttctgggaagcctgcaacttgatctcaacagaatgccgaagccggcaaagactgcgaagaaatgtagcctggatcaactggatgacgcctttcatcccgaatggtttgtgtcacttttcgaacaaaagactgtcaagggctggtggccgtgcgtggcagaagaaggagaaaagaagattctcgccggaaaacttgaaatgaccctggaaattgtcgcagagtcggaacatgaagagcgtcctgcaggtcagggacgagatgaaccgaatatgaaccctaaactggaagatcctcggaggccagacacctcatttctgtggtttacctcgccatacaaaaccatgaagtttatcctgtggagaagatttcggtgggcgatcatccttttcattatactctttattctgctgcttttccttgctatattcatttatgcattcccaaactatgcagccatgaagctggtgaagcctttttcg

SEQ ID NO: 48054 - DNA, 6243 bp, Artificial Sequence
  derived and/or modified sequence
atgttgtgttgccttctggtgagagcgtccaatctcccctcggctaagaaagaccgccgctcagatccggtggcctctctgactttccgcggagtgaagaagcggaccaaagtcatcaagaattcagtgaatccggtctggaacgaggggttcgaatgggatctcaagggtatcccgctggaccaaggaagcgaactgcatgtggtggtgaaagaccatgaaaccatgggtcggaacaggttcctcggggaagcaaaagtgccacttagggaggtgctggcgaccccctcgctgagcgcctccttcaacgcaccgttgttggacaccaaaaagcagccgactggcgccagcctcgtcttgcaagtctcctacactccactcccgggagcggtgcctctgtttccacccccgactccactcgaaccttcgcctaccctgccagatttggatgtcgtggcggacaccggaggagaagaggacaccgaagatcagggtcttaccggcgacgaggccgaaccattcctggaccagagcggggggccgggagcccctaccactccgcgaaagctgccctcccggccgcctccacactacccgggaatcaagagaaagagatcggccccgacctccagaaagctgctgtctgacaagccacaggacttccagatcagggtgcaagtcatcgagggacgtcaactgccgggtgttaacatcaagccagtggtgaaggtcactgccgccggacaaaccaagcgcacccgtatccataagggaaacagcccgcttttcaacgaaactctgttcttcaacttgttcgattcgccgggagagctgttcgacgagccgatcttcatcacggtggttgactcccggtcgttgcgcaccgatgccttgctgggggaattcaggatggatgtgggaaccatctaccgcgaaccacggcacgcctacctgaggaaatggctgctgctttccgatccggatgacttctccgcaggggctcgaggatatcttaagaccagcctttgtgtgttgggacctggagacgaagcccctctggagcgcaaggacccttcggaggataaagaggacatagagtccaacctgctcaggccgacgggagtcgccctgaggggcgcgcatttctgcctgaaagttttccgcgcagaggacctgccccaaatggatgacgcagtgatggataatgtgaagcagatctttggattcgagtccaacaaaaagaacctggtcgacccgttcgtggaagtctccttcgccggaaagatgctctgctcgaagattctggagaaaactgcgaacccacagtggaaccagaacatcactcttcctgctatgtttccttcgatgtgcgagaaaatgcgcatccggatcatcgactgggacaggctcactcacaacgacattgtggccaccacttacctcagcatgagcaagatcagcgccccaggaggagagattgaagaagagccggcaggagccgtgaagccgtccaaggcgtccgatctcgacgactaccttggattcctccccactttcggcccctgctacatcaacctctatggaagcccgagagagttcactggattcccagacccgtacactgaactcaatactggaaagggcgagggagtggcataccgcggccggctgctgctctccctcgaaaccaagctggtggaacattcagaacaaaaagtcgaagatctgcctgccgacgacatcctccgcgtggaaaagtacctgcgccgccggaagtacagcttgtttgccgccttctattcagcaacgatgcttcaggacgtggatgacgccatccagtttgaagtgtcgataggaaactacggtaataagtttgatatgacctgcctgcccttggctagcaccactcagtacagcagagcagtctttgatggttgccactactactacctgccgtggggcaatgtgaaacctgtggtggtgctgagctcctactgggaagatatctcgcaccggatcgaaacccagaatcaattgctgggcatcgctgatcgccttgaggccgggctggaacaagtacacctcgccttgaaggcccagtgtagcactgaggacgtcgacagcctcgtggcccagctgactgacgagctgattgcgggctgctcgcagcctttgggagatatccatgaaactccgtctgcgacccatctcgaccagtatctgtaccagctgcgcacccatcacctgtctcagatcactgaagcggcacttgcccttaagctgggacactcggagcttcctgcagctctcgagcaggccgaggattggctcctgcggttgagagcgctggccgaggaaccacagaactccctgccggacatcgtgatctggatgctgcagggcgacaaaagggtcgcctaccagagagtcccggctcatcaagtcctcttctcaaggcgcggcgcgaattactgcggaaaaaactgtggaaaacttcagacgatttttctgaagtatccgatggaaaaggtgccgggggcccgcatgccggtgcagatccgcgtcaaactttggttcgggttgtcggtggacgaaaaggaattcaatcagttcgctgagggaaagctgtccgtgttcgctgaaacctacgaaaacgagactaagctggctctggtggggaactggggaaccaccggcctgacttacccgaaattctcggacgtgaccgggaagatcaagctgccaaaagactcgtttcgcccatctgccggctggacctgggctggtgactggttcgtgtgtcctgaaaagactctgctgcacgatatggatgccggccatttgtcttttgtcgaggaagtgtttgaaaaccagaccagactgccgggcggtcagtggatctacatgtcggacaactacacggatgtgaatggagagaaggtcttgccgaaggacgatatcgaatgcccactggggtggaagtgggaagatgaggagtggtcaaccgatctgaaccgggccgtcgacgaacaaggatgggaatattcgatcaccatccctccagagcgaaagcctaagcattgggtcccggcggagaaaatgtattacacccatcgccggagacggtgggtgcgccttcggagacgggacttgagccagatggaggcactgaagcgacaccgtcaggccgaggccgaaggcgaaggctgggaatacgcgtcactctttggatggaagtttcaccttgagtacagaaagactgatgcattccgacggcggagatggagacgccgcatggagcctctggaaaaaacggggccggcggcggtgtttgccctggagggagccttgggtggggtgatggatgacaagtccgaggactcaatgtccgtctccaccctgtctttcggcgtgaaccgcccgacgatttcctgtatcttcgactatggcaacagataccacctccggtgctacatgtaccaagctcgcgatctggctgcgatggacaaagatagcttcagcgacccgtacgcaatcgtgtcgttcctgcaccagtcccaaaagaccgtggtggtgaagaatactctcaacccaacttgggaccagactcttatcttctacgagatcgagatcttcggagagcccgctaccgtagctgagcaaccgccgtcgattgtggtggaactgtacgatcacgacacctacggagccgatgagttcatggggaggtgcatctgtcaaccttcgttggaaagaatgcccaggctggcatggttcccgctgactcggggatcacagccgtccggagagctgttggcctccttcgaactgatccagcgcgagaagccagccatccaccatatcccaggcttcgaagtgcaagaaacttcgcggatcctggacgaatcagaggacacggacctgccctacccaccgccacagcgcgaagctaacatctacatggtgccgcaaaacatcaaaccagcattgcaacggaccgccatcgaaatcctggcgtggggcctgcggaacatgaagagctaccagctggccaatatctcatcaccaagcctggtggtggaatgcggcggacagactgtgcagtcgtgcgtcatccggaacctgcgcaagaacccaaactttgatatctgcaccctgtttatggaagtgatgcttccacgggaagaactgtactgtccgcctattaccgtgaaggtgattgataaccgccagttcggaaggcggccggttgtgggacagtgtacgatccgctcgctggagagcttcctctgcgacccttactcggcggagtcgccttccccgcagggaggcccggacgatgtctcgctgctgtcgcctggagaagatgtcctgatagacatagacgataaggagccgctgataccgatccaggaagaggagttcatcgactggtggagcaaattctttgcatcaatcggagaacgggaaaaatgcggaagctacctcgaaaaggattttgacacgctgaaggtgtacgacacccagctcgaaaacgtggaggcatttgaaggcctgtccgatttctgcaataccttcaagctctaccgtggtaagactcaggaggaaactgaagatccatcggtgataggagagttcaagggtctgttcaagatttatccgttgcccgaggacccagcaattccgatgccaccgcggcagttccatcaactcgctgcacagggtccccaggagtgcctggtcagaatctacatcgtgagagcgtttggccttcagccgaaggaccccaacggcaagtgtgatccgtatatcaaaatctctatcgggaaaaagtccgtgtccgatcaagataactacatcccgtgcacgctcgagcctgttttcgggaagatgtttgagctgacctgcaccctgccgctcgaaaaagacctgaagattactctctacgactacgacctgctgagtaaagacgagaaaatcggcgagactgttgtcgacctcgagaatcggctcctcagcaagttcggcgcacgttgcgggctcccacagacttactgcgtgtccggacctaaccagtggcgcgaccagctgcgcccgtctcaactgttgcacctcttctgccagcagcaccgcgtcaaggcccctgtgtatcggactgaccgcgtgatgtttcaggataaagagtactcgattgaagagatcgaagcaggcagaatccctaatcctcacctgggaccagtggaggaacgccttgcccttcacgtcttgcaacaacaaggcctggtgcctgagcacgtggaatcacggccgctctatagcccgctgcagccagacatcgagcagggaaagctgcaaatgtgggtggatctgtttccgaaagcgctgggacgcccgggacctcctttcaacatcacgccgcgccgcgcccggcggtttttcctgcgctgcatcatctggaatacccgggacgtgattctcgacgatctctcgttgaccggcgaaaagatgtccgacatctacgtgaaaggatggatgattggctttgaggagcacaagcaaaagaccgacgtgcactaccgctcgcttggcggagaaggaaatttcaactggcggttcatcttcccgttcgactacctcccggcagagcaagtctgtaccattgcaaaaaaggatgctttctggagactcgacaagaccgaaagcaagatcccggcgcgcgtggtgtttcagatctgggataatgacaagttctcattcgacgactttttgggctcacttcagctcgacctgaaccggatgccgaaaccagctaaaacggcgaagaaatgctcactggatcaattggacgacgctttccaccctgagtggtttgtttccctcttcgaacagaaaactgtgaagggatggtggccatgcgtggcggaggagggcgagaagaagatcctcgcaggtaagctggaaatgaccctcgagatcgtcgctgaatcagaacatgaagaacgacccgcaggccaaggacgagacgaacctaacatgaatccgaaactggaagatccccggcggccggatacgagtttcctttggttcactagcccgtacaaaaccatgaagtttattctgtggcggcgctttcgctgggcgatcatcttgtttatcatcttgttcatcctgctcctcttcttggcaatattcatctacgccttcccgaattacgcggccatgaagctggtgaaaccgttcagc

SEQ ID NO: 48055 - DNA, 6243 bp, Artificial Sequence
  derived and/or modified sequence
atgctatgctgcctgctcgtgagggcatcaaatcttccttccgctaaaaaggacagacgctcggatcccgtcgcctccctgacatttagaggggttaagaaacggacaaaagttatcaagaattcagtgaaccctgtctggaacgaagggtttgagtgggaccttaagggtattcccctcgatcagggaagcgagctacatgtggttgtaaaggatcatgagacgatgggaaggaatcgtttcttgggcgaggccaaggtgcctctgcgcgaagtgctggcgacgccctctcttagtgcatcattcaacgccccactcctggacactaagaaacagccaacaggagcctctttagtgctgcaagtgtcctatacccctctgcccggagcagtaccactatttccacctccgacgcccctcgagccttcacccacgctccccgatctggacgtcgtcgccgataccggcggagaagaggataccgaggatcaggggctgaccggtgacgaggcggagccattcctcgatcagagtggagggcccggggctcccactacacctagaaagctgccaagcagaccgccacctcactaccccggcattaagaggaagagatccgcgcctacaagccggaagctgctgagcgataaacctcaggattttcagataagagtgcaggtcatagaggggcgccaactgcccggagttaacatcaaacctgtggttaaagtgaccgccgcaggtcagactaagagaactagaatccacaaaggtaactccccattattcaacgaaactctgtttttcaacctgttcgattctccgggggagttgtttgacgagcctatctttatcactgtcgtggatagcagaagtctcagaacagacgctctgttgggggagtttcgcatggatgtgggtactatctaccgagagcctcggcacgcgtacctccgcaagtggttgttgttgagcgaccctgacgattttagtgcaggcgccagaggatatcttaaaacctcattgtgcgtgctgggtcccggagatgaggcacctctggaaagaaaggacccctccgaggacaaagaggacatcgaatctaatttgcttcggccgaccggcgttgcattgcgtggggcccacttttgtctcaaggtctttagagcggaggatttaccgcagatggatgacgccgtgatggacaacgtcaagcaaatcttcggttttgagtctaataagaagaatttggtggacccctttgtagaagtaagtttcgcagggaagatgctttgcagtaagatccttgaaaagacagctaatcctcagtggaaccagaacattactctgccagccatgtttccgagtatgtgtgagaaaatgagaatcaggataattgactgggatcggctgacgcataacgacattgtggccactacatacctgagtatgagcaaaatcagtgctccgggtggtgagatcgaagaggaaccagctggcgcagtaaagccctcaaaagccagcgatctcgacgattacctcggttttctgccgacttttgggccttgttacatcaacttgtacgggtccccgagggaatttaccggtttcccagacccctacacagagctgaacactggtaagggcgagggggtggcttaccgcgggagattactgttgtccctcgaaaccaaattggtcgaacatagcgaacagaaggtcgaagacctcccagcggatgatatactgagggtggagaaatatcttcggaggcggaaatactccctctttgctgctttttactcagcgaccatgctgcaggatgttgacgacgcgatccagttcgaggtcagcattggaaactacggaaacaaattcgacatgacatgcttacccctcgccagtactacgcagtattctcgcgctgtgtttgatggatgccattattattatctcccatggggtaacgtaaaacccgtagtcgtcttgtcatcctattgggaagatataagtcaccgcatcgagactcagaaccagctgctggggattgccgatcggctcgaagcgggtttagagcaagtgcatttagcattgaaggcccagtgtagtactgaagatgttgatagtctggtggcgcaactgactgacgaactgatagccggttgcagccaacccctgggcgacattcacgaaacaccatcagctacacatctcgaccagtatctgtatcagttacgtacacaccacctgagccagattactgaggccgcccttgcgctgaagctgggccactccgagctccccgccgcactggagcaggctgaagattggctattgagactcagggctctcgccgaggagccgcagaacagtcttcctgacatcgtgatctggatgttgcagggagataagcgggtggcgtaccaaagggtgccagctcaccaggtcctgttctctcgtagaggagcgaactactgcggcaagaactgcggaaagctccagaccatattcttgaaatatcctatggagaaggtgcccggagccagaatgcctgtgcagattagagtgaagctttggttcggactgagcgtcgacgaaaaggagtttaatcagttcgcggagggcaaactcagcgtgttcgcggagacttatgaaaacgaaacaaaactcgcactcgtcggtaactggggcacgacgggcctcacctacccgaagttttccgacgtgaccggcaaaataaaactgccaaaggacagcttcagaccatccgctgggtggacttgggccggggattggtttgtgtgccctgaaaagactttactccacgatatggatgccggacacctctcatttgtagaggaggttttcgagaaccagacgaggttgcctggaggacaatggatctacatgagcgacaattacaccgacgtgaacggagaaaaggtattgccgaaagacgacatcgagtgccccttgggttggaagtgggaggatgaggaatggtctacggatctcaatagggctgtagatgaacagggctgggagtattcaattaccataccacctgaaagaaagcccaagcattgggtgcctgcggagaagatgtactatactcataggcgccgaagatgggttaggttgcggagaagggatctgagccaaatggaagccttaaaacggcataggcaagccgaggctgagggggagggctgggaatatgcgagcctgttcggatggaaattccacctggagtatcgaaagacggacgcatttagacggaggagatggcgcaggaggatggagccgcttgaaaaaactggcccagctgctgtgtttgctctagaaggggcgcttggcggagtgatggacgataaatctgaagattctatgtccgtttcaaccctgtctttcggcgtaaataggccaactatctcctgtatatttgattacggaaaccgctaccacctgagatgctatatgtatcaggcaagggaccttgccgctatggacaaagattcatttagcgacccgtacgctattgtaagcttcttacatcagagccagaagactgtagtggtcaagaacacactcaaccccacatgggaccagactcttatcttttacgagattgaaatattcggggagcctgccactgtggctgaacagccgccctccattgtggtcgaactgtatgatcacgacacctacggcgcagacgagttcatgggtaggtgcatttgccagccctccctggaacgtatgccccgactggcctggtttccactcaccagaggaagtcagccaagtggtgagctgctggcatccttcgagctgatccagcgggagaaaccagctatccaccatataccggggttcgaggtccaggaaacatcccgcatcttagacgagtcagaggacacagacttgccctacccaccacctcagagagaagctaacatttatatggtgccccagaacatcaagcccgctctgcagcgaacagctatcgaaattctagcctggggcctgagaaacatgaagagttaccagctcgctaatatttcgtctccctctctggtggttgaatgcggtggacagaccgttcaaagctgcgtgatacgaaatctgaggaagaatccgaacttcgatatttgtaccctgttcatggaggtgatgctaccacgagaggagctgtactgcccgcccatcacagttaaggtgatcgacaacaggcagttcggcagaagacctgtggtgggtcagtgtaccattcggagtctagagtcattcctttgcgatccctactctgctgaatcgcctagcccccagggtggcccagatgatgtaagtctgcttagcccaggggaagacgtgcttatcgacattgatgacaaagagcccctgattccaatccaggaagaggagtttattgattggtggtccaagttttttgcatcgatcggtgagcgggagaaatgcggcagttatctggaaaaggatttcgacaccctgaaagtttatgacacgcaactggagaacgtagaagcgttcgagggccttagcgacttctgtaacactttcaagttgtaccgcggtaagactcaggaagagaccgaggatcctagcgtaattggcgaatttaagggtctgttcaaaatttaccctcttcctgaggacccggccattccaatgcccccgcgtcaatttcatcaattggctgctcagggaccacaggaatgcttggtaagaatctatattgtacgcgccttcggtctgcaacctaaagatcctaatggcaaatgcgatccatacatcaaaatttcaataggtaagaagtccgtgagtgatcaggacaattacatcccctgtaccctcgagcccgtgttcggaaagatgtttgagctgacgtgtaccctgcccttggaaaaggacctaaagataaccttgtacgattatgacctgctgtctaaggatgagaaaataggtgagacggtcgttgatctcgaaaacagactgctctccaagtttggcgcccgctgcggactaccacagacctattgtgtcagcggaccgaatcaatggcgtgatcaattgcggccatcacagctcctgcacctgttttgccagcagcacagggtgaaagcccccgtgtaccgcaccgaccgggttatgttccaggacaaagaatattcaatcgaagaaatcgaagcaggacgcatacctaatccgcacctggggcccgtggaggagaggctggcccttcacgtgttgcagcaacaaggcctcgtgcccgaacacgtggagagcaggcccctctattcaccgctgcaacctgacattgaacaaggcaagctccaaatgtgggttgacttgtttcccaaagcactcgggcgccccggacctccatttaacattactccacggagagccaggcgcttctttctgcgctgtatcatttggaatactcgggacgtgattctggatgatttaagccttactggggagaaaatgagtgatatttacgtgaaaggttggatgattggctttgaggagcacaaacagaagaccgacgtgcactacagatcccttgggggagaggggaacttcaattggcggtttatctttccctttgattatctgcccgccgaacaggtttgcactatagcgaaaaaggacgcgttctggagactcgataagacagagagtaagatccctgcacgagtagtgttccagatctgggacaacgacaagttcagctttgacgattttctcggctcactccagttggatttgaatagaatgcccaagccagccaagaccgcaaagaagtgtagcttggatcagctggatgatgccttccaccccgagtggtttgtgtcacttttcgagcaaaaaactgtcaaaggatggtggccctgcgtcgcggaggagggcgaaaaaaagattttggctggcaaactggaaatgacactggaaattgtggcggaatctgaacatgaggagaggccagctggacagggccgggacgagccaaacatgaaccctaagctggaggacccaaggagaccggacaccagtttcctgtggttcacctcgccttataagaccatgaaattcattctctggcggaggtttcggtgggcaattatcctttttatcatactattcatcttgctcttgttccttgctatattcatctatgcgttccccaactacgccgctatgaagctggtcaaacccttctca

SEQ ID NO: 48056 - DNA, 6243 bp, Artificial Sequence
  derived and/or modified sequence
atgctctgttgcctgctcgtgagagcctcaaaccttccttccgccaagaaagatagacggtccgatccagtggcatccctcacttttagaggagtgaagaagcggaccaaggtgatcaagaacagcgtgaaccctgtgtggaatgagggatttgaatgggacctcaagggaattcctctcgatcagggcagcgaacttcatgtggtggtgaaggaccatgagactatgggacgcaatcgctttctgggagaggccaaggtccctctgagagaagtcttggcaactccctccctttcggcctcctttaacgcgccacttctggatactaagaagcagcccaccggggcatccctcgtgctgcaagtgtcttacaccccactgccaggcgcggtccctctctttccaccaccaacccctctcgagccctcccctactcttcctgatctggatgtggtggcagacaccggcggtgaagaggacaccgaagatcaggggctgactggagatgaagcggaaccgtttctggatcagtcgggcggaccgggagcacctactactccccgcaaacttccatcacgccctccaccccattaccctggaatcaaaaggaaacggtcggctcctaccagccgaaaactgctgtcagacaagcctcaggattttcaaatcagagtccaagtcatcgaaggcagacaacttccaggggtgaacattaagcccgtcgtgaaggtgaccgcagcgggacagaccaagagaacccggatccataagggtaacagccctctgtttaatgagactctcttctttaacttgtttgatagcccgggcgagctgtttgatgaaccaatctttatcactgtggttgactcccgttcgcttcggaccgatgcgcttctcggtgaatttcgaatggacgtgggcactatatacagagaaccccggcatgcctaccttaggaagtggctgctcctgtctgatccagatgacttcagcgcaggggcgcgaggataccttaagacctcgctgtgtgttctcggtcccggtgacgaagcaccacttgagcgaaaggatccttcggaggataaggaggacatagaatcgaacttgcttcggcctacgggcgtggccctcagaggagcacacttctgcctgaaggtctttcgagcagaggatctcccgcagatggacgacgcagtcatggataacgtgaagcagatctttgggtttgagtccaacaagaagaacctggtcgatccttttgtggaagtgtcttttgccggtaagatgttgtgttccaagattctggaaaagactgccaacccgcaatggaaccagaacattacgctgcccgcgatgtttccttcaatgtgcgaaaagatgagaatcaggattattgactgggacagacttacccacaatgatattgtggcaaccacttacctctcgatgtcaaagatttcggcaccaggcggggaaatcgaggaagaaccggcgggtgcagtgaaaccctccaaggcgtccgatttggacgattaccttggattcctgcctacttttggaccctgttacatcaatctgtacggatccccgcgggaatttaccggttttcctgacccttacactgaactgaatactggaaaaggcgaaggtgtcgcatatagggggcgactgctgctgagcctcgaaaccaagctggttgaacactcagagcaaaaggtagaagatctgcctgccgacgatattctcagggtggagaagtacctccgtcgcaggaagtactcgctgttcgctgcattttactccgccaccatgttgcaagacgtggatgatgcaatccaattcgaagtgtccattggtaactacgggaataagttcgatatgacctgccttcccctcgcctcgactactcaatactcacgggccgtgtttgatggatgccattactactaccttccctggggaaatgtgaagccagtggtcgtcctttcgtcgtactgggaagatatttcgcatcggattgagactcagaaccagctccttggaatcgccgatagacttgaagccggactggaacaggtgcatctggccctgaaagcacaatgttccaccgaagatgtcgacagccttgtcgcccaactgaccgacgaactcattgcaggctgttcacaaccacttggagatatacatgaaaccccttcggcaactcacctcgaccagtatctttatcaattgaggacccatcacctctcacagataaccgaagcagctctcgcactgaaattgggacactcggaactgcccgctgcactggaacaggcagaggattggctgttgcgcctgcgcgctcttgcggaggaacctcaaaactcgctccctgacattgttatttggatgcttcagggtgacaagagagtggcttaccagcgggtgcctgctcaccaggtgctgttctcacgtagaggagcaaattactgtggaaaaaactgtggcaagctccagaccatttttctgaagtaccctatggaaaaagttcccggtgcaagaatgcccgtccaaattagggtcaaactgtggttcggcctgtccgtggatgaaaaagaattcaaccaattcgcagaaggaaagctgagcgtctttgcagaaacctatgaaaatgagactaaactggcactggtgggcaactggggaaccaccggtcttacctatcctaagttctcagatgtgacgggtaagattaaactgccaaaggatagcttcagaccctcggcgggatggacctgggcaggggattggttcgtgtgtcctgaaaagacccttctgcacgatatggatgcaggccacctgagctttgtggaagaagtctttgaaaaccaaaccagattgcctggtggtcaatggatctacatgtcggataactacacggatgtgaatggtgagaaagtgctgcctaaagacgacatagagtgtcccctcgggtggaagtgggaagatgaagagtggtcgactgatcttaacagggcagtggacgaacaagggtgggaatattcgattaccattccccctgagcgcaagccaaaacactgggtgccagcagagaagatgtactacacccaccgacgacggagatgggtcaggttgcgacggcgggacctgagccaaatggaggcgctgaagcgccaccggcaagcagaagcggaaggagagggatgggagtacgcatccctgtttggatggaagtttcatctcgagtacagaaagactgatgcgtttcgccggcgccgctggaggcgcaggatggaacctctcgaaaagacgggacctgccgcagtctttgcactcgaaggtgcactgggcggagtgatggacgataagagcgaggactcaatgagcgtctccactctttcgttcggcgtcaaccgcccgacgatttcgtgtatcttcgactacggtaataggtaccatcttagatgctacatgtaccaagcacgtgatctggccgccatggataaagatagcttctcggatccttacgcaattgtcagcttccttcatcagtcgcaaaagactgtggtggtcaagaacactcttaaccctacgtgggaccagactctcatattctacgaaattgagatctttggtgaacctgccactgtcgcagaacagcccccctccatcgtggtcgaactttacgatcacgatacctacggcgcagatgaattcatgggaaggtgcatttgtcagccttctctggaacggatgcctagacttgcgtggtttcctttgacccggggttcacagccatcgggggaacttcttgcatcgttcgagctcattcagagagagaagcccgccatccatcacattccaggttttgaggtccaagaaacctccaggatacttgacgagtcggaggacactgaccttccatatccgccgccacagcgcgaagcgaatatctacatggtgcctcaaaacatcaagcctgctcttcagcggactgccattgaaattcttgcgtggggacttcgtaatatgaagagctaccagcttgccaacatttcgtccccttcactggtggtggaatgtggagggcagactgtgcaaagctgcgttatcagaaatcttcgaaagaatcctaactttgatatctgcacgctgtttatggaagtgatgcttcctcgcgaagagttgtactgtcctcctattacggtgaaggtgatcgacaacaggcagtttggacgacggccagtggtcggacaatgtaccatcagatccctggagagctttctctgtgatccttactcggctgagtccccttcgcctcaaggtggtccagatgacgtgtccctgctgagccctggtgaggacgtcctgattgacatcgatgacaaagaacctttgatccctatccaagaggaagaattcattgactggtggtcgaagttttttgcaagcattggtgaaagggagaaatgcgggtcctaccttgagaaggattttgatactctgaaggtgtacgacactcagctggaaaacgtggaagcattcgaaggattgtccgatttttgtaatacctttaagctgtaccggggaaagactcaagaggaaaccgaagatccaagcgtgattggtgaattcaagggtctgtttaagatctaccctctccccgaagatcccgcgatccccatgcctcctagacaattccatcaactcgccgctcaaggaccgcaagagtgtctcgtgcgaatttacatagtccgcgcattcggacttcaaccaaaggatcctaatggtaaatgcgatccttacattaagatatccattggcaagaagagcgtcagcgaccaagataactacatcccctgtactctggagccggtgttcggaaagatgtttgaactgacctgtactctcccgctggaaaaagatctgaagataaccctgtacgactacgatctcctgtcgaaggatgagaagataggcgagactgtggtcgatctggaaaaccgcctgctcagcaagtttggcgcacgttgtggcctgccgcagacttactgcgtgtcgggccctaaccagtggcgagatcaactgcgccctagccagcttctccatctgttttgtcaacaacatagagttaaggcaccggtctaccggaccgacagagtgatgtttcaggataaggaatactcgatcgaggagatagaagcaggcagaattcccaaccctcaccttgggcccgtggaagaacgactggcacttcacgtccttcagcaacagggacttgtccccgagcatgtggaatcgcgacctctttatagcccattgcagccagatatagaacaaggaaagctccaaatgtgggtggacctgtttccaaaagcacttggtcgacccggtcctcctttcaacataacccctcggcgagcgcgccgcttctttttgcggtgcatcatttggaacacgagagatgttattctggacgacctgtcgctgaccggagagaaaatgtcagacatttacgtgaagggatggatgataggtttcgaagagcataagcaaaagaccgatgtgcattacaggagcctggggggagaaggtaacttcaattggcggtttatcttcccatttgattatctgccagcagaacaagtgtgtaccatagcgaagaaagatgcattttggcgtctggataaaaccgaaagcaagattcctgcaagagtggtgtttcaaatctgggataacgataagttttcgtttgatgactttttggggtcgcttcaacttgatttgaaccgcatgccaaagccggccaagactgccaagaaatgttccctggaccaacttgatgatgcgtttcatcctgaatggtttgtgtcactttttgaacaaaaaacggtgaaagggtggtggccgtgcgtggcagaggaaggagagaagaaaatcttggctggaaaacttgagatgacgctggagattgtggccgagtccgaacatgaagaaaggcctgcggggcaggggagagacgaaccaaacatgaatccaaagttggaagatccacgacggccggatacctccttcctttggttcacttccccctacaagacgatgaaattcattctttggagaaggtttagatgggcaataatcttgttcattattcttttcatcctcctgctttttcttgcaattttcatctacgcatttcctaattacgcagcgatgaaacttgtgaagccattcagc

SEQ ID NO: 48057 - DNA, 6243 bp, Artificial Sequence
  derived and/or modified sequence
atgctgtgttgcctcctcgtgagagcttccaacttacctagtgctaagaaggatcgccggtctgatcccgttgctagtcttacgttcaggggagtcaagaagcggaccaaggtgatcaaaaattctgtaaaccctgtctggaatgagggcttcgaatgggatttgaagggcatccccctggaccaaggcagcgagctgcatgtggtggtcaaggaccacgagaccatgggacgtaatcgcttcctgggtgaggcaaaggtccccctacgagaggtcctcgctaccccctctctgagcgcttccttcaatgcgccacttctggacactaagaaacagcccacgggcgctagcctcgtcctccaggtgtcttacacccctctgcctggtgctgtgccactgttcccccctcctacaccgctggagcccagtcctacacttccagaccttgacgtagtggctgacaccggtggtgaagaggacaccgaagaccagggactgaccggcgatgaggccgagcccttcctggaccagtccggcggccccggcgcccctacgacgccccgaaagctaccctcgcggccccccccacactacccaggaatcaagaggaagagaagtgctccaacttccagaaagcttctgtcagacaagcctcaggatttccaaatacgcgtgcaggtgattgaagggcgccaacttccgggggtgaatatcaagcccgtggtaaaggtgaccgcggctggccagacaaaacggacacgcatccacaaagggaattccccgctgttcaatgagactctgttttttaacctcttcgattctcctggcgagctcttcgatgagcccattttcatcaccgtcgttgattcacggagcctgaggacagacgccctgctgggcgagtttaggatggatgtaggaacaatataccgtgagccaagacacgcgtacctaaggaagtggcttctgttgtcagaccccgacgacttcagtgccggtgccaggggatatttgaagacctctctctgcgtactcggtccgggcgatgaagcgcccctcgaacgcaaagacccgagcgaggacaaggaagatatcgagagtaaccttttgcgcccaacaggggtcgctctccgaggagcgcacttctgcctcaaagtcttcagggccgaagacttaccacagatggacgatgccgtgatggacaacgtaaagcagattttcggttttgaaagcaataagaagaacctggtggaccccttcgtggaagtgtccttcgcagggaagatgctctgcagcaagatcctggagaaaacagccaacccgcaatggaatcagaacatcacattgccggctatgtttcccagcatgtgtgaaaagatgagaatccgaatcatcgactgggacagactgacccataatgacatcgtcgccactacttatctttcaatgagtaaaatctcagcacctgggggagagatcgaggaggagcccgctggggccgtgaaaccatctaaggcttctgacctggatgactacctgggtttcctgcccaccttcggtccatgttacattaacctctacggaagtcccagggagtttaccggattccctgacccctataccgagctaaacacgggtaaaggcgaaggcgtcgcctacagggggagacttctgctgagcctggaaactaaactagtagagcatagtgagcaaaaggtggaggacctccctgcggatgatatcttgcgcgtagaaaaatacctgcgtcgtagaaagtatagcctctttgccgccttctattcagcgacaatgctgcaggacgttgacgatgccatccagtttgaggtctcaattgggaactacggcaacaagttcgatatgacgtgcctcccgctggcgtccacaactcagtatagcagagcggtctttgacggctgccactattattatttaccatggggtaacgtgaagcctgtggtagtcctctcttcctattgggaggatatctcccacagaatcgaaacccagaaccagctgctcggcatcgctgacaggctcgaggctggactcgagcaggtacacctggccctgaaggcgcaatgttctactgaggacgtggacagcttggtggcacagctcaccgacgagctcattgccggctgttcacagcctctgggtgacatccatgagaccccatctgctacacacttagaccagtacctttaccagctgcgaacgcaccacctttcacagatcacagaggcggcccttgccctcaagctgggtcattcagagttaccagcggcccttgaacaggccgaggattggttgttacggctgcgtgccctcgctgaagagccgcagaacagtcttcccgacatagtcatctggatgctgcagggcgacaagcgggtggcctaccagagggttccagcacaccaggttctcttctcccgtcgcggagcgaactactgtggtaagaattgtggcaaacttcaaactatctttcttaaatacccgatggagaaggtcccgggcgctagaatgcccgtgcaaatccgcgtgaaactgtggtttggtttaagcgtggacgagaaggagtttaatcagtttgctgaagggaagctgtcggtgtttgcggagacctacgaaaatgagaccaagttggcgctggtgggaaactggggaacaacgggcctcacctaccccaaattctccgacgtcacaggtaaaatcaagctaccaaaagacagtttccgtccctccgccggttggacgtgggcaggcgactggttcgtgtgcccagaaaaaaccttacttcatgacatggatgcggggcatctcagcttcgtggaggaagtcttcgagaaccagacccgtctgccaggtggacagtggatttacatgagtgataactacactgatgtgaatggggaaaaggtgctgccaaaagacgacattgagtgtccgttgggctggaaatgggaagacgaggaatggagtacggatcttaaccgggcagtcgatgaacagggatgggaatattccataacaatcccaccagaaagaaaacctaaacactgggtgcccgcagagaaaatgtactacacacacagacgaaggaggtgggtgagactcagacgaagggatctgtcacagatggaggccctgaagaggcaccgccaagccgaggccgaaggcgaagggtgggagtacgcatcactatttggctggaagtttcatctcgagtacagaaaaaccgacgcatttcgccggaggaggtggcgccgtcgtatggagcccctggaaaagacggggccggccgccgttttcgcactcgaaggagcccttggtggcgtgatggacgacaagtctgaagattccatgagcgtgtccactctgtctttcggcgtaaacaggcctacaatctcctgtatcttcgactacggaaacagataccaccttaggtgctatatgtatcaggcccgagatctggctgctatggacaaagactccttctcagatccctatgctatcgtgtcatttcttcaccagtcccagaaaactgtggtggtcaagaataccttaaaccccacttgggaccagacactcatcttttacgagatagagatcttcggcgagcccgccaccgtggctgagcaacccccatcaatcgtggtggaactgtacgaccatgatacttacggagcagacgagtttatgggcagatgcatttgccagcccagcctcgagagaatgcctcgactggcttggttccctctcactaggggatcccagccttccggtgagctgctggcctcattcgaactcattcagagagagaaacctgccatccaccatatccctggtttcgaggtccaggagacctcccgtatcctcgacgaaagcgaggacaccgatctgccataccctcctccccagcgcgaagccaacatctatatggtaccacaaaatatcaaacccgccttgcagcgcacggccatcgaaattctggcttggggactaagaaacatgaaatcttaccagctagccaacatctcaagtcctagcctggtcgtcgagtgtgggggtcagaccgtgcagtcttgtgtcatacgtaacctgaggaagaacccaaatttcgatatctgcaccctgtttatggaggtgatgttgccacgcgaggaactgtattgccctccaattaccgtgaaagtcatcgataatagacaatttgggagaaggcccgtggtgggacagtgtaccattcgaagtctagaaagtttcctttgcgacccgtactccgccgaatcgccatccccacagggcggtcctgacgatgtcagcctgttgagccctggtgaggacgtgttgatcgacatagacgacaaggagccacttattccgatccaggaggaggagttcatagattggtggtcaaagttcttcgctagcatcggcgagcgcgagaagtgcggcagctacctggagaaagacttcgacacactcaaagtttacgatacacagctggaaaacgtggaagccttcgagggactgtctgacttttgcaatacttttaaactctatcgaggtaaaacgcaggaggagaccgaggacccgagcgttataggcgaattcaaaggcctgtttaagatctacccgcttcccgaagaccccgccatccctatgccgcctaggcagttccaccagctcgccgcccaggggccccaggaatgcctggtgaggatctacattgttcgggcgttcgggctgcagccaaaagaccccaacggcaaatgcgacccctacattaaaatctccatcgggaagaaatcagtctccgaccaggacaattatattccttgcaccctggagcccgtattcggaaagatgtttgaactgacttgcaccctaccactggagaaggacttgaaaatcaccctgtatgattacgatctgcttagtaaggatgagaagatcggcgagaccgttgtggatcttgaaaacagactgctgagcaaattcggcgctcggtgtgggctcccccagacttactgtgtgagcgggcctaatcaatggagggatcagttgcggccgagccagctgctgcacttattctgccagcagcaccgggtcaaggcccctgtctatcggaccgacagagttatgttccaggataaagagtactcaatagaggaaattgaggctgggcggattcccaaccctcacctgggccctgtggaagaacggctggctctccacgttctgcagcagcagggtctggtgcctgagcacgtggagagtaggcccttgtacagccccctgcagccggacattgagcaagggaagttgcagatgtgggtcgacctgttccctaaagcattgggcaggccgggaccaccatttaatataacaccccgccgcgctcgcaggttttttctgcgttgtatcatctggaatacaagagacgtcatcctggatgacttaagcctgaccggggagaaaatgagtgatatctacgtgaaggggtggatgatcggcttcgaagagcataagcagaaaacagatgtgcactaccggagtttgggtggcgaggggaatttcaattggcgatttatcttcccgtttgactacctgcctgctgagcaggtgtgcactatagccaagaaggatgcgttctggagactggataagactgagtccaagattccagcccgagtcgttttccaaatctgggacaatgacaagttcagttttgacgattttctgggttccttgcaactggacttaaaccgcatgcccaagccagccaaaacagccaagaagtgcagcctggatcagcttgatgatgcgttccaccccgagtggttcgtgtcactcttcgagcagaagactgtaaagggctggtggccatgcgtggccgaagagggagagaaaaagatactggccggtaagctagagatgaccctcgagattgtcgccgagagcgagcatgaggaaaggcccgcaggacagggaagagatgagccaaacatgaaccccaaactggaggatccacgcagaccagacactagttttctgtggtttacatccccctacaaaaccatgaagtttatcttgtggcggagattccgctgggccatcatcctcttcatcatattgttcatacttctgcttttccttgctattttcatttatgctttccccaactatgcagctatgaaactcgtgaaacccttttcc

SEQ ID NO: 48058 - DNA, 6243 bp, Artificial Sequence
  derived and/or modified sequence
atgttatgttgtttactagttcgtgcgtcgaatttaccgtcggcgaaaaaagatcgacgttcggatccggtagcgtcgttaacgtttcgaggtgttaaaaaacgaacgaaagttataaaaaattcggtaaatccggtttggaatgaaggttttgaatgggatttaaaaggtataccgctagatcaaggttcggaattacatgtagtagtaaaagatcatgaaacgatgggtcgaaatcgttttttaggtgaagcgaaagttccgttacgagaagtattagcgacgccgtcgttatcggcgtcgtttaatgcgccgttattagatacgaaaaaacaaccgacgggtgcgtcgttagtactacaagtatcgtatacgccgttaccgggtgcggtaccgctatttccgccgccgacgccgttagaaccgtcgccgacgctaccggatttagatgttgtagcggatacgggtggtgaagaagatacggaagatcaaggtttaacgggtgatgaagcggaaccgtttctagatcaatcgggtggtccgggtgcgccgacgacgccgcgtaaactaccgtcgcgaccgccgccgcattatccgggtataaaacgtaaacgttcggcgccgacgtcgcgtaaattactatcggataaaccgcaagattttcaaatacgtgtacaagtaatagaaggtcgacaattaccgggtgtaaatataaaaccggttgttaaagttacggcggcgggtcaaacgaaacgtacgcgtatacataaaggtaattcgccgttatttaatgaaacgctattttttaatctatttgattcgccgggtgaattatttgatgaaccgatatttataacggtagttgattcgcgatcgttacgaacggatgcgttactaggtgaatttcgaatggatgtaggtacgatatatcgtgaaccgcgtcatgcgtatctacgaaaatggttattactatcggatccggatgatttttcggcgggtgcgcgtggttatctaaaaacgtcgctatgtgtattaggtccgggtgatgaagcgccgttagaacgtaaagatccgtcggaagataaagaagatatagaatcgaatttactacgtccgacgggtgttgcgttacgaggtgcgcatttttgtttaaaagtttttcgtgcggaagatctaccgcaaatggatgatgcggtaatggataatgtaaaacaaatatttggttttgaatcgaataaaaaaaatttagtagatccgtttgtagaagtatcgtttgcgggtaaaatgttatgttcgaaaatattagaaaaaacggcgaatccgcaatggaatcaaaatataacgttaccggcgatgtttccgtcgatgtgtgaaaaaatgcgtatacgaataatagattgggatcgtctaacgcataatgatatagtagcgacgacgtatttatcgatgtcgaaaatatcggcgccgggtggtgaaatagaagaagaaccggcgggtgcggttaaaccgtcgaaagcgtcggatctagatgattatttaggttttttaccgacgtttggtccgtgttatataaatttatatggttcgccgcgagaatttacgggttttccggatccgtatacggaattaaatacgggtaaaggtgaaggtgtagcgtatcgtggtcgtttactattatcgttagaaacgaaattagttgaacattcggaacaaaaagttgaagatttaccggcggatgatatattacgtgtagaaaaatatctacgacgtcgtaaatattcgctatttgcggcgttttattcggcgacgatgttacaagatgttgatgatgcgatacaatttgaagtatcgataggtaattatggtaataaatttgatatgacgtgtttaccgctagcgtcgacgacgcaatattcgcgagcggtttttgatggttgtcattattattatttaccgtggggtaatgtaaaaccggttgtagttttatcgtcgtattgggaagatatatcgcatcgaatagaaacgcaaaatcaactactaggtatagcggatcgactagaagcgggtttagaacaagtacatttagcgttaaaagcgcaatgttcgacggaagatgttgattcgctagttgcgcaattaacggatgaactaatagcgggttgttcgcaaccgttaggtgatatacatgaaacgccgtcggcgacgcatctagatcaatatttatatcaactacgtacgcatcatctatcgcaaataacggaagcggcgctagcgctaaaattaggtcattcggaattaccggcggcgttagaacaagcggaagattggctattacgattacgtgcgttagcggaagaaccgcaaaattcgttaccggatatagttatatggatgttacaaggtgataaacgagttgcgtatcaacgagtaccggcgcatcaagtattattttcgcgtcgtggtgcgaattattgtggtaaaaattgtggtaaattacaaacgatatttctaaaatatccgatggaaaaagtaccgggtgcgcgaatgccggttcaaatacgtgtaaaactatggtttggtctatcggttgatgaaaaagaatttaatcaatttgcggaaggtaaactatcggtatttgcggaaacgtatgaaaatgaaacgaaactagcgttagttggtaattggggtacgacgggtttaacgtatccgaaattttcggatgtaacgggtaaaataaaactaccgaaagattcgtttcgtccgtcggcgggttggacgtgggcgggtgattggtttgtttgtccggaaaaaacgttactacatgatatggatgcgggtcatttatcgtttgttgaagaagtatttgaaaatcaaacgcgattaccgggtggtcaatggatatatatgtcggataattatacggatgtaaatggtgaaaaagtactaccgaaagatgatatagaatgtccgctaggttggaaatgggaagatgaagaatggtcgacggatttaaatcgtgcggtagatgaacaaggttgggaatattcgataacgataccgccggaacgtaaaccgaaacattgggttccggcggaaaaaatgtattatacgcatcgtcgtcgtcgttgggttcgattacgtcgtcgtgatttatcgcaaatggaagcgctaaaacgtcatcgacaagcggaagcggaaggtgaaggttgggaatatgcgtcgctatttggttggaaatttcatttagaatatcgtaaaacggatgcgtttcgacgacgtcgatggcgtcgtcgtatggaaccgctagaaaaaacgggtccggcggcggtatttgcgttagaaggtgcgttaggtggtgttatggatgataaatcggaagattcgatgtcggtatcgacgttatcgtttggtgttaatcgaccgacgatatcgtgtatatttgattatggtaatcgttatcatctacgttgttatatgtatcaagcgcgagatttagcggcgatggataaagattcgttttcggatccgtatgcgatagtatcgtttttacatcaatcgcaaaaaacggtagtagtaaaaaatacgctaaatccgacgtgggatcaaacgctaatattttatgaaatagaaatatttggtgaaccggcgacggtagcggaacaaccgccgtcgatagttgtagaattatatgatcatgatacgtatggtgcggatgaatttatgggtcgttgtatatgtcaaccgtcgttagaacgtatgccgcgtctagcgtggtttccgctaacgcgaggttcgcaaccgtcgggtgaactactagcgtcgtttgaattaatacaacgtgaaaaaccggcgatacatcatataccgggttttgaagtacaagaaacgtcgcgtatactagatgaatcggaagatacggatttaccgtatccgccgccgcaacgtgaagcgaatatatatatggttccgcaaaatataaaaccggcgttacaacgaacggcgatagaaatattagcgtggggtttacgtaatatgaaatcgtatcaattagcgaatatatcgtcgccgtcgttagtagttgaatgtggtggtcaaacggtacaatcgtgtgttatacgtaatctacgtaaaaatccgaattttgatatatgtacgctatttatggaagtaatgttaccgcgagaagaattatattgtccgccgataacggtaaaagttatagataatcgtcaatttggtcgtcgtccggttgtaggtcaatgtacgatacgttcgctagaatcgtttttatgtgatccgtattcggcggaatcgccgtcgccgcaaggtggtccggatgatgtttcgttattatcgccgggtgaagatgtattaatagatatagatgataaagaaccgttaataccgatacaagaagaagaatttatagattggtggtcgaaattttttgcgtcgataggtgaacgtgaaaaatgtggttcgtatctagaaaaagattttgatacgttaaaagtttatgatacgcaactagaaaatgtagaagcgtttgaaggtttatcggatttttgtaatacgtttaaattatatcgtggtaaaacgcaagaagaaacggaagatccgtcggtaataggtgaatttaaaggtctatttaaaatatatccgctaccggaagatccggcgataccgatgccgccgcgacaatttcatcaattagcggcgcaaggtccgcaagaatgtttagtacgaatatatatagtacgtgcgtttggtttacaaccgaaagatccgaatggtaaatgtgatccgtatataaaaatatcgataggtaaaaaatcggtatcggatcaagataattatataccgtgtacgttagaaccggtatttggtaaaatgtttgaactaacgtgtacgctaccgctagaaaaagatctaaaaataacgctatatgattatgatttactatcgaaagatgaaaaaataggtgaaacggttgtagatttagaaaatcgtttattatcgaaatttggtgcgcgttgtggtttaccgcaaacgtattgtgtttcgggtccgaatcaatggcgtgatcaattacgaccgtcgcaattactacatctattttgtcaacaacatcgagtaaaagcgccggtatatcgaacggatcgagtaatgtttcaagataaagaatattcgatagaagaaatagaagcgggtcgaataccgaatccgcatctaggtccggtagaagaacgattagcgctacatgtactacaacaacaaggtctagtaccggaacatgttgaatcgcgtccgctatattcgccgttacaaccggatatagaacaaggtaaattacaaatgtgggtagatttatttccgaaagcgttaggtcgtccgggtccgccgtttaatataacgccgcgtcgtgcgcgacgtttttttctacgttgtataatatggaatacgcgtgatgttatattagatgatttatcgttaacgggtgaaaaaatgtcggatatatatgttaaaggttggatgataggttttgaagaacataaacaaaaaacggatgtacattatcgttcgctaggtggtgaaggtaattttaattggcgttttatatttccgtttgattatttaccggcggaacaagtatgtacgatagcgaaaaaagatgcgttttggcgattagataaaacggaatcgaaaataccggcgcgagtagtatttcaaatatgggataatgataaattttcgtttgatgattttttaggttcgctacaactagatttaaatcgaatgccgaaaccggcgaaaacggcgaaaaaatgttcgttagatcaactagatgatgcgtttcatccggaatggtttgtatcgctatttgaacaaaaaacggttaaaggttggtggccgtgtgtagcggaagaaggtgaaaaaaaaatactagcgggtaaattagaaatgacgttagaaatagttgcggaatcggaacatgaagaacgtccggcgggtcaaggtcgtgatgaaccgaatatgaatccgaaattagaagatccgcgacgaccggatacgtcgtttctatggtttacgtcgccgtataaaacgatgaaatttatattatggcgtcgatttcgttgggcgataatattatttataatactatttatactactattatttctagcgatatttatatatgcgtttccgaattatgcggcgatgaaattagttaaaccgttttcg

SEQ ID NO: 48059 - DNA, 6243 bp, Artificial Sequence
  derived and/or modified sequence
atgctttgctgtttgcttgtgagagcgtcgaatttgccctcggcaaaaaaggaccggcggtccgatcccgtcgcctcacttacgtttcgcggagtgaagaagcggactaaggtcatcaagaactcagtgaacccggtgtggaacgagggatttgagtgggacttgaaaggtataccactggaccagggttcagaactccatgtggtggtgaaagatcacgaaacgatgggaaggaacaggtttctgggagaagcaaaggtgccactgcgagaagtgctggccactccttcgcttagtgcatcattcaacgcacctcttctggataccaagaaacagccaaccggcgcatcgttggtcctgcaggtgtcgtacactcctcttcctggtgccgtgcccttgttccctcctccaactcctcttgaacctagcccgaccctcccagacctggatgtggtcgcggacaccggaggggaagaggacaccgaggatcaaggacttactggggatgaggcagaaccatttttggatcagtcgggtggtcccggagcacctactacgccgcgtaaacttccatcgcgaccccctccacattatccgggaatcaagagaaagcgctctgcacctacttcgcggaagctcctgtccgacaagccacaggattttcaaattagggtccaagttattgagggacgccaactgccgggcgtcaacattaagccagtcgtcaaggtcaccgcggctgggcagaccaagcggacgcgtatacataagggtaattctcctctctttaatgaaaccctgtttttcaatctcttcgacagccctggcgaactttttgacgaaccaattttcattaccgtggtggattctaggagccttcgcactgacgccctcctcggtgagttcagaatggacgtgggcaccatttaccgggaaccccgccatgcctacctgcgaaagtggctgctgctgtccgatcccgacgatttttccgcaggggcaagggggtaccttaagacttcgctgtgtgtgctggggccaggcgacgaagcacccctcgagcgcaaggacccaagcgaagataaggaagatatcgagtccaatctccttcgccctactggcgtcgcacttcgcggtgcccatttctgcctgaaggtgttccgcgcggaggatcttccacaaatggatgatgcagtcatggataatgtcaagcaaatcttcggttttgaaagcaataagaaaaatctggtggatccctttgtggaggtgtccttcgcgggcaaaatgctgtgttccaagattctggaaaagaccgcaaacccacaatggaaccaaaacattactctcccggcgatgtttccttcgatgtgcgaaaagatgaggatcaggattatcgattgggatagactgacccataatgatatcgtggccaccacttacctctcaatgtcaaaaatctcggcccctggcggcgaaattgaagaggaaccggctggtgcagtgaagccttccaaagccagcgacctggatgattaccttggatttctccctaccttcggaccctgctacatcaatctgtacggaagtcctcgagaatttaccggatttcctgatccatacaccgagttgaacactggaaagggtgagggtgtggcataccgtggtcgactgttgctctctctggaaacgaagctggtggaacactccgaacaaaaggtcgaggatcttcctgcagatgatatcctcagagtcgagaaatacctgagacgacgcaaatacagcctcttcgcagcgttttactcggcgactatgcttcaagatgtcgatgatgctatacagttcgaagtgtccatcggaaattacgggaacaaatttgatatgacctgtctgccacttgcctcaaccactcagtactcgcgcgcagtatttgacgggtgtcattactactacctcccttggggtaacgtgaagcctgtggtcgtgctgagctcctactgggaggacatctcacatagaattgaaacgcaaaaccagttgcttggtattgccgatcgtctggaggcaggacttgagcaagttcatctcgcactgaaggcacagtgttcgactgaggacgtggattcgctcgtggctcagctgaccgacgagttgatcgccggctgtagccaaccccttggtgatatccatgaaaccccttccgctacgcacctcgaccaatacttgtaccagcttagaacccaccatctgagccaaatcaccgaagccgcacttgcgctgaaattgggacactccgaactgccagcagccctcgaacaggcggaagattggctgcttcgacttcgcgcactggctgaagagcctcaaaactcgcttcctgacattgtaatctggatgcttcaaggtgataagcgggtggcatatcagcgggtgcctgctcaccaggtgctttttagccggcgcggagcaaactactgtggaaaaaactgcgggaaacttcagaccatttttctgaaatacccgatggaaaaggtgcctggtgctagaatgcccgttcagattcgtgtgaaactctggttcggccttagcgtggatgagaaggaattcaaccagtttgcagaaggtaaactttccgtatttgccgaaacttacgagaatgaaaccaagctggcacttgttggtaactggggaacgaccgggctgacctacccaaaattctcagatgtgacgggcaaaatcaaactccctaaggatagctttaggccgtccgccggatggacttgggcaggagattggtttgtgtgtccagagaaaacccttcttcacgacatggatgcaggtcatttgtcattcgtggaagaagtatttgagaaccaaactagactgcccggtggacagtggatttacatgagcgataactacaccgacgttaacggggaaaaggttcttccaaaggacgatatcgagtgtccccttggatggaaatgggaggacgaagagtggagcaccgatcttaacagagcagtcgatgaacagggatgggagtacagcataaccattcccccagagcgcaaacctaagcattgggtgccagcggaaaagatgtactacactcaccgcaggcggcgatgggtgcggctgcggagaagagacttgtcacaaatggaagcactcaaacgccatcgacaggcagaagcagagggcgaaggttgggagtacgcatccctgttcggttggaaatttcacctcgaatacagaaagactgacgcctttaggagacgtaggtggcggagaagaatggaaccccttgaaaaaactggacctgcggctgtgttcgcccttgagggagcactgggaggtgtgatggacgataagtcagaagatagcatgtcagtatccaccctgtcgtttggcgtcaacagacccactatctcctgtattttcgattatggtaatagataccacctgagatgttacatgtatcaggcacgggatctggccgcaatggacaaggattccttctcagatccatacgcgattgtttcattcctccatcaatcccaaaagaccgtcgtagtcaaaaacaccctcaacccaacgtgggaccagactctgatattctatgaaatagagatcttcggggaaccagccactgttgcggagcaaccaccaagcatcgtggtggagctttacgaccatgatacgtacggggcagatgagttcatgggacgctgtatttgccaaccatcgctggaaagaatgcctagactggcctggtttccactgactcggggctcgcagccttccggagaactgctggcgtcattcgaactcatccagagggaaaagcctgctattcaccatattcctgggtttgaagtgcaggagacttcccggattctggacgagtccgaagataccgatctgccatacccccctcctcagagggaagcgaacatctacatggtgcctcagaatatcaagcctgctcttcaaagaaccgcaatagagattcttgcatggggtcttaggaacatgaagtcgtaccaacttgcaaatatctcttcgccctcgctcgtggtcgaatgcggaggccagactgtccagagctgtgtgatacgcaaccttcggaagaaccctaactttgatatttgcactttgtttatggaagtgatgcttcctagagaagagctgtactgtcctcctattactgtgaaagtgattgacaatcggcaatttggccgccgtcctgtcgtgggccaatgcactatcaggtctttggaatcctttctttgtgatccatactctgctgagtccccctccccacaggggggacccgatgacgtgtcgcttctctcgcctggagaggacgtgctcattgatattgacgataaggaaccactcattcccattcaagaagaagagtttatcgattggtggtcgaagttttttgcatcaataggtgaacgggaaaagtgtggtagctatcttgagaaagattttgataccctgaaagtgtacgatactcaattggaaaacgtcgaggcctttgagggactctccgatttttgcaacacgtttaagctgtaccgcggaaagacccaagaagagactgaggatccgtcagtgataggcgagtttaagggattgtttaagatttacccactgccagaagatcccgcaatcccaatgcccccacgccaatttcaccagcttgctgcacagggtccccaggaatgcctcgtcaggatatacattgtgcgagcattcggactccagcctaaggaccccaacggaaagtgtgacccatacattaagattagcatcggcaagaaaagcgtgtcagaccaagacaactacatcccttgtactctggaacctgtctttggtaaaatgtttgagctgacctgtactctgccactggaaaaggaccttaagatcactctctacgactacgatctgttgtccaaggatgagaagatcggggaaaccgtcgtcgatctggaaaatagacttctgtcgaaatttggtgcaagatgtggactgccccaaacgtattgtgtgtccggtccaaaccaatggagagatcaacttaggccttcccagttgctgcaccttttttgccaacaacatcgcgtgaaggcacctgtctacaggactgaccgagtgatgtttcaagacaaggaatactcgattgaagaaattgaagccggacggattccgaaccctcatctcgggccagtggaagaaagactggcccttcatgtcctccagcaacagggactggtgccggagcatgtggaaagccggcctctgtattcacctcttcaaccggatattgaacagggaaagctgcaaatgtgggtcgatctgttcccaaaggccttgggccgccccggacccccttttaacattacccctagacgcgcacggaggttctttctccgctgcatcatatggaataccagagatgtgatccttgacgatctttctctgaccggagaaaagatgtcggacatttatgtgaagggctggatgatcgggtttgaagaacataagcaaaagaccgacgtgcactaccgtagcctgggaggagagggaaactttaactggagattcatctttccattcgattacctgccggccgaacaggtatgtacgattgcaaagaaagatgcattttggcgcctcgataagactgaatctaagattcccgcgcgagtggtgtttcaaatttgggataatgacaagttctcatttgacgatttcctcggttcgcttcaattggatcttaataggatgccaaaaccggcgaaaaccgcaaagaagtgttccctggatcaactcgatgatgcatttcatccagaatggttcgtgtcactgtttgaacaaaagactgtgaagggatggtggccttgcgtggccgaggaaggagaaaagaagattctcgcaggtaaattggaaatgaccttggaaatagtcgcagaaagcgagcacgaagaacgtcctgcagggcaaggaagagacgaaccaaatatgaatccaaagctggaggaccccagacgaccagacacctcctttctctggtttacctcgccctacaagaccatgaagtttattctgtggagaagattcagatgggcaatcatactgttcattatcctgttcattctcctcctttttctcgccattttcatttacgctttcccgaattacgcagccatgaagttggtcaaacctttctcg

SEQ ID NO: 48060 - DNA, 6243 bp, Artificial Sequence
  derived and/or modified sequence
atgctgtgctgcttgctcgtgagggcttccaatcttccatcagctaagaaggatcgtcgctccgacccagtcgctagcctgacgtttcgcggcgtaaagaaaaggactaaagtgatcaagaacagcgtcaatccagtctggaatgaaggatttgagtgggatctgaagggcattcctctggaccagggatccgaactgcatgtcgtggtgaaggaccacgaaaccatgggacgaaaccgcttcctcggagaggctaaagttccactgcgcgaagtgctcgctactccaagcctgtccgcaagctttaatgctcctcttttggatactaaaaagcagccaacgggcgccagtctggtccttcaggtcagctacactcctcttccaggggcagtgcccctgtttcctccccctacacccctggaacccagccccacactgccagacttggatgtcgttgcagacactggcggtgaagaagacaccgaggaccagggactgacaggcgatgaagctgagccattcctcgaccagagcggaggaccaggggcccctacgaccccgaggaagcttccttcacggccccctccccattaccccgggatcaagaggaagagatctgcgcctacaagtaggaaactactcagcgacaaaccccaagacttccagatcagagtccaagtcatcgaggggagacagctgccaggcgtaaacattaaacccgtcgtcaaggtgacagcagcagggcagaccaagaggaccaggatacacaagggcaatagccctctgtttaatgagaccctcttttttaacctctttgattctccaggagagctttttgatgagcccatctttatcacagtggtggactcccgctctctgagaaccgatgcacttctcggagaatttaggatggacgttggaaccatctacagagaacctcgccacgcgtacctcagaaaatggttgcttttaagtgaccccgacgattttagtgccggagcaaggggctatttaaagacatcactgtgtgttttaggacccggcgatgaggctccattggaaaggaaagacccctccgaggataaagaagatatcgaaagcaacctgctccgcccaacaggggtggcacttaggggggctcacttctgtctgaaagtctttagagccgaggatctcccccagatggacgatgccgttatggataacgtcaagcagatattcggatttgaaagtaacaagaaaaatctggttgatccctttgtggaagtttctttcgccggaaaaatgttgtgttcaaagatcttagaaaagactgctaatcctcagtggaaccagaacatcaccctgcctgccatgtttccttccatgtgtgagaaaatgcgcatcaggatcatagactgggataggctaacccacaacgatattgttgctaccacatacctgtcgatgagcaagatctccgcacccggaggggagatcgaagaagaaccagctggtgctgtgaagccaagcaaggcaagcgacctggatgactacctagggtttttaccaacgttcggaccatgttatatcaacctttatgggagtcctagggagttcactggcttccctgacccctatactgagctcaacaccggcaagggcgagggggtggcctaccgcggcagattgttgcttagcctggagactaaactggtggagcattctgagcagaaagttgaagatctgccagccgacgacattctgcgcgtggaaaaatacctgcggcggagaaaatactcactgtttgctgcattctactcagcaacaatgctacaggatgtcgacgacgccatacagtttgaagtatccatcggtaactatggaaacaaattcgacatgacctgcctcccccttgcgtcaaccacccaatactcacgggccgtgttcgacggatgtcactattactacctgccctggggcaacgtgaaacctgtggttgtcctgagcagctactgggaggatatcagccacaggatcgagacccaaaatcaactgttgggcatcgccgacagactggaggctggtctggaacaggtacatctcgccctgaaagctcagtgtagcaccgaagatgtcgacagcctggtggctcagctcaccgatgagcttatcgcaggttgcagccagcctttgggcgacatccacgaaactccatctgctactcacctagatcagtatctgtatcagttgagaactcatcacttgtcgcagataactgaagccgctctggcgctgaaactgggacattcagaattgcctgcggcactggagcaagcggaagactggttgctccggctgcgcgcattggctgaagaaccccaaaacagcttgccagatatcgtgatttggatgctgcagggagataagcgcgtcgcatatcaaagagtgcctgctcatcaggtgctcttcagcaggcgtggagcaaactactgcggaaaaaactgcggaaagctacaaacaatttttctcaaatacccaatggaaaaggtgcccggagcaagaatgcccgttcagatcagggtgaaactgtggtttggcctgtcagtagacgagaaagaatttaatcagtttgccgagggaaaactctccgtctttgctgaaacttacgaaaatgaaaccaagctcgcactggtgggaaactgggggacaaccggcctcacatatcccaagtttagcgatgtaaccggaaaaatcaaactccccaaggacagcttccgcccttccgcagggtggacctgggccggcgactggttcgtctgccctgaaaaaactcttcttcacgacatggacgctggccatctcagttttgtggaagaggtctttgaaaatcagacccggcttcctggaggacaatggatatacatgagcgataactacaccgacgttaatggcgagaaggtcctccccaaagatgatatcgagtgcccactgggctggaagtgggaagatgaagagtggtccacagatctgaatagggccgttgacgaacagggatgggagtacagcataacaattccgcccgaaaggaagcccaaacattgggtgcccgccgagaaaatgtattacacgcacagacggaggaggtgggtaagactgaggagaagggatctgtctcagatggaagccttgaagaggcaccgtcaggcagaagctgaaggcgaagggtgggagtatgctagtctcttcggatggaaattccatctggagtatagaaaaacagacgcattccgccgcaggaggtggagaagaaggatggagccactggagaagactggccccgccgctgtcttcgctctcgaaggagccttgggtggcgtcatggacgacaaatctgaagactctatgtctgtcagcacacttagtttcggagtcaaccgccctaccatcagttgcatttttgactatggaaacaggtaccacctgaggtgttacatgtatcaagcaagggatttggccgcgatggacaaagactctttcagcgacccttacgctattgtgagctttctgcatcaatcacaaaagacagttgttgttaagaacaccctcaacccaacctgggatcagactctgatcttctacgagatcgagatcttcggtgaacccgctactgtcgcagagcagcctcctagcattgtggttgaactttacgatcacgacacttatggcgccgatgagtttatgggtagatgcatctgccagcccagcctggaacgcatgcctagactggcctggttcccactcacgaggggaagtcagccaagcggcgaattgctggcgagtttcgaattgatccaaagagagaaaccagcaatccaccacatcccaggattcgaggtccaggaaacaagccgaatccttgatgagagcgaggacaccgatctgccatacccaccaccacagcgagaagctaacatctacatggtgccacagaatatcaagcccgctctgcaaaggaccgcaatagagattctggcatgggggctgaggaacatgaaaagttaccaactggcaaatatcagtagcccaagcctggtcgtggaatgcggcggccagaccgttcaaagctgtgtcatacgcaacctgcggaagaaccccaacttcgacatatgcactctgttcatggaggtcatgttgcctcgtgaggaactgtattgcccccctatcacagttaaagtgattgataatcgacagtttggcaggcgcccagtcgtaggccaatgcaccatccgtagcttagagtcttttctttgcgacccatacagcgccgagtccccaagcccacagggcggacctgatgatgtgtctctcctttcacctggagaggatgtgctcatcgatatcgacgataaggagcctctcataccaattcaggaggaagagtttattgattggtggagtaagttcttcgcttctatcggagagagggagaagtgtggttcctacctggaaaaggattttgacaccctgaaagtttacgacactcaactggaaaacgttgaagcttttgaaggtctttctgacttttgtaacacttttaagctgtacagaggcaaaacacaggaagaaactgaggatccgtccgtgatcggagaattcaaggggttatttaagatctatcctctcccagaggatcccgctatcccgatgccacccagacagtttcaccaactggccgcacaaggcccccaagaatgcttggtcaggatctacatcgtgcgtgcattcggcctccaacccaaggatccaaacggtaagtgtgacccatatattaaaatctctatcggcaaaaagagcgtgtcggatcaggataactacataccttgcaccctggaaccagtctttggaaagatgttcgagctgacatgcactctgccgcttgaaaaggacctgaaaataaccctatacgattacgacctcctgtctaaggatgagaaaatcggcgagaccgttgtggatctcgaaaacagactcctgtctaagtttggcgcaaggtgtggtctaccgcaaacctactgtgttagcgggcccaaccaatggcgcgaccagctgaggcccagccagcttttacaccttttttgtcagcagcaccgcgtgaaagctccagtgtacagaacagacagagttatgtttcaggataaagagtacagtattgaggaaatcgaagcaggcaggatccccaatccacatctgggccctgttgaagagagactggccctgcacgtgctccagcagcagggtctggtccctgagcacgtggaatccagacccctgtacagccctctgcagccagatatcgagcagggaaaattacagatgtgggtcgacctttttccaaaagccctcggtagacctgggcctcccttcaatatcacaccaaggcgcgctcgtcgttttttccttcgctgcattatctggaacactagggacgtgatcctggatgatctcagcctcaccggggagaagatgagcgatatctacgtgaagggatggatgatcgggttcgaggaacacaagcaaaagaccgatgtacattaccgcagcctgggaggcgaaggtaattttaactggcgttttatctttcctttcgattatctgcccgcagaacaggtatgcaccatcgctaaaaaggatgctttctggcgtttggataaaactgaatccaagatccctgccagggtagtcttccagatctgggacaatgataaatttagcttcgacgacttcctgggatctttgcagctggacctgaatcgcatgcccaaaccagcgaagaccgcaaagaaatgctccctcgaccaactggacgatgctttccatccagaatggttcgtgagcctgttcgagcagaaaacagtcaagggttggtggccatgcgtggctgaagaaggcgagaagaaaatactggctgggaagctagagatgacactcgagatcgtagccgaaagcgaacatgaggaacgtcccgccggacaaggaagggatgagccgaacatgaaccccaagctggaggacccaagacggccagatacatcttttctatggtttacgagtccgtacaagaccatgaaatttatcctgtggaggcggttccggtgggctatcatcctctttatcatcttgttcatcctgctcctgtttttggcaatcttcatctacgccttcccgaattacgccgctatgaaactggtgaagcctttttca

SEQ ID NO: 48061 - DNA, 6243 bp, Artificial Sequence
  derived and/or modified sequence
atgttgtgttgtttgctcgttcgagctagtaatttacctagtgctaaaaaagaccgccgatccgacccagttgcttcattgacctttaggggcgttaaaaagcggactaaagtaatcaaaaatagcgtaaatcctgtctggaacgaaggtttcgagtgggatctaaagggaattcctcttgatcaaggaagcgagctccacgttgttgttaaggatcacgaaacgatgggtcggaaccggttccttggagaagctaaggtacctttgagggaggtcttggccactcctagtctatcggcttcgtttaatgccccattgcttgacactaaaaagcaacctaccggggcttccctggttcttcaagtatcctacacacccctaccaggagcagtccctttgtttccgcctccgactccacttgaaccatcgcccacattacctgatcttgatgttgttgccgacacaggtggtgaagaagatactgaagatcagggactcacaggagatgaagctgaacccttcttagatcaatctggaggacctggagcccccaccactccccgtaagctcccttcacggccaccccctcactatcctggaattaaacgaaagagatcagctcccacttctagaaaattgttgtcagataagcctcaagacttccaaatcagggtgcaggttatcgagggtcgtcaacttccaggggtgaacattaaacctgtcgtgaaggtcacagctgcaggccagacaaagagaacccgcattcataaaggtaattcccctcttttcaatgagacacttttctttaacctattcgattctccaggcgaattattcgacgagccgatatttatcacggtggttgattcgcgctctcttagaaccgatgctctccttggggaattccgtatggatgttggtacaatataccgagaacctagacacgcctatttgagaaagtggctattactttcagatcctgacgatttttcggccggagctcggggttacctaaagactagcttgtgtgttctaggtccaggtgacgaggccccattagagcgcaaagatcccagtgaagataaagaagatatcgagagtaatttattgagaccaacgggtgttgcattaaggggcgctcatttctgccttaaagtttttcgcgcagaagatcttccacaaatggatgatgctgtcatggacaacgttaagcaaatcttcggattcgaatccaataaaaagaacctcgttgatccgtttgttgaggtctccttcgcaggaaaaatgttgtgttccaagattctggagaaaactgctaaccctcagtggaatcagaatattactttacctgccatgtttccttccatgtgtgaaaaaatgaggattcgcatcattgactgggaccgacttacccacaatgacatcgtggccaccacatatctatccatgagcaaaattagcgcacctggtggtgagattgaggaagagcctgcaggtgccgttaaaccatctaaagcttctgatttggatgactacctaggtttcctcccaacattcggtccttgctatataaatctgtatgggtcaccgcgtgagtttacagggttccctgacccttatactgaactgaatacaggtaaaggggagggggtggcctataggggtcgtttactcttatcccttgagactaagctcgtcgaacactcggaacagaaagttgaagatctcccggctgacgacattctgcgtgtagaaaagtatctgcgcagaaggaagtactctcttttcgcagctttctatagcgctacaatgctccaagatgtggatgatgccattcaatttgaagtttcaataggtaattacggaaataaattcgacatgacgtgtcttcccttggcctcgacaacccagtattcaagagccgtttttgatgggtgccattattattatcttccatgggggaatgttaaacccgttgtggtcctgagttcttattgggaggatatttcacaccgtattgagacacagaatcagttgctggggattgccgacagattagaagctgggcttgaacaggtccatttggcgcttaaagctcaatgctctacagaagatgtggacagcttggttgctcaacttactgacgaattgatagcaggctgctctcagcctctaggagatatacatgaaaccccatctgcaacccacttagatcaatacctgtatcaattgcgtacgcaccatctctctcaaatcaccgaagctgccttggctcttaaattaggtcattcagaacttcccgcagcactcgagcaggctgaggactggctcctcaggctaagagcacttgccgaggagcctcaaaatagtttaccagatatcgtcatttggatgctacaaggagataaaagggtggcttatcagagggtgcccgcgcatcaggtccttttttcgagaaggggagcaaattactgcggaaaaaattgcggtaagttacaaacaatcttccttaaatatcctatggaaaaggttccgggtgcaaggatgcccgtccagattcgcgtcaagctttggttcggtctttcggttgacgaaaaagagtttaaccagttcgctgagggtaaattgtcagtatttgctgagacctacgaaaatgagaccaagctggctctagtgggaaattggggaactaccgggcttacttatcctaaattctcagatgtgactggtaagattaaattacctaaggattctttccgacccagcgccggttggacttgggcgggagattggttcgtgtgtcctgaaaagacattacttcacgatatggatgccgggcatttgtcattcgtggaagaagtttttgagaatcagacccgtcttccaggtggccaatggatctacatgagtgacaactacactgatgtgaacggagaaaaagtgctcccaaaggatgatattgaatgtcctcttggatggaaatgggaggatgaagaatggtctaccgacctgaatcgagctgtggacgaacagggttgggaatactccattactatacctcctgagcgaaagccgaaacattgggtgccagcagagaaaatgtactatacgcatcgtcgtagacgctgggtcaggcttagaagacgagatttgagtcagatggaagcccttaaacggcacaggcaagctgaggctgaaggggagggatgggaatacgcgagtctcttcgggtggaagtttcatttggagtataggaagactgatgcttttagaaggaggcggtggagaaggcggatggagccattggaaaaaacaggacctgccgctgtgtttgctctggaaggtgccctgggaggtgtgatggatgacaaatcggaggattcaatgagcgtttccacactttctttcggggtgaaccgaccaactatatcatgcatcttcgattatggaaataggtatcatttgcgatgttacatgtaccaagcaagagatcttgcggctatggacaaggatagctttagcgacccttatgctatcgtttcctttctccatcagagccagaagaccgtcgtcgtaaaaaacactctgaacccaacttgggatcagacattgatattttatgaaatcgaaatcttcggagagccagctacagtggctgagcagcctcccagcatcgttgtcgagctttacgatcatgacacgtacggtgctgacgagttcatgggtcgttgcatttgtcaaccttctttagagagaatgccaagacttgcttggttccctctgacccgagggagccaaccatcaggtgaactactggccagcttcgagttaatccagcgtgaaaagcctgcaatccatcacattcctggctttgaagtacaagaaacctcccggattctagacgaatccgaggataccgatctgccatacccaccacctcagcgggaggctaacatctacatggtgccgcaaaacattaagcctgcgctgcaaaggacagctatcgagattctcgcttggggtttgcgaaacatgaaatcttatcaacttgcgaatatatcgtcccctagtcttgttgtggaatgtggtggtcagactgtacaatcctgcgtaatcagaaatctccgtaaaaatcctaatttcgatatatgcactctgttcatggaggtgatgctgccaagagaagagctgtattgccctccgattaccgtcaaagttattgataatcggcagtttggaagacgaccagtggtaggccagtgtaccatcaggagccttgagagcttcttgtgcgatccttattccgcagagtctcctagccctcagggtgggcccgacgatgtgtcattgctttccccaggagaagacgtgctgatcgatattgatgataaagagcctctaatacctattcaggaagaggagttcatagattggtggtcgaagttttttgctagcataggtgagcgtgaaaagtgtggatcttaccttgagaaagatttcgatacacttaaggtgtatgatacccagttggaaaatgttgaagcattcgaaggattatctgatttttgtaacaccttcaagctgtataggggcaagactcaagaggagaccgaagacccatctgtgataggagagtttaaaggactttttaaaatttatcccctgcctgaggatccagccattccgatgcccccaaggcagttccatcaattagccgcacagggtccacaggaatgcttggtaagaatctacatagtcagggctttcggtttgcagccgaaggatcccaacggcaagtgcgatccctatataaagataagtataggaaagaaatcagtgtccgatcaagataattatattccctgtaccctggaacctgtgtttggaaagatgttcgaactcacatgtactctccctctggaaaaggatctaaagatcacactatatgactatgacttattgtccaaggacgagaagataggcgaaactgttgtcgatcttgaaaacaggttgttgtcaaagttcggcgcgaggtgtgggctccctcaaacctattgcgttagcggccctaaccagtggagagatcagcttcgaccgtcacagctattgcatcttttttgtcagcagcatagagtcaaggcgcctgtttatcggacggaccgagtaatgttccaggataaggaatactccatagaggaaatagaagctggtcgaatacctaatcctcatctaggccctgtggaagaaagattagctctgcacgtgctacaacagcaaggattggtccccgagcacgtcgagagtcgcccactgtacagtccgttgcaaccggacatcgagcagggtaaactacaaatgtgggtagatcttttcccgaaggcgcttgggagaccaggtccaccattcaatatcacccctcggagagctagacgattttttcttaggtgcataatctggaacacgcgggatgttattctcgatgacctttcgctaacaggagaaaagatgagcgacatctatgtaaaaggttggatgatagggtttgaagagcacaaacagaaaacagacgtccattatcggtcactgggtggcgagggtaacttcaactggagattcattttccctttcgattatctgcctgctgagcaggtttgtacaatcgcgaagaaggatgccttctggcgtctcgataaaacagagtccaaaataccagctagagttgttttccagatctgggataacgataaattttcgttcgatgactttcttggatctttgcagctagacttaaatagaatgccaaaaccagccaaaactgctaaaaaatgttctcttgatcaactcgatgacgcatttcatcctgagtggtttgtctctctattcgagcaaaagaccgttaagggatggtggccttgcgttgctgaggaaggggaaaaaaagatcttggctgggaagctcgaaatgactttggagatagtggctgaatctgaacatgaagaaaggcccgctgggcaaggcagagacgagcctaacatgaatccaaaattagaggatccacggcggccggatactagcttcctctggtttaccagcccatacaagactatgaagttcatattgtggcgccggtttcgctgggcgatcatcttgttcataattctttttattctgctacttttcctagcaatatttatatacgctttcccgaattatgcagcgatgaagttggttaaaccattcagt

SEQ ID NO: 48062 - DNA, 6243 bp, Artificial Sequence
  derived and/or modified sequence
atgctgtgttgcctgctcgtgcgggcgtcgaacctgccttcggccaagaaggatcgcagatcggacccagtcgcatccctcacctttagaggcgtgaaaaagaggaccaaggtgatcaagaactcggtgaaccctgtgtggaacgaaggattcgagtgggacctgaagggaatccctctggaccagggatcggaattgcacgtggtggtgaaggatcacgaaaccatgggtcggaatcgcttcctgggcgaagccaaagtgccgttgcgcgaggtgctggcgactccctccctgagcgccagctttaacgcgccgttgctggacaccaaaaagcaacctaccggcgcgtcgttggtgctgcaggtgtcatacactcccctcccaggcgcagtgccgctgttcccgccgccaacccccctcgaaccgtccccaaccctgccggacctggatgttgtggccgatacgggcggagaagaggacactgaagatcagggattgaccggagatgaggccgaaccattcctcgaccaatccggaggtccgggagccccgaccacgccacgcaagctcccttcgcggccaccgccgcactacccaggcatcaagagaaagcggtccgcaccgacctcacggaaacttctgtccgacaaaccccaggactttcaaattagagtgcaagtgatcgaaggacggcagctccctggcgtcaatatcaagccggtcgtgaaagtgactgcggcaggacagaccaaaagaacccggatccataagggcaactctcctctgttcaacgaaactctgttcttcaacctttttgattcaccaggagagcttttcgacgaacccatctttatcaccgtggtcgactcgagatcactcagaaccgacgccctcttgggtgagttccggatggatgtgggaacgatctaccgcgagcctcgccacgcctacctgcgcaaatggttgctgctgtcggatcccgatgatttcagcgcgggagccagaggataccttaagacttccctgtgcgtcttgggccctggagacgaagccccgctggaacgcaaggacccaagcgaggacaaggaggacattgaatccaacctcttgcggccaacgggggtggccctgcggggagcccacttctgtctgaaagtgttcagggctgaggacctcccgcagatggacgatgcggtcatggacaacgtgaagcaaatcttcggatttgagagtaataagaaaaacctcgtcgacccattcgttgaggtgtcattcgcaggcaagatgttgtgttcaaagatcctggagaaaaccgcaaacccgcagtggaatcagaatatcaccctgccagctatgttcccctcaatgtgcgagaagatgcgcatccgcatcatcgactgggatagactcactcacaacgacatcgtggctaccacctacctgtccatgtcaaaaatctccgctccgggaggcgaaatagaggaggagccggccggtgcggtgaagccatccaaagcatctgatcttgacgactacctgggattcttgccaaccttcggaccttgctacatcaacctgtacgggtcgccgcgggaattcaccggtttcccagacccgtacaccgagcttaacacgggaaagggcgaaggcgtggcatacagaggacggcttctgctgagcctcgaaactaagctggtggagcactccgagcagaaggtggaagatctccctgcggatgatatcctgagggtcgaaaagtacctgcgccgccgcaaatactccctgttcgctgccttctactctgctactatgctccaagacgtcgacgatgcgatccagttcgaggtgtcgatcggaaactacgggaacaagtttgatatgacctgtctccctctggcttcgacgacccagtacagccgggcagtgttcgacggatgccattactactatctcccttggggcaacgttaaaccagtggtggtgctgagctcctactgggaagatatatcgcacagaatcgaaactcagaatcaactcctgggaattgcagatcgactcgaggcgggactcgaacaggtgcatctggcactcaaggcgcaatgttccactgaggacgtcgacagccttgttgctcagttgacggacgaactcatcgccggttgttcccagccgctcggagatatccacgaaactccgagcgccacccacctggaccagtacctgtaccagctgagaacccatcatctctcgcaaatcaccgaggccgctctggccttgaaattgggacattcggaactgccggcggctttggagcaagcggaggattggttgctccgactgcgcgccttggccgaggaaccgcagaacagcctgccggatatcgtcatttggatgctgcagggcgacaaacgggtggcgtatcagcgggtgccggcccaccaggtgttgtttagccgcaggggagccaactactgcggcaagaattgcggaaaactgcagacgatcttcctgaagtaccccatggagaaggtgccgggagctcgcatgcccgtgcagatccgagtcaagctctggtttggactgtccgtcgatgagaaggagttcaatcaattcgcagaaggaaaactgtccgtgttcgcggagacttacgaaaatgaaaccaaactcgctctcgtgggcaactgggggacgaccgggctgacttacccgaagttctcggacgtgactggaaagattaaactgcccaaggactcgttccggccgagcgccggctggacctgggcaggggattggtttgtgtgccctgagaaaacgttgctgcacgacatggatgccgggcacctgtcgttcgtggaggaagtctttgagaatcaaactcggttgcctggcggacaatggatttacatgtcggataactataccgacgtcaacggagaaaaggtgcttccaaaggacgacatcgaatgcccactcggatggaagtgggaagatgaggagtggagcacggatctgaatcgcgcggttgatgaacaggggtgggaatacagcattactatccctccagaacgtaagccaaagcactgggtgcccgccgagaaaatgtactacactcatcgacggcgcaggtgggtccggctccgcagacgcgacctgtcacagatggaagctctgaaacggcaccggcaagccgaagccgagggtgaaggttgggaatacgcgtcgttgttcggatggaaattccacctggagtatagaaagactgatgcgttcaggcgccgccgctggcgtaggcggatggaaccgctggaaaaaactggaccggctgcggtgttcgctctggaaggcgcattgggaggagttatggacgacaagtccgaggactccatgtccgtgtcgaccctcagcttcggcgtgaatcggcccactatcagctgcatctttgactacggaaatagataccacctgcgctgctacatgtatcaggcccgggacctggcggccatggacaaggactctttctccgatccgtacgccatcgtgtcattcctccaccagagccaaaagactgtggtggtcaagaacactctcaacccaacttgggaccaaacgcttatcttctacgagatcgaaatctttggagagccggcaaccgttgcggagcaacccccctcaatcgtggtggagctctacgaccacgacacctacggcgctgatgaattcatgggacgctgtatctgtcagccgagcttggaacggatgcctcggctggcttggtttccccttacccgaggatcccagccatccggcgagctcttggcgtcgttcgaactcattcagcgggagaagccagcaattcaccacatccccgggttcgaagtgcaggagacttcccggattttggacgagagcgaggatactgatctgccgtaccccccgccgcagagagaagcgaatatctacatggtgccacagaacattaagcctgccctgcagcgcaccgcgatcgagatcctggcgtgggggttgagaaacatgaagtcgtaccaactggccaacatctcatccccgtcacttgtcgttgaatgcggtggacagactgtccagtcatgcgtcatcaggaacctgcgaaaaaaccccaacttcgatatctgcaccttgtttatggaggtgatgctccctagagaagaactctattgccctcccattactgtgaaggtgatcgacaacagacaattcggacggcgcccggtcgtcggccagtgtactatccgctccctggagtcgttcctgtgcgacccgtattcagcggaatcgccttcccctcagggtggacctgatgacgtctcgctgttgtccccaggcgaggacgtgctgatcgacattgacgataaggagccactcatccccatccaagaagaggagttcatcgactggtggtccaagttcttcgccagcatcggcgagcgcgaaaaatgcggaagctacctggagaaggattttgatacgcttaaggtgtacgacacccaactggagaatgtggaagcctttgaaggtctgtcggacttctgcaacacctttaaactgtacagaggtaagacccaagaggagactgaggacccgtccgtgattggggagtttaagggactgttcaagatctacccattgccggaggacccggcgatccccatgcccccgagacagttccatcaactggccgcccaaggcccgcaagaatgcctcgttcgcatttacattgtccgagccttcggcctgcagccaaaagaccctaacggcaaatgcgacccttacatcaaaatcagcatcggaaagaagtccgtctccgaccaggacaactacattccgtgcaccctggagccagtgtttggaaaaatgttcgagctgacgtgtactttgccactggaaaaggacctgaagattaccctctacgactacgatctgttgagcaaagatgaaaagatcggcgagacggtggtggacctggagaatcggctgctgtcaaagtttggagcgcggtgcggtctgccgcaaacctactgcgtgtctggtccgaatcagtggagagatcaactcagaccgtcccaattgctgcacctgttttgccaacaacatcgggttaaggcacctgtgtacagaaccgaccgggtcatgtttcaggacaaagagtacagcatcgaggagatcgaggctgggcgcattccaaatccgcatctcggcccggtggaggagcggctcgccctccatgtcctccagcagcagggactggtcccagagcacgtcgagagcaggccgctgtactccccgctgcaaccggatattgagcaaggtaaactccagatgtgggtcgatctgttccctaaggccctggggcggcctggtcccccgttcaacatcaccccacgccgcgccagaaggttcttcctgcggtgtatcatctggaatacccgggatgtgatcctcgatgacctgagcctcacgggcgaaaagatgtccgatatctacgtgaaggggtggatgatcggcttcgaggagcataagcaaaaaaccgatgtccattaccgctccctcggaggagagggaaacttcaattggcgcttcattttcccgtttgactacctgccggccgaacaggtctgcactatcgcgaagaaggacgcgttctggcgattggacaagaccgaatcaaaaatcccagcccgcgtggtttttcagatttgggataacgacaagttctcgtttgatgacttcctgggtagtctgcagctggacctgaatcgcatgcccaagcctgcaaaaaccgccaagaagtgttcgctggatcagttggatgacgccttccacccggagtggttcgtgtccctgtttgagcagaaaactgtgaagggctggtggccttgcgtggccgaagaaggggagaaaaagatcctggccggcaagctggaaatgactctggaaatcgtggcagaatccgaacatgaagaacgcccggccggacagggtcgcgacgaaccaaacatgaatccaaagctggaggacccgcggcgcccggatacttcctttctgtggtttacttcaccgtacaagactatgaaattcatcctgtggagaaggttcagatgggccatcattcttttcattatcctctttatcctgctcctcttcctggccattttcatctacgcctttccgaattacgccgcgatgaaactggtcaaaccattctca

SEQ ID NO: 48063 - DNA, 6243 bp, Artificial Sequence
  derived and/or modified sequence
atgctgtgttgtctcttggtgcgggcttcaaacctccctagcgccaagaaggacaggcggtccgatccggttgcgtcactgactttccgcggagtcaagaagcggactaaagtcatcaaaaactccgtcaaccctgtgtggaatgagggatttgagtgggatctgaaagggattccactcgatcagggctcggagcttcatgtcgtggtgaaagaccacgagacgatggggcggaaccggtttctgggcgaagcgaaggtccccctgagagaagtgctcgcaaccccaagcctgtccgcgtccttcaacgctccactgctggacactaaaaagcaacctaccggtgcgtcgcttgtgcttcaagtgagctacacccctctgccgggggcggtgccgctcttcccgccgccgactccattggagccttcaccgaccctgccggatctcgacgtagtggcggataccggaggagaggaagataccgaggatcagggcctcaccggcgacgaggcggagccatttctggaccagtcgggtgggcctggagcccccaccactccacggaagctcccatcgcgcccgccaccccactatccgggtatcaaacgtaagcgatccgcccctacgtcacgcaagctcctgtccgacaagccacaggatttccaaatcagagttcaagtgatcgaaggacggcaattgcctggggtcaacatcaagcccgtggtgaaagtcactgccgccggacagactaagcgcacgcgcatccacaagggtaactccccgctcttcaatgagacgctgttctttaacttgttcgacagccctggtgagctgtttgacgagccgatctttatcactgtcgtggatagcagatcactgcgcaccgacgccctgcttggcgaattcagaatggatgtgggcactatctacagggaaccgaggcacgcatacctgcgcaagtggctcctgctgtccgacccggacgacttctcggcgggtgctcgcggatacctcaagacctccttgtgcgtgctgggacctggagacgaagcgcccctggagcgcaaagacccatcggaggacaaagaggatatcgagtccaacctgttgcggccaaccggcgtggcgctccgcggcgctcatttctgtctcaaggtctttcgcgccgaggacctgccacaaatggacgacgccgtaatggacaatgtcaagcaaatctttggctttgagtcgaacaagaagaatttggtggatcctttcgtcgaagtgagcttcgcaggcaagatgctctgctccaagattctcgagaaaacggctaacccgcagtggaaccagaatatcaccctgccagcaatgttcccgtcgatgtgcgagaagatgcggatcaggatcattgactgggatcggctgacccacaacgacatcgtcgccactacttacctctcaatgtcgaagatttctgcgcctggaggcgaaatcgaggaagaacccgcaggagcggtgaagccgtctaaggcatcagacctggatgattacctgggattcctgccaaccttcgggccttgctacattaacctgtacggctccccccgcgaattcacgggcttcccagatccttacaccgaattgaacactggaaaaggcgaaggagtggcgtaccggggacggttgctgctgtcgctcgaaactaagctggtcgaacactcggagcagaaagtggaagatttgcccgctgacgacatccttagggtggaaaagtacctgcgcagacgcaaatacagtctgttcgctgcattctactccgcgaccatgctccaagacgtcgacgacgccatccagttcgaagtgagcatcggaaattacggaaacaagttcgatatgacctgcctcccgctggcttccactactcaatactcgcgggctgtgttcgatggctgccattactactacctcccttggggaaatgtgaagccagtggtggttttgtcaagctactgggaggacatcagccatcggatcgaaactcagaatcagctgttggggatcgcagatcggcttgaagctggccttgagcaagtgcatctcgcgctgaaagcccagtgctcaactgaggacgtcgattccctggttgcccagttgactgacgaactcatcgcggggtgcagccaaccacttggtgacatccacgaaaccccatcggccacccacctggatcagtatctgtaccagctgcgcacgcaccacctgagccaaatcactgaagcagccttggctttgaagctggggcattcagagctgcctgccgcgctggaacaagccgaggactggcttctgcgcctccgggccctcgcagaagagcctcaaaattcattgcctgatatcgtcatctggatgctgcagggagataagcgcgtggcctaccagcgcgtgccggcacatcaggtgctgttcagccgcagaggggcgaactactgcggtaagaactgcggcaaactgcagaccatctttctgaagtacccgatggaaaaggtcccaggggcgcggatgccggtgcaaatacgcgtgaagctgtggttcggactttcggtcgatgagaaggaattcaaccagtttgccgagggaaaactgtcagtgttcgcggagacgtacgaaaacgaaactaagttggcgctggtggggaactgggggacgacgggcttgacgtaccctaaattctccgacgtgaccggcaagatcaagctgcccaaggactcctttagaccttcggcgggctggacttgggcaggagattggttcgtctgccctgagaaaacccttcttcatgatatggacgcgggccatctgtcgtttgtcgaagaagtgtttgaaaaccaaactaggctccctggtggacagtggatctacatgagcgataactacaccgacgtgaacggggagaaggtcctgcctaaggatgatatcgagtgtccgctcggctggaagtgggaggacgaagaatggtcgaccgaccttaaccgcgccgtcgatgaacagggatgggaatacagcatcactatcccgccggagagaaagccgaagcactgggtcccggcggagaaaatgtactacactcatagaaggcggagatgggtccggctgagacgacgcgatctctcacaaatggaagcattgaagagacacagacaagctgaagccgagggagagggttgggaatacgcctccctgtttgggtggaagttccatctggagtaccgcaaaaccgacgcgtttcggcgccggagatggcgacgccgtatggagccgcttgaaaagacgggaccggccgccgtgttcgcgctcgagggtgccctcggcggtgtgatggatgacaagagtgaagattcaatgtcggtgtcaacgctgagcttcggcgtgaaccgccctaccatctcgtgcattttcgactacggcaaccggtaccacctgaggtgctacatgtaccaggcccgtgacctggcagcaatggacaaagattcattttccgatccttacgcaatcgtgagtttcctccaccaaagccaaaagacggtcgtggtgaagaataccctcaaccccacttgggaccagaccctgatcttctacgagattgagatcttcggcgaaccagctaccgtggctgagcagccgccgtcaatcgtggtggagctttacgaccatgatacttatggagcggacgaattcatgggaaggtgcatttgccagccgtccctggaacgcatgccccggcttgcttggttcccgctcactagggggtcccagccgtccggagaactcctggcatcgttcgaacttatccagagggagaagcctgccattcaccacatccctggcttcgaagtccaggagacgtcaagaatcctggacgaaagcgaagataccgatctgccatatccaccaccccagcgcgaggccaacatctacatggtgccgcagaatatcaagcccgcgctccaacggaccgctatcgaaatccttgcttggggactccgaaatatgaagtcataccagctggccaacatctcgtcgccatcgttggtggtggaatgtggaggacagaccgtgcaatcgtgtgtgattagaaacctgcgcaagaacccgaatttcgacatctgtactctcttcatggaggtgatgctcccgagggaagagttgtactgtccccccatcaccgtgaaggtgatcgacaaccggcagtttggtcggcggccggtggtgggtcaatgcactatccgctcactggaatcattcctgtgcgacccgtatagcgccgaatctccgtctccacagggtggcccagatgatgtcagcctgctctcgccgggagaggacgtcctgatcgatattgatgacaaagaacctctgattccaatccaggaggaagagttcatcgactggtggtcgaagttcttcgcttccatcggagaaagggaaaagtgcggatcatacctcgaaaaggactttgataccctcaaagtgtacgatacccagttggaaaacgtggaggctttcgaaggactttctgacttctgtaatacgttcaagctgtacagaggtaaaacccaagaagagacggaggatccctcagtcatcggagagttcaagggactgttcaagatctacccactgccagaggaccctgccatcccgatgccacctaggcagtttcatcagcttgcagcccagggaccgcaggagtgtctggtcagaatatacatcgtccgcgcctttggcttgcagccgaaggaccctaacgggaagtgcgacccatacatcaagattagcatcggcaagaagtctgtgtcggatcaagacaattacattccgtgcactctcgaaccagtctttggaaagatgtttgaactgacttgtaccctcccactggagaaggacctcaagattactctgtacgattacgacctcttgtcaaaagatgagaaaatcggtgaaaccgtggtggacctcgaaaacaggctgctgtcaaaattcggagcgcgctgtggtttgccccagacgtactgcgtgtccgggccaaaccaatggagggatcagctgcggccaagccagctgctgcatctcttttgccagcaacacagagttaaagctcctgtctacagaactgatcgcgtcatgttccaagataaggaatactcaatcgaagagatcgaggcaggacggatccctaaccctcacctcggaccggtggaagaaaggctggcgctccacgtgctccagcagcagggcctcgtgccggaacacgtggagtcccgcccgctgtactcgccccttcaaccggacatagaacagggaaagttgcaaatgtgggtggacctgttcccgaaggcgctgggcagaccgggaccaccattcaacatcactcctagaagagcacgccgcttcttcctccggtgtatcatctggaatacgcgcgatgtcatcctggatgacttgtccttgacgggcgagaagatgagcgatatctacgtgaaaggatggatgatcgggtttgaggagcacaaacaaaagactgacgtgcactaccggtcactcggaggtgagggtaacttcaattggcgcttcatcttcccatttgattatctcccggccgagcaggtgtgcactattgctaagaaggatgcgttctggcgcctcgacaagaccgagtcaaagatcccggcacgcgtggtgttccagatctgggacaatgacaagttctcgtttgatgacttcctcgggtcgctccagctcgatctgaacagaatgccgaaaccggccaaaaccgccaagaagtgcagcctggaccagctcgacgatgcgttccaccctgagtggttcgtgtcgctgtttgaacaaaagacggttaaggggtggtggccgtgcgtggccgaagaaggtgagaagaagattctggccggaaagctggagatgaccctcgaaatcgtggcagaatccgaacacgaagaacggcctgcgggacaaggacgggacgaacccaatatgaatcctaagctcgaggatccgagacggcccgacacttccttcttgtggtttacctcaccttacaagaccatgaagtttatcttgtggaggcgcttccgctgggccatcatcctgttcatcatcctctttatcctgctcctgttcttggccatcttcatctatgccttccccaactacgctgccatgaagctggtgaagcctttttct

SEQ ID NO: 48064 - DNA, 6243 bp, Artificial Sequence
  derived and/or modified sequence
atgctgtgctgcctgctggtgcgcgcctccaacctgccgtccgcaaagaaggaccggcgatcggacccggtggcgtcactgactttccgcggcgtgaaaaagaggaccaaggtgatcaagaattccgtgaacccggtgtggaacgaggggttcgaatgggacctcaaaggtatcccgctggaccaggggtcggagttgcatgtggtggtgaaggatcacgaaacgatgggtcgcaaccggtttctgggagaggccaaggtcccgttgagggaagtcctcgccaccccgtccctgagtgcatccttcaacgcccctcttctggatactaagaagcagcctactggggcaagcctggtgctccaggtgagctacacgccccttccaggagctgttcccctcttcccaccgcctacgccactggaaccatcccctactctgccggatctcgacgtggtggccgataccggaggtgaagaagataccgaggaccagggcttgactggggatgaagcggaaccctttctggaccagtccgggggaccgggagccccaaccaccccaagaaaactgccgtcccggcctccgccacactaccccggaattaagaggaagcgcagcgcgccgacctcaagaaagctcctctccgacaagccgcaagactttcaaattcgggtacaagtgatcgagggacgacagctgccgggagtcaacatcaagcccgtggtcaaggtcaccgccgctggccagactaagcggacgaggatccataagggaaattccccactcttcaacgagactcttttcttcaatcttttcgattctccgggcgaactgtttgatgaaccgatctttatcaccgtggtggactcccgcagcctccgcacggatgccctgctgggggaattccgcatggatgttggtaccatctacagggagccgagacacgcctacctccggaaatggctgctcctctcggaccctgatgacttcagcgctggagcgagaggctacctcaagacctcgctgtgcgtgctcggcccaggagatgaggccccgttggaacggaaagacccgtccgaggacaaggaagatattgagtcaaacctgctcagaccgaccggagtcgccctgagaggtgcacatttctgcctcaaggtgtttcgggcagaagatctgccccagatggatgacgccgtgatggacaacgtgaaacagatattcggcttcgaatcaaacaagaagaacctggtggatccctttgtggaagtgagcttcgccgggaagatgttgtgcagcaaaatcctcgaaaaaactgcaaatccgcaatggaaccagaatatcacccttccagctatgttcccatcaatgtgcgagaaaatgcggataaggattattgactgggaccgcctcactcacaacgacatcgtggctaccacctacctgagcatgtccaagatctcagcgccgggaggagagattgaggaagaaccagcgggagccgtgaaaccatccaaggcgagcgacctggacgactacctgggttttctgccgaccttcggaccgtgctacatcaacctgtacggttctccgcgggagtttaccggattcccggatccgtatactgagctgaatactggaaagggagaaggagtcgcctaccgcgggagactgctcctgtcgttggaaactaagctcgtggaacattcagaacagaaagtcgaggacctgcctgccgatgacatcctgcgcgtggaaaagtacttgcgccgcagaaaatattcgcttttcgctgcgttctactcggcaactatgctgcaggatgtggacgacgcaatccagttcgaggtttccatcggaaattacggaaacaagttcgatatgacttgcctccctctggcttcgaccacccagtacagccgcgccgtgttcgacggatgccactactactacctgccttggggaaacgtcaagccggtcgttgtccttagttcgtactgggaggacatctcccaccgcatcgaaacccagaatcagctgctcggcatcgcggaccggctcgaggcagggctggagcaggtacacctggccctcaaagcgcagtgctcgactgaagatgtggactctttggtggcgcaactgaccgatgaactgatcgccggatgttcgcaacctctcggggatatccacgaaactccgtccgccacccacctcgatcagtatctctaccaactccggactcaccacctctcacagattactgaggctgccctcgcactgaagctgggacacagcgaacttccagcagcattggaacaggccgaggattggctcttgagactgcgcgcgctcgctgaggaacctcaaaattcacttccggacattgtgatttggatgctccagggtgacaagagggtggcttaccagcgggttccggcccaccaggtgttgttttcacgcagaggagccaactactgcggaaagaattgcggaaaattgcagacgatctttctgaaatacccgatggagaaagtcccgggggcccggatgccagtccagattcgcgtgaagttgtggttcggactgagcgtcgacgagaaggaatttaatcagtttgccgaaggaaagctgtcggtctttgccgaaacgtatgaaaatgaaaccaagctggccctggtcggcaactggggtactactggactcacttaccctaagttctccgacgtgacgggaaagatcaagctcccaaaggacagcttcagaccgagcgcggggtggacttgggcaggcgactggttcgtttgcccagaaaagaccctgctgcatgatatggacgccgggcacctctcgtttgtggaggaggtgttcgagaaccagacccggctgcccggagggcaatggatttacatgtcggacaactacaccgacgtgaatggcgaaaaggtgcttccgaaggacgatatcgaatgcccattgggctggaagtgggaagatgaggagtggtccacggacctgaacagggctgtcgacgaacaaggctgggaatactcgattacgatccccccggaacgcaagcctaaacactgggtgccggccgagaagatgtactacacccatagaagaagaaggtgggtgagactccgtcgacgcgatctctcgcaaatggaggctctgaaacggcataggcaagcagaggccgaaggagaggggtgggaatatgcctctcttttcggatggaagttccacctggaatacaggaaaacggacgcattcagacggagacgctggcggcgacgcatggagccactcgaaaagactggccctgctgctgtgttcgcacttgagggtgcgctgggcggagtcatggacgacaaatcggaggactcgatgtcggtgagcaccctgtcgttcggcgtgaatcggccgaccatcagctgcatctttgactacgggaatcgctaccatctgcggtgctacatgtaccaggctcgggatttggccgcgatggataaagactcattctcagacccgtacgcgatcgtcagcttccttcatcaatcgcaaaaaaccgtggtcgtgaaaaataccttgaacccaacttgggaccagactctcatcttctacgaaatcgaaatcttcggcgaaccggccactgtcgcagagcaaccgccatcgatcgtggtcgagctgtacgatcacgacacttacggagctgacgagtttatgggacgctgtatctgtcagccgagtttggagagaatgccccggctggcgtggttcccgctgacccgcggatcccagccatctggcgaactgctcgcctccttcgaactgatccaaagggaaaagccggccatccatcatatcccgggcttcgaggttcaagagacttcccggattcttgacgagtccgaggatactgacctgccatacccaccaccgcaacgcgaggcgaatatctacatggtgccacagaacataaagcctgcacttcaacgcaccgctatcgagatcctcgcctggggactccgcaacatgaagagctaccagctggcgaacatttcctcacctagcctggtcgtcgaatgtgggggccaaactgtccagtcgtgtgtgatccgcaatctgcggaagaatcctaacttcgacatctgtactcttttcatggaggtgatgctgccccgcgaggagctgtactgcccgcctattactgtgaaggtgatcgacaacagacaattcggacggcggccagtcgtggggcagtgcactatccgctcgctggaatcatttctttgtgacccttactccgcagaaagcccctcaccgcaaggaggccctgatgatgtgtcactgctttcgccgggcgaggacgtgctcatcgacatcgacgacaaggaaccgctcattccaatccaggaggaagagtttatcgattggtggtccaagttcttcgcatccatcggggaaagagagaaatgcggttcgtacctggaaaaggacttcgacactctgaaagtgtacgacacccagctggagaacgtggaggcgttcgagggtctgtctgacttctgcaataccttcaaactttaccgcggcaagacccaggaagaaactgaagatccttccgtgatcggagaattcaaaggactgtttaaaatctacccactgcccgaagatccagcaatcccgatgcctcctagacaattccaccagttggccgcccagggaccccaagagtgcctcgtgaggatctacattgtccgggcattcggacttcagccgaaggacccgaacggtaagtgcgacccgtacatcaagatcagcatcggaaagaagtccgtctcggaccaggataactacatcccatgcaccttggagccagtgttcggcaagatgttcgagctgacctgcactctgccgttggaaaaagatctgaaaatcacgctctacgactacgacctgctgagcaaagacgaaaaaattggtgaaaccgtcgtcgatctggaaaaccgcttgctttccaagttcggcgcgcggtgtggactgcctcaaacctactgcgtgtcaggacctaaccagtggcgcgaccagctccgaccgtcgcagctgctccatctgttttgccagcaacatcgggtgaaggcgcccgtgtaccggaccgaccgcgtgatgttccaggataaggaatattcgatcgaggagatcgaagcgggacgcatcccaaatcctcacctgggccccgtggaagagcgcctcgccctgcacgtgctccagcaacagggactggttccagaacacgtggaatcacggcccctgtacagccccctgcagccggatatcgagcaaggcaagttgcaaatgtgggtggatctgtttccaaaagcgctgggtagaccgggaccacctttcaacattaccccgagacgcgcccgacgcttcttcctgagatgtatcatctggaacacccgcgacgtcatcctggatgatctgtcgctgaccggcgaaaaaatgagcgatatctacgtaaaaggatggatgatcggattcgaagaacacaagcaaaagactgacgttcactaccgctcgctcggtggagaaggaaacttcaactggcggttcatctttcccttcgattatcttccagccgaacaggtgtgtactattgccaaaaaggatgctttctggcgtctggacaagaccgaatcaaagatcccggcgcgggtggtctttcaaatctgggacaacgataagttctcatttgatgatttcctgggatcgctccaactggatttgaataggatgcctaagcccgccaagaccgccaagaaatgctcgctcgaccagctggatgatgcgttccatccggaatggtttgtgagcctcttcgaacagaaaaccgtcaagggctggtggccttgtgtcgcggaggagggcgagaagaagatcctggctggcaagctggagatgaccctggaaatcgtcgctgagagcgaacatgaggaacgcccagccggacagggacgtgacgaaccaaacatgaatcctaagctcgaggaccccagacggccggacacttccttcctgtggtttacctcaccgtataagactatgaagttcatcctctggagacggttcaggtgggcaatcatcctctttatcatcctgttcatcctgctgctcttccttgctatcttcatctacgcctttccgaactacgccgcgatgaagctcgtgaagccgttctca

SEQ ID NO: 48065 - DNA, 6243 bp, Artificial Sequence
  derived and/or modified sequence
atgctgtgctgcctgctggtgagggcgtctaacctgccaagcgcaaaaaaggatcgacggtctgacccggtggcgagccttacctttcgcggagtgaaaaagcggactaaggtcatcaagaacagcgtcaacccggtgtggaatgaggggtttgaatgggacctgaagggaatccctctcgaccaaggttccgaacttcatgtggtggtgaaggatcatgaaaccatgggacgcaatagattcttgggagaggccaaggtgccgttgagagaagtgctggcaactccatcactgagcgcgtcgtttaacgccccgctgttggatactaagaagcagcctactggagcctcgctcgtgcttcaggtgtcgtacacgccgctgccgggcgctgtcccactgtttcctcccccgaccccattggaaccttcgcctaccctgcctgacctggacgtcgtcgcggacaccggtggagaggaggacaccgaagatcagggactgactggtgatgaagcagaacccttcctggatcagagcgggggcccgggagctccaactacccctagaaagttgccctctcgtccaccgcctcactaccctggaatcaaacggaaacgctccgctccgacttcacgcaagctgctctccgacaagccccaggacttccagatcagggtccaagtgatcgagggcagacagctgcctggagtcaacatcaagcccgtcgtgaaagtcactgccgctggacagaccaagcggacgagaatccacaaaggaaactcaccactgtttaatgaaactcttttcttcaacctgttcgactcccctggagaactgttcgatgagcccatcttcatcacggtggtggactcgcggtccctgagaaccgacgccctgctgggtgaattccgcatggatgtgggcactatctacagagagccgagacacgcctacctgagaaaatggttgctgctcagcgaccctgatgatttctcagcgggcgctcggggatacctgaaaacttccctgtgcgtgctgggaccgggagatgaggctccgttggaacgcaaggatccatcggaagataaagaggacattgagtcaaacctgttgaggccgactggagtcgccctgcgcggcgctcatttctgccttaaggtgtttagggcggaggaccttccgcagatggatgacgctgtcatggataatgtcaagcaaatctttgggttcgaatcaaacaaaaagaacctcgtggaccctttcgtagaggtatcgttcgccgggaagatgctgtgcagcaagatcctggaaaaaaccgcgaacccccagtggaatcagaacatcaccctgccggcgatgtttccctcaatgtgcgaaaagatgcgaatccggatcatcgactgggaccgcctgactcacaacgacatcgttgccactacctacctgtccatgtcgaagatctccgctcctggaggcgagatcgaggaggaaccggccggcgccgtcaagccgtcaaaagctagtgacctggacgactacttggggttcctcccgacctttggcccgtgttacattaatctgtacggctcaccgagagaattcacgggcttccctgacccttacaccgagctgaacaccgggaagggcgaaggagttgcataccgaggacggctgcttttgtcgctcgaaaccaaactggtggaacacagcgagcagaaagtcgaagatcttccggctgacgatatcctcagggtggagaaatacttgcggcggaggaaatactctcttttcgccgcgttctacagcgcgaccatgctgcaggatgtggacgacgcgatacaattcgaggttagcatcggcaattacggaaacaaattcgacatgacctgtctcccactcgctagcactacccagtactcccgcgcggtgtttgatggctgccactactactacctgccatggggcaatgtcaagccggtggtggttctctccagctactgggaagatatttcgcataggatcgaaacccaaaaccaactcctcgggatcgcagatcggcttgaagccggactcgaacaggtacacctcgcgctcaaggcccaatgctctaccgaagatgtggactcgctggtggcacaattgactgatgagctgatcgccggatgctcccagccgctgggggacattcacgagactccgtccgccacccatctcgaccaatacctctaccagctgaggactcatcatctgtcccagatcacggaggccgccctggcgctgaaactgggccactccgagctgccagcggcactcgagcaggcggaagattggctgctccggcttcgcgccctggcggaggaaccacagaattcgctgcctgacatcgtcatatggatgctgcagggcgacaagagagtcgcttaccaacgcgtgccagcccaccaggtgctgttctccagacgcggggcaaactactgtgggaagaattgcggcaaacttcagacgatcttcctcaagtacccaatggaaaaggtgcctggggcgcggatgccagtccagatccgcgtgaagttgtggttcgggctttcagtggacgaaaaggagtttaaccagtttgccgaagggaaactgtcagtttttgcggagacttacgaaaacgaaaccaagctggccctggtggggaattgggggacgaccggtctgacctacccaaaattctcagacgtcactggaaagatcaaactcccgaaggattccttcaggccgtcagccggttggacctgggccggagactggttcgtgtgcccggagaaaactcttctgcacgacatggacgcggggcatctgtcgttcgtcgaggaagtgttcgaaaaccagactcggcttccaggaggacagtggatctatatgtccgacaattacaccgatgtcaatggcgagaaggtgctgccgaaagacgacatcgaatgcccgctcggatggaagtgggaggacgaagaatggtccaccgacctgaaccgcgcggtggatgaacaaggctgggaatattcgatcaccatcccgcctgaacggaagccaaagcattgggtgccagccgagaaaatgtactacacccatcgccgcagacgctgggtgcggctgcgccggcgcgacctttcccagatggaggcgctgaagcggcaccggcaggccgaggctgagggagagggatgggaatacgcatccctgttcgggtggaaattccatctggaataccgcaagaccgatgccttccggcgccgcagatggcggcgacggatggagccgctggaaaagactggtccagcggccgtgtttgccctggagggcgccttgggaggagtcatggatgacaaatcggaagattcaatgtcggtgtcaacgctctcgttcggcgtcaaccgcccaaccatctcgtgcatcttcgactacggaaatcggtaccatctccgatgctacatgtaccaggcccgcgacctggcggcaatggataaagactctttctccgacccttatgcaatcgtttcgtttctccatcagtcccaaaagactgtcgtcgtgaagaataccctgaacccgacctgggaccagactctcatcttctacgagatcgaaatcttcggagagccggcaacggtggccgaacaaccgccttccattgtcgtcgagctgtacgatcacgacacttacggggccgatgaattcatgggccgctgtatctgccaacctagcctggaaagaatgccgcggctcgcctggtttccactgacccgcggctctcagccatcaggagaactccttgcatcgtttgagctgattcaacgcgaaaaaccagcgatccaccatatccccggattcgaagtgcaggagacttcgcggatcttggatgaaagcgaggacactgacctgccgtaccccccaccgcagcgggaagcgaatatctacatggtcccacagaacatcaaacccgcgctccaaaggactgctattgaaatactggcatggggtctgcggaatatgaagtcgtaccaacttgcaaacatctcgtccccgtccctggtggtcgagtgcggaggacaaactgtgcagtcatgtgtcatcagaaacctgcgcaaaaacccgaacttcgacatttgcaccctgttcatggaagtgatgctgccgcgcgaggagctgtactgtccaccgatcaccgtcaaggtcattgataaccgccaattcgggcggcgcccagtggtgggacagtgcaccatccggagcctcgagagcttcttgtgcgacccatactccgccgagtcacccagcccacagggaggaccggatgacgtcagcctcctgtcccccggggaggatgttctgatagatatcgacgacaaggagcccctcatccccatccaggaagaagagtttattgattggtggtcaaaattcttcgcaagcatcggcgagcgggaaaagtgcggttcctacctggagaaggatttcgataccctgaaggtgtacgatactcagctggaaaatgtggaggcatttgaaggactgtcagacttctgcaataccttcaagctctaccgcggaaagacgcaggaagaaaccgaggatccatcagtcatcggagagttcaaggggctgttcaagatctacccactccctgaagatccggccatcccaatgccgccgaggcagtttcaccaactggcagcccagggaccccaggaatgtctcgttcggatctacatcgtgcgggcctttggattgcagcctaaggatccgaacgggaaatgcgacccgtacatcaagatctcaattggaaaaaagtcggtgtcggaccaggacaactacattccgtgtaccctggaaccggtgtttggaaagatgtttgaacttacttgtaccctcccgctcgaaaaggacctgaaaatcactctctacgattacgacctgttgagcaaagatgaaaagatcggcgaaactgtggtggatctcgagaacagactgctgagcaagttcggagccaggtgcggcctgccccaaacctactgtgtgagcggacccaaccagtggcgggaccagctgaggccatcccagctgttgcacctcttctgccaacagcaccgcgtcaaagccccggtgtacagaaccgaccgcgtcatgttccaagataaagaatactcgatcgaagagatcgaagcaggacggatccctaaccctcacctgggcccggtggaggaaagactggccctgcacgtcctccagcaacaaggactggtgccggaacatgtcgaatcacggccgctctactctcctctgcagccggatatagagcagggaaaactccagatgtgggtggacttgtttccgaaggctctgggacggccaggtccgccgttcaatatcaccccgcgccgcgccagacgcttctttttgaggtgcatcatctggaacacgcgggatgtgattcttgacgacctgtcgctgactggagaaaagatgtccgatatctacgtgaaaggatggatgatcggtttcgaagagcataagcaaaaaactgatgttcattaccggtcactgggaggagaaggaaacttcaattggcgctttatctttccattcgactacctgccggccgaacaagtgtgcactatcgccaagaaggacgcgttctggcgcctcgacaaaactgaatctaagattcccgcccgcgttgtgttccagatttgggacaacgacaagttctcgtttgacgacttcctggggagcctccagctcgatctgaaccggatgccgaaacctgccaagactgctaagaagtgctcgctggatcaactggatgacgcttttcaccccgagtggttcgtgtcacttttcgaacagaaaacggtcaagggctggtggccttgtgtggcagaggagggcgagaagaaaatcctggctgggaaactggaaatgacgctcgagatcgtggccgaatcggaacatgaggaacggcctgccgggcagggacgcgacgaacctaatatgaatcctaagctggaggacccgcggcgaccggacacgtcattcttgtggttcacttcgccgtataagactatgaagttcatcctgtggagacggttcaggtgggcaatcatcctcttcattatcttgtttatcctccttctgttcctggctatcttcatctacgccttcccaaattacgccgctatgaagctcgtgaagccgttctcg

SEQ ID NO: 48066 - DNA, 6243 bp, Artificial Sequence
  derived and/or modified sequence
atgttatgctgcctgctcgttagagccagtaatctcccctcagccaaaaaagatcggagatcagatcctgtggcctctctgacatttcggggagtgaagaagagaaccaaggtaatcaaaaacagtgtcaatccagtatggaacgaagggtttgagtgggacctaaaagggatcccacttgaccagggcagcgaactccacgtcgtggttaaggaccacgaaacaatgggcagaaaccgctttctgggagaagccaaggtgccgctgcgggaagttctggccaccccaagcttgtccgctagcttcaacgcaccactgcttgatacaaagaagcagcccaccggcgcctccttggtgctgcaggtcagctacacacccctccctggagccgtccccttgttccctcccccaacccctctcgagccgtctcccacgcttccagatctcgacgttgtggccgacaccggaggcgaagaagataccgaggaccagggcttgacaggcgacgaggccgagccttttctcgatcagagtggcgggccgggcgcgcccaccacaccacgcaaacttccatcgcgtcctcccccacactaccctggaataaaacgcaagcgcagcgcacctaccagcagaaagttactcagcgacaagccacaggactttcagatcagagtacaagtcattgaaggacgacagttacctggagtcaacatcaaaccggtggtcaaggtgaccgccgcaggacagacaaagagaacaaggattcataaaggaaattcccccctatttaacgagactctttttttcaacctgtttgattctcccggggagctatttgatgaacccatctttatcacggtggtggatagcagaagcctccgtaccgacgcactgctgggagagtttaggatggacgtgggaaccatatatcgggagcccaggcatgcatatttgagaaagtggctgctcctgtccgatcctgacgatttctctgctggagcacgtgggtatttgaagaccagcctctgtgtgctggggcctggcgacgaagcccctctcgagcggaaggatcccagcgaggacaaggaggatatcgaatccaatctgttacggccgacaggtgtggcccttcgtggggcacatttttgtctaaaggtcttcagagcagaggacttgcctcagatggatgatgcagtgatggataacgtgaaacagatctttgggttcgaatctaataagaaaaacttagtggatcccttcgtcgaggtgtccttcgcaggaaagatgctgtgcagcaagatcctcgaaaagaccgccaatccacagtggaaccagaacattacgttgccagccatgtttcctagtatgtgcgagaagatgcggatcagaattatcgattgggacaggctgactcacaacgatattgtggccaccacgtatttgtctatgtctaagatctctgcacccgggggtgaaattgaagaggaaccagctggggctgtgaaaccttctaaggcgtctgatctcgacgattatctgggctttcttcctacatttggtccctgctatataaatttgtacggtagcccacgagaatttacaggctttcccgacccctataccgagctcaatacagggaagggcgaaggagtggcttaccgggggcgactcctgctgagcctggaaactaagctggtggaacatagcgagcagaaggtcgaggatttgcctgccgatgacattttgcgagtggaaaaataccttcgtcggagaaagtactcactttttgctgctttttactccgccacgatgctgcaggacgtggacgacgccatccaatttgaggtctccatcggtaactatggaaataagttcgatatgacatgcttgcctctcgcatcgactacacagtattctcgcgctgttttcgatggatgccactactactatttaccatggggtaatgttaagccggtggtcgtgctcagtagctattgggaagatatctcccatcgtatcgaaacacaaaatcaactactggggatcgccgaccgccttgaggccgggctcgagcaggtacaccttgccctgaaggcgcagtgcagcactgaggacgtagactccctggtggcacagttgaccgacgagcttatagctggctgttcgcagcctctgggtgacattcacgagacaccgtctgccacacacctcgatcagtacctttatcagctcaggacccaccatttgtcacaaatcactgaggcagcattggccctgaaactgggtcattctgagctacctgctgctctagaacaagcagaagactggctcctcaggctgcgcgctttggccgaggaacctcaaaatagcctccctgacattgtgatttggatgctgcagggggataagagagtggcttaccagagagtgcccgctcatcaagtccttttcagtagaagaggtgcaaattactgcggaaaaaactgcggcaaacttcagactatatttcttaagtacccaatggaaaaagtgcccggtgccaggatgcccgtgcagattagagtcaaactatggttcgggctgagcgtagacgagaaggagttcaatcagtttgccgaggggaagctttcagtctttgctgagacctacgagaacgagacaaagctagccctggtgggtaattgggggacgacaggccttacatatcccaaattctcagacgtcaccgggaagattaagttgcccaaggacagctttcgccccagtgctggatggacttgggccggggactggttcgtctgccccgagaaaaccttgcttcatgacatggacgcaggccacctgagtttcgtggaggaggtgtttgaaaaccagacaaggctgccaggaggccagtggatctacatgtccgataactacacagacgtgaacggcgagaaggtcctgcccaaggacgacatcgagtgtcccttgggatggaagtgggaggatgaggagtggagcacggaccttaatcgggcagtagacgagcagggatgggagtattcaatcacgattccccctgaacggaaacctaaacactgggtccccgcggagaagatgtattatacacatcgccgccggaggtgggtgcgattgcggcgtcgcgatctatctcagatggaagctctgaagagacaccggcaggcagaggccgaaggagagggttgggagtatgctagcctcttcggttggaagtttcacctggagtatcgcaaaaccgatgcctttcgtcgccggaggtggcgcagaaggatggagcctttggagaaaaccggcccagctgctgttttcgcactcgagggggccctgggaggagttatggatgacaaatccgaggattccatgtccgttagcacactctcattcggcgtaaaccggcctacgatctcctgcatcttcgattacggcaaccggtaccacctgcggtgctacatgtatcaggctcgagacctggccgcaatggacaaggacagctttagtgatccctacgcaattgtatcttttctgcatcagtcccagaagaccgtagtagtgaagaacaccctcaacccgacatgggaccagaccttgattttctacgagattgagattttcggggaaccagcaactgtggccgagcagcccccctctatcgtggtagagctgtacgaccacgatacatatggagcggacgagttcatgggacgctgtatctgccagccttctcttgagcgcatgcctaggctcgcctggttccctttgacacgcggctcacagccatccggagagctgctggcaagttttgaactaatccagcgcgaaaaacctgccatccaccatattccggggttcgaggtgcaagagacctctcgcatactggacgagagtgaggacacagatctgccctatccccctcctcagcgcgaagccaatatctacatggtgcctcaaaatatcaaacctgctctgcagcgcactgctattgaaattttagcatggggtctccggaatatgaagtcctatcagctggcgaatatctcgagcccgagtctcgtggtggagtgtggaggccagacagtccagtcatgtgtcatccgcaacctgcgcaagaaccctaacttcgatatctgcacactcttcatggaggtaatgctcccaagagaagaattgtactgcccacctatcacagtgaaagttattgataaccggcagtttggtcgaagaccggtggtgggccagtgtaccatcagatccctggagagctttctgtgtgacccttactccgccgagtccccatctccgcagggcggtcctgatgacgtgagcttactgtcacccggggaggacgttctcattgatatcgacgacaaggaaccactgatccctattcaggaagaggagttcatagactggtggtcaaaatttttcgcatctatcggcgagcgggagaagtgtggatcctaccttgagaaggacttcgataccctgaaagtgtacgatacacaattagagaatgtcgaagcattcgagggtctgagcgatttctgtaatactttcaagttgtacagaggtaagacccaagaagaaaccgaagacccaagcgtaattggggaatttaagggcctcttcaaaatctaccctctccctgaggaccccgcaatcccgatgcctcccagacagttccatcagcttgccgcccaggggccgcaggagtgtctggtcaggatatatatcgtgagggcctttggtctccagcctaaggaccctaacggcaaatgtgacccttacatcaagataagtatcgggaagaagtccgtgtctgatcaggataactacatcccgtgtaccctggagccagtcttcggcaaaatgttcgagcttacttgtaccctgcccttggagaaagatctcaaaatcacactctacgattacgacctgctttcaaaggacgaaaaaatcggggagacagtcgtggatctggagaaccgcctcctgtcaaaattcggcgcccggtgcggacttccccagacctattgtgtgagcggtcctaatcaatggagagaccagctacgtccatctcaactgttgcatctgttctgccagcagcatcgtgtgaaggcccccgtgtatcgaacagacagagtaatgttccaagataaagaatactctatcgaggaaatcgaagctggccgcatccccaatccccacctagggcctgtagaggagcgcttggcattgcatgtgcttcagcagcagggacttgtcccagagcatgtcgagagtaggcctctttactccccgcttcaacctgatatcgagcaaggaaagctacagatgtgggtcgacctgttccctaaggctttggggagacccggacccccattcaacataaccccgcggcgcgccaggcggttctttcttaggtgcattatatggaacaccagagatgtaatcctggatgacttatcactgactggcgagaagatgtccgatatctatgttaagggatggatgatcggctttgaagaacacaagcagaagacagacgtgcattatcgctctctcggaggcgaagggaattttaattggcggttcatctttccgttcgattacttgcccgctgagcaggtttgtactatagccaagaaggatgccttttggaggcttgataagacggaaagcaagatccccgctcgggttgtgttccaaatttgggataacgataaattctcctttgatgactttttgggaagcttgcagttagacctgaaccgtatgccaaagcctgcgaagacggctaaaaagtgttcgcttgatcaactggatgatgcgttccaccctgagtggttcgtttccttgtttgagcaaaaaactgtgaagggttggtggccttgcgtggccgaggagggggagaaaaaaatccttgcgggcaaactggagatgacactcgagatcgtcgctgagtcagagcacgaggaacgacccgccggccaaggccgcgacgaaccgaacatgaatcctaaattagaagatccccgccgacctgatacttcctttctctggtttacctcaccgtataaaaccatgaaatttatactttggcgcagatttcgctgggctataatcctgttcatcatcctgtttatcttgttgctgttcctggcaatttttatttacgcctttcccaactacgcagccatgaagctggtgaaacccttcagc

SEQ ID NO: 48067 - DNA, 6243 bp, Artificial Sequence
  derived and/or modified sequence
atgctctgttgtttgttagtccgagctagtaacctgccgtctgcaaagaaggaccgacgaagtgaccccgtcgccagccttaccttcagaggagttaaaaagcgtaccaaggttatcaagaactcagtcaatcccgtgtggaatgaaggtttcgagtgggacctgaaaggtattcctctggaccagggctctgagctacatgtagtagtcaaggatcatgaaacaatgggccgtaatagatttcttggggaggccaaggtgccccttagagaggtcctcgcgacaccttcgctgtccgcctcctttaatgctccactcctggacaccaagaaacaacccacaggagccagcctggtactgcaggtgtcctatactcctctgccaggtgctgtgcccttgtttcctcctccgactcccttggaaccgtcaccgactttaccggacttggacgtagtggccgatacagggggggaggaagacaccgaggatcagggtctaacgggggatgaggctgaaccatttttggaccagtcaggggggcccggtgccccgaccacaccaagaaagcttccatccaggccccccccccattaccccggtatcaagcgaaaacgatccgctcctacgtcacgcaaactcttatctgacaagccacaggatttccagatccgtgtgcaggtcatagaggggaggcagcttcccggagtaaatatcaagcccgtggtgaaagtcactgctgccggacagacgaagaggaccagaatccacaagggcaacagtccattgtttaatgaaactctattcttcaatctgtttgacagccctggtgagcttttcgatgagccgatcttcattaccgtggtggattccagaagcctccgaaccgacgcactgctaggtgagttccggatggatgtagggactatttacagagaacctcggcacgcttaccttagaaagtggttgctgctaagtgacccggacgatttttctgctggggctaggggatatctcaaaacttcactctgcgtgcttgggcccggggacgaagctccgttggaaaggaaagatccaagtgaagacaaggaagatatagagtccaacctactgcgccctactggcgtggcactacgaggcgcccacttctgtctgaaggtgtttagggccgaggaccttccacaaatggacgatgccgtgatggacaacgtgaagcagattttcggatttgagtctaacaagaagaacctggtcgaccctttcgtggaagtaagtttcgctgggaagatgctttgctcgaaaatacttgaaaaaaccgctaatcctcagtggaaccaaaacatcactctccccgccatgttcccttccatgtgtgaaaagatgagaattagaataatcgactgggataggctgactcacaatgacatagtggctaccacttatctcagcatgagtaagatttccgccccaggaggagagatcgaagaggagcctgcgggggccgtgaaaccttccaaggcctcggacctcgacgattatctcggatttctgcccacttttggcccgtgttacatcaatttgtatgggagcccaagggagttcaccggctttccggacccatacacggagctgaacacagggaaaggcgaaggcgtcgcctatagaggaaggcttttgttgtccctggagaccaaactggtagaacacagtgagcaaaaagtggaagatcttcccgccgatgatattctgcgagtggaaaaatatctgcgaaggcgaaagtacagtctgttcgcagccttctacagtgcaaccatgctccaggacgtcgacgacgctattcaattcgaagtctctatcggaaattacggcaataagtttgacatgacatgcttgcccctggcgagtacaacccagtactctcgtgctgtgttcgatggctgtcactactattatttaccttggggcaacgtgaagccagtcgtggttttgtcaagctactgggaggatatctcccacaggatcgagacacagaatcaacttctagggatcgccgatcgactagaagctgggctcgagcaggtgcatcttgctctgaaggctcagtgctctactgaggacgttgatagccttgtagcccagctcactgatgaacttatcgctggatgtagtcagcccctcggggacatccatgagaccccgtctgctactcatctggaccagtatctgtatcaacttcgtactcatcacctctctcaaattaccgaggcagcactggctcttaaattgggccacagcgaactgccagcagcactggagcaggcggaagactggctactgaggctgagagccctggccgaggaacctcagaactcactgccagacattgttatttggatgctgcagggcgataagagagtggcctaccagagggtgcctgctcatcaagtgctgttctcgagacgcggtgccaattactgtggcaaaaactgcgggaagctgcagactatctttctaaagtatcccatggagaaggttcctggagcgaggatgccagtgcaaatcagagtgaagttgtggttcggtctgagcgtggacgaaaaggaatttaaccagtttgctgaaggaaagctttctgttttcgctgaaacgtacgaaaacgagacgaaactggcccttgtgggaaactggggtacaaccggcttaacctatccgaagttctctgacgtgacagggaaaatcaagcttcccaaggacagttttagaccttcagcgggctggacttgggcaggcgactggtttgtgtgcccagagaaaactctactgcatgacatggatgcaggccatttgtcgtttgtcgaggaagtgttcgagaaccagacaagacttcccggagggcaatggatatatatgtccgataactatacagatgttaatggggaaaaggtgcttcccaaagatgatattgagtgtccacttggctggaagtgggaggacgaggaatggtccacggatctgaatcgggcagtggacgaacaaggatgggaatacagtattactatcccacccgagaggaaaccaaaacattgggtgcccgccgagaaaatgtactacactcaccggaggagaagatgggtgcgacttaggcgaagggacttgtctcagatggaagcactcaagcggcatcgtcaggcggaggccgaaggcgaaggatgggagtacgcttctctcttcggttggaagtttcatctggagtatcgaaagacagacgctttccgaaggcgacggtggaggaggcgaatggaacccctggagaagacaggtccagctgctgtgttcgccctggagggtgctctcggcggggtaatggatgacaagagcgaggacagcatgtctgttagcaccctgtcattcggtgtcaaccgcccaaccatatcttgtattttcgattatggcaaccgataccacttgcggtgttacatgtaccaggcacgcgatctggcggccatggataaggattccttcagtgatccttacgcaatcgttagcttcctgcaccaatctcaaaagaccgtggtggttaaaaataccctgaatcccacttgggatcagaccctcatcttttatgaaattgagatcttcggtgaaccagctaccgtcgctgaacaacctccctctatagtggtagagttgtacgatcacgacacttatggagccgatgaattcatggggcgatgtatatgccagccatctttggagagaatgcccaggctggcctggtttccattaacccgaggtagccagccctctggtgaattgttagctagttttgaactgattcaacgagagaagcctgctatacatcatatccccgggttcgaggtacaggagacaagtcgaattttggacgaaagcgaagatacagaccttccttatccgccccctcagcgcgaggctaacatatatatggtcccgcagaacattaagccagcactgcagcgaacagccatcgaaattttagcctggggcctacgtaatatgaagtcctatcagcttgctaacataagctctccatctctcgtggtggagtgcggcggacagaccgtccagagctgtgtaattaggaacctccggaagaaccctaacttcgatatttgcacgctgtttatggaagtgatgctccctagagaggaactttattgtccccccataaccgtgaaggtgatcgacaacagacagttcgggagacgacctgtcgtcggtcagtgcaccattaggtcactggaatcctttttgtgcgatccctactccgccgagagcccatcccctcaaggcggcccagatgatgtgtccctcctgagccctggagaggatgtgctgatcgatattgacgacaaggaacctctgattcctattcaggaggaagagtttatcgactggtggagcaagttcttcgccagcatcggggaaagagaaaagtgcgggagttatctggagaaggactttgatactctgaaagtgtacgacactcagctcgaaaacgttgaagctttcgagggtctctcggacttctgcaacacatttaagctttatagaggaaaaacccaggaggagacagaagatccatcagttattggcgagttcaagggcttatttaagatttatcctctgcctgaggacccagccattcctatgcccccaaggcagtttcaccagctggccgctcagggacctcaggaatgtttagtgcgaatctatatcgtgcgggcattcggcctgcagcccaaagatccaaacggcaagtgtgacccctatatcaaaatatctattgggaagaaatctgtgtcggaccaagataactacattccatgtaccctcgaaccggtcttcgggaagatgttcgagctgacttgtacattaccgcttgagaaggatcttaagattactttgtacgattacgatttgctcagtaaagacgaaaagatcggcgagacggtggtcgatttggaaaaccgactgctcagcaagttcggagcccgatgcggcctgccccagacctactgtgtaagtggtccaaaccagtggagggaccagctaagaccctcccaactgctgcatctgttctgtcaacagcatcgagtaaaggcccccgtgtaccgaacagaccgggtgatgtttcaggacaaagagtactctattgaggagattgaagctggtaggatacccaacccacacttggggccagtggaggagcgactggcccttcacgtgctgcagcagcaaggcttggtccccgaacacgtcgaaagccgaccactgtatagtccacttcaacccgacattgagcagggaaagctgcagatgtgggttgatcttttccccaaggcccttggcaggccgggaccgcctttcaatataaccccaagacgtgcacggcggtttttccttcgttgtataatttggaacacaagggacgtaatcctggatgatctatcactgacaggagagaagatgtcggacatctacgtgaaggggtggatgatcggctttgaagaacacaagcagaagactgacgttcactatcgtagtctcggcggtgaggggaatttcaactggcgcttcattttcccattcgactacttgcctgcagaacaggtttgcacaattgctaaaaaagatgctttctggcggctcgataaaactgaatccaagataccagccagagtggtgttccagatatgggacaatgataagttctctttcgacgatttcttgggttcactgcagttggacctgaacagaatgcctaaacctgctaaaacagccaagaagtgtagtctggaccagctggacgacgcttttcaccccgagtggtttgtgagtctatttgaacagaagactgtgaaaggatggtggccgtgcgttgctgaagaaggagaaaagaagatcttggccggtaaacttgagatgacgctggagattgttgctgagtctgaacatgaggagcgaccagcaggccaaggtcgggatgagcctaatatgaatcccaagctagaagatcccaggaggcccgacacctcattcctgtggttcacctcaccctacaagacgatgaaattcatcttgtggcgaaggtttagatgggctataattctgttcatcatccttttcattctgctcctgttcctggctatttttatctacgccttcccaaactatgcggccatgaaacttgtgaagccattctcc

SEQ ID NO: 48068 - DNA, 6243 bp, Artificial Sequence
  derived and/or modified sequence
atgctgtgctgcctcttggtgcgggccagcaatctgccttcggctaagaaggaccggcgatccgatccggtcgctagcctcacctttagaggagtgaaaaagcggaccaaggtgatcaagaattctgtgaaccccgtgtggaatgaaggatttgagtgggatctgaagggaattccactcgaccaggggtcggagctgcacgtcgtcgtgaaggaccatgagactatgggccgcaatagattcctgggcgaagccaaggtgccgctgcgcgaagtgctggctacgccttccctgtcggcctcgttcaacgcgccactgctcgacactaagaaacagccgacgggagccagcctcgtcctgcaagtgtcctacaccccgctgcccggagccgtgccgctgttcccgcctccaacccccctggaaccgagccctaccctcccggacctggacgtggtggcggatactggaggtgaagaggacactgaagatcaggggctgactggggacgaagccgagccctttctggaccaaagcggtggtccgggcgcccctaccacccctaggaaactgccttcccgcccgccacctcactaccctggtatcaaaaggaaacggagcgctccaaccagtaggaaacttctctccgataaaccacaagacttccagatcagagtgcaggtcatcgaaggacggcaactccctggagtgaacatcaagccagtcgtcaaggtgactgccgcgggacagacgaagcgcactcgcatccacaaaggaaactcgccactctttaatgaaactctcttcttcaatttgtttgatagcccgggtgaactgtttgacgagccgatcttcatcactgtggtcgactccagatccctgcggaccgatgcgttgctgggagaattccggatggacgtcggaaccatctacagagaacctagacacgcctatctgcgcaaatggctgctcctctccgacccggacgatttctcagcaggagcccgcgggtacttgaaaaccagcctttgtgtcttgggcccaggagacgaggcacctcttgagagaaaggatccgagcgaggacaaggaggatatcgagtcaaacctcctcaggccgactggggtcgcattgaggggagcgcacttttgccttaaagtctttagggcagaggacttgccgcaaatggatgacgcggtgatggataacgtgaaacagatcttcggattcgagtccaacaagaaaaacctcgtcgaccctttcgtcgaagtgagctttgcgggtaagatgctgtgctctaagatcctggagaaaaccgccaacccgcagtggaaccagaacattaccctgcctgctatgttcccctccatgtgtgaaaagatgcggattagaatcattgactgggaccggctgactcacaacgatatcgtggccactacttatctctccatgtccaaaatctctgccccgggaggggaaatcgaagaggaacctgcaggggcggttaagccttcaaaggcttccgacctcgatgactacctcggtttcctcccaactttcggcccttgctacatcaacctttacggaagccccagagaattcacgggtttccctgacccatacaccgaattgaatactgggaagggggagggagtcgcctaccggggacgcctcctgctgtccctcgaaaccaagctggtggagcactccgaacaaaaggtggaggatctgccggcggacgatattctccgcgttgagaaatacctgaggagacgcaagtacagcctcttcgccgcgttctacagcgccaccatgctccaggacgtcgacgacgcgatccaattcgaagtctcgatcggaaactacggaaacaagttcgacatgacttgcctgcctctggcaagtactactcagtacagcagggccgtgttcgatggatgtcactactactacctgccgtggggtaatgtgaaacccgtggtcgtgctgtcaagctactgggaggacatctcccaccggatcgaaacccagaatcagctgctgggcatcgccgaccgcctcgaagctggcctggaacaggtccatctggcccttaaggcccagtgttcaactgaagatgtggattcgctcgtcgcgcagctgactgacgaactcattgccggatgctctcagcccctgggggacatccatgagactccgtcggccacgcatttggaccagtacctgtaccagctccgcactcatcatctttcccagattactgaagccgcccttgctctgaaactgggtcactcagaactccccgccgccctcgaacaggccgaagattggctgctccggctgcgggccctcgccgaagagccacaaaactcactgccggatattgtgatctggatgctgcaaggagacaagcgcgtggcgtaccaacgggtgccggcacaccaggtgctcttttcccggcgaggagccaactactgcggcaagaactgcggaaagctccagactattttcctgaaatacccaatggaaaaagtgcctggcgcgcggatgcccgtccaaattcgcgtgaagctgtggttcggactctcagtcgacgagaaggagtttaaccagtttgccgaaggcaaactttcggtgttcgccgagacgtacgagaacgaaactaagctggctctggtgggcaactggggcaccaccggactgacctacccaaagttcagcgacgtgaccggcaaaatcaagctgccgaaagacagcttcagacctagcgcaggctggacctgggccggagactggttcgtgtgccctgagaaaaccctcctgcatgacatggacgccggacatctgtcgtttgtcgaagaggtctttgagaaccagactcgcctgccaggtggccagtggatctacatgtccgacaattacactgacgttaacggagagaaagtgctgcctaaagacgacatcgaatgtcccctcggatggaagtgggaggatgaagaatggtcaaccgacttgaaccgtgctgtggatgaacaagggtgggaatactcaatcaccatcccacctgagcggaagcccaaacactgggtgccggccgagaagatgtactacacccaccgcagacgccgctgggtgcgcctccggcgccgcgacctgtcgcagatggaggcgctcaagcggcatcgccaagcagaagccgaaggtgagggatgggagtatgcatcgttgttcggatggaaatttcatctcgaatacagaaagactgatgcattccggaggcggcggtggcgccggcggatggagccgctggaaaagactggaccggccgctgtgttcgcacttgagggtgcattgggcggagtgatggacgacaagtccgaggactcgatgtccgtctccactctgagctttggagtgaatcgccccacgatttcttgcatcttcgactatggcaaccgctaccacctccgttgctacatgtaccaagcacgggatctggccgccatggacaaagattccttctcggatccgtacgcaatcgtttcgttcctgcaccagtcccaaaaaactgtcgtggtcaagaatactttgaacccaacctgggaccaaaccctgatcttttacgaaatcgaaatcttcggcgagccggctactgtggcagaacaacctccatcgatcgtcgtggaactgtacgaccacgatacctatggcgccgacgaattcatgggtagatgtatctgtcagccatccctggaaaggatgcctcggctcgcttggtttccattgacccgcggatcgcaaccctcgggagagctccttgcgagctttgagctcatccaacgagagaagcctgccattcatcacatcccgggtttcgaagtgcaggagacttcgcgtatccttgacgagtctgaggacacggatctgccgtacccgccgccacagcgcgaggcaaacatctacatggtgccgcagaatatcaaacccgctctccagcggactgctatcgagatcctggcttgggggctccggaatatgaaatcctaccagctcgccaatatctcaagcccgtcgctggtggtcgaatgcggtggtcaaaccgtccaatcctgtgtcatcagaaacttgcggaagaatccaaacttcgacatctgcactcttttcatggaggtcatgctgccacgcgaagagctctattgcccgcctatcaccgtgaaggtcatcgacaatcggcagttcggacgacgcccggtcgtcggacaatgcactatccgctcccttgaatcgttcctgtgcgacccatactccgctgaatccccaagccctcaaggaggacccgatgacgtgtcactcctgtcacctggggaagatgtgcttatcgacatcgacgacaaggaacctctgatcccgattcaggaagaggaattcattgattggtggagcaagttctttgcttccatcggagaacgcgaaaagtgtggatcgtacctcgagaaggacttcgacacccttaaggtgtatgatactcagctcgagaacgtcgaagcgtttgaaggccttagcgacttttgtaacaccttcaagctctacaggggtaagacccaagaggaaactgaggatccgtcggtgatcggcgagttcaaagggctgtttaagatttaccccctgccggaggaccctgccatcccgatgcccccgcggcaattccaccaactggccgcccagggaccgcaagaatgtctcgtccgcatttacattgtgcgcgcgttcggtttgcagccgaaagacccaaatggtaaatgtgacccgtacattaagattagcatcggtaagaagagcgtcagcgaccaagataactacatcccttgcaccctcgaaccagtttttggcaagatgttcgagctgacctgtactctcccgctggagaaagatctgaaaatcaccctgtacgactacgacctcctgtcgaaggatgaaaagataggcgaaacggttgtggatctggaaaatagactcctttccaagttcggagcccgctgtgggctgccgcagacctactgcgtgtccggcccaaaccagtggcgcgatcagctccggccgtcgcagctcctccatctcttctgccagcaacacagagtcaaggctccggtgtaccggactgatagagttatgtttcaagataaagagtattccattgaggaaatcgaggccggacggatccctaacccccacctgggtccggtcgaagagaggctcgcgctgcacgtcctgcagcagcaaggactggtgccagagcatgtcgagtccaggcctctgtacagcccgctgcagccggatatcgaacagggaaagctgcaaatgtgggtcgatctcttcccaaaggccctggggcgcccggggccgccgttcaacatcaccccgcggcgcgcacgccggttctttctccggtgcatcatctggaatactcgcgacgtgatcctggacgacctgtcgctgaccggcgagaaaatgtcggacatctacgtgaagggatggatgatcggatttgaagagcataaacaaaaaactgatgtgcactaccggtcgctcggcggggagggaaacttcaactggagattcatcttccctttcgactacctgcccgccgaacaggtgtgcaccatcgccaaaaaggacgcgttttggagactggacaaaaccgagtcgaagattccggcaagagtggtgttccagatttgggacaacgacaagttcagcttcgacgatttcctgggtagcctgcagctggatctcaaccgcatgccaaaacccgcaaagactgccaaaaagtgctctcttgatcaactggacgacgccttccacccggagtggtttgtgtcgctcttcgaacaaaagaccgtgaagggctggtggccttgcgtggcggaagaaggggagaagaagatcctggccggcaagctggaaatgaccctggaaatcgtcgcggaatccgagcatgaagagcgcccagccgggcagggccgcgacgaacctaacatgaacccgaaactggaggacccgagacgcccagatactagctttctgtggttcacttcgccgtacaaaactatgaagttcatcttgtggaggcgcttccggtgggcaatcatcctgttcataatccttttcattctgctgctgttcctggccatcttcatctatgcctttccaaactacgccgccatgaaactcgtgaagccattcagc

SEQ ID NO: 48069 - DNA, 6243 bp, Artificial Sequence
  derived and/or modified sequence
atgttatgttgcctcctggtgcgcgcaagcaatctgccttctgccaagaaggaccgtcgcagtgaccctgtcgctagcctaacttttcgcggggtaaaaaagcgcacaaaggtcatcaaaaacagtgtaaatcccgtgtggaatgaagggttcgagtgggatctgaaagggatccccctggatcaagggtctgagctacacgttgtggtgaaggaccatgagacgatgggtagaaatcgcttcctgggggaggcaaaagtgccactgcgcgaagtcctcgcaacaccgtcactgtcagcttctttcaatgctcctttgcttgatacaaagaagcaacctacgggcgccagcttagtcctccaggtgtcatatactcctttgcctggcgccgtgccactcttcccaccaccaacccctcttgagccttctcctacccttcccgatctcgacgtggtggccgataccggaggagaggaagacacggaggatcagggtctgactggagatgaagcagagccctttctggaccagtcgggcgggcccggagctcctaccacaccccggaagcttcccagcaggccccccccccattacccggggattaaacggaaaaggtcagcccccacaagtaggaagctgctgagcgacaagccgcaggactttcagatccgcgttcaggtcatcgaaggtcggcagctgcccggcgtgaatatcaaacctgtggtaaaggttaccgccgcaggccagactaagagaacacggattcacaaaggaaattcacccttgttcaatgagacccttttttttaacctttttgacagccctggggagctcttcgatgaacccatcttcatcaccgttgttgactccaggtcattacgaacagacgccttattaggcgagtttagaatggacgtgggaacgatttaccgcgaacctcgccacgcataccttcgtaagtggttgctgctcagtgacccagacgacttctcagccggagctagaggctacctgaagacttctttgtgcgtcctaggtcctggcgacgaggcccccttggaacgcaaagacccaagtgaggataaggaagatattgagagcaacctactaagacctaccggtgtagctctccgaggggcccacttctgccttaaagtgttccgagcagaagacttgcctcagatggacgacgctgttatggacaacgtcaagcaaatctttggctttgagtctaacaagaagaatctcgtcgacccttttgtagaggtgtcctttgcaggaaaaatgctgtgcagcaagatcctggagaagaccgcaaacccccagtggaaccagaatatcacccttcccgccatgtttccttcaatgtgcgagaagatgcggattcggataatcgactgggaccgtctgacccataatgacattgtagctacgacgtacctgtcaatgagcaaaattagcgcgccaggcggcgagatagaggaagaaccggccggcgctgtgaagcctagcaaagccagcgatctggacgactatcttggcttccttcccactttcggtccatgttatatcaacctgtatgggtcccctcgggaattcacaggattcccagatccgtataccgaactaaacacagggaagggggaaggcgtggcgtaccgtggccggctgctgctatcactcgagaccaagttggttgaacatagcgagcagaaggtggaagacctccctgcagacgatattctgcgagttgagaaatatctcaggcggagaaaatattccctgttcgcagctttctattcagccactatgctgcaagatgttgacgacgcaatccagttcgaagtgtccatcggcaactatgggaataagttcgacatgacctgcttgccactggcttcgaccacccagtactctcgggcggtgttcgacgggtgccattattactatctgccctgggggaacgttaagcccgtggtcgtgctgtccagttattgggaggatatcagccacaggatagaaacccagaaccaattgctcgggatcgcggacaggctggaagctggtctcgagcaagttcacttagctctcaaagcccagtgcagtaccgaggacgtcgacagcctagtggctcagctcacagacgagctcattgccgggtgttcccagcctctgggcgacatccacgagaccccttccgctacccatctggatcagtacctatatcagttgaggactcaccacctgagtcagatcaccgaggcggcgctggctctaaagctgggacactcagagctccctgccgctctggaacaggccgaagactggctgttgcgcctaagagctttggccgaagagccacagaattccctgcctgacattgtgatctggatgctgcagggtgataagagggtagcttatcagcgggtacccgcacatcaggtcctgttttccaggcgtggggcaaattactgtggcaagaactgcggcaaactgcagaccattttcctgaaataccccatggaaaaagttcccggggcccgcatgcccgtgcagattcgtgtgaagctgtggtttgggttgtctgtggacgagaaagagtttaaccagttcgctgagggcaaactgtccgtgttcgcagagacttacgaaaacgaaacaaagctggcgctcgtgggtaactgggggaccacggggttgacatacccgaagtttagcgacgtcaccggaaaaattaagttacctaaagactcattcagaccatccgcaggctggacctgggcaggagactggttcgtctgtccagagaaaactctgctccatgatatggacgccgggcatctttcattcgttgaggaagtgttcgagaaccaaacacgccttccaggggggcagtggatctacatgtcagacaattatacggatgtcaacggagagaaggtgctgcctaaagacgacatcgagtgcccactaggatggaaatgggaggacgaggagtggtcaacggatttaaatcgagccgtcgatgaacagggctgggagtattcaataactataccccccgaaaggaaaccaaaacactgggtgccggccgaaaaaatgtactatacccacagaaggcgtagatgggtaaggctgcggcggcgagacctgtcccaaatggaggctctcaagaggcacaggcaggcggaagccgagggcgaaggctgggagtacgcttcactgttcggatggaagttccacctggaatatcgtaagacagacgctttcaggcggcgccggtggaggagacgcatggagccgttagagaagacagggcctgcggccgtgtttgcacttgaaggcgcacttgggggggtcatggatgacaagagtgaggattccatgagtgtgtcaaccctgtcttttggagtgaatcggcccaccatatcctgtatctttgactacggaaatcgctaccacttgagatgctatatgtatcaggcacgggacctggctgctatggacaaggatagcttctcagatccttacgctatcgtctctttcctgcatcagtctcaaaagacagtcgtagtcaagaacactttgaacccaacttgggaccaaaccctgattttctatgagatcgagatcttcggtgagccagccacggttgcagagcagcctccttccattgtagtggagctgtacgaccatgatacttacggcgcggacgagtttatgggccgttgtatttgccaaccctcattggagcggatgcccaggttggcctggtttcccctcacccgtggatcccagccgtctggggagttactggcaagttttgagcttatccagagagaaaagcctgccattcaccatatccctggttttgaagtgcaggaaacctctagaatcctggacgagagtgaggacactgaccttccttacccgcccccacaaagggaagccaatatctatatggtgccacagaacatcaaacccgctcttcagcgaaccgcaatagagatccttgcatggggattgcgtaacatgaagtcgtatcagctggcaaatatctcttctccaagcttggtggtagagtgcggaggccagactgtgcagtcctgcgtgattaggaacctacgcaaaaaccccaatttcgatatttgcaccctgtttatggaggtgatgcttccacgagaggaactgtactgtccccctattacagtgaaagtaatcgacaatcgccagtttggccgcaggccggtagttggccagtgtaccatacggagcctagaatcttttctatgcgacccatacagtgcggagtctccaagcccccagggcggacccgacgacgtatcactgctctctccgggggaagacgttctgatcgatatagatgataaggagccactaatcccgattcaggaggaggagttcatagactggtggagtaagttctttgcttcgattggcgagagggagaagtgcgggtcctatctcgagaaagactttgatacactgaaagtttatgacactcaactggagaatgtggaggcttttgaggggctgtctgacttctgcaacacatttaagctttatcgcggcaagactcaggaggaaacggaagacccatccgtgatcggtgaatttaaggggctgttcaagatttacccgttgcctgaggacccggccatccctatgcctcccagacagttccaccagctcgccgcgcaagggccacaggaatgcctcgtgcgcatatatatagtgcgagctttcgggctgcagccaaaggaccctaatggcaagtgtgatccatacataaagatatcaatcggaaaaaaatcagttagcgaccaggataattacatcccttgcacgctcgaaccagtcttcggaaagatgttcgagcttacctgtaccttgcccctcgagaaagatctgaagatcacactgtatgactatgatttgctttcaaaagacgagaaaatcggcgaaacagttgtggacctcgagaatcgcttgctgagcaagtttggggcccgctgtggtctgcctcagacttactgtgtgtcgggtccaaaccagtggagagatcagctacgcccatcacagttgcttcacctgttctgtcagcagcaccgggttaaggcaccagtgtaccgcactgatagggtcatgttccaagataaggaatactctatagaggagatcgaggccggcagaatcccgaacccccacctgggtccggtggaggagcgactggcgcttcacgttttgcagcagcagggactggtgccggagcacgtagagagtcgccccttgtattccccactgcagcctgacattgagcagggcaaacttcaaatgtgggtcgacctgtttcctaaagcgttgggacgcccaggccccccgtttaatatcaccccaagacgcgccagacgcttttttttacgatgtatcatttggaacactagagacgtgattctggacgacttaagtttgacaggtgaaaagatgtcagatatttacgtaaagggatggatgatcggcttcgaggaacataagcagaagactgacgtgcactatcgcagccttggaggcgaaggcaatttcaactggcggtttattttccccttcgattaccttcccgcagagcaggtgtgcacaattgcgaagaaagatgccttttggcggctcgacaaaacggaaagcaagatccccgctcgcgtggtgttccagatctgggataacgataagttcagctttgatgacttcctcggcagcctacaacttgaccttaacaggatgcccaaacccgctaagacagccaaaaagtgctctctagaccaactcgacgatgcatttcatcctgaatggtttgtgtccctgttcgaacagaagaccgtgaaaggctggtggccttgcgtggcagaagagggcgagaaaaagatccttgccggcaagctagagatgaccctggaaatcgtagctgagtccgaacacgaggaacggccggctggccagggcagggacgagcctaacatgaatcccaaactggaggatccacgcaggccagacacttcttttctgtggttcacctccccctacaagaccatgaagtttatcctgtggcgcaggttccgttgggcaattatcctttttatcatcctgtttatcctgctgttgtttcttgccatctttatctacgcatttccaaactacgctgctatgaagttggttaaaccattttct

SEQ ID NO: 48070 - DNA, 6243 bp, Artificial Sequence
  derived and/or modified sequence
atgctctgctgcctcctggtcagagcttcaaaccttccgtccgccaagaaagaccggaggtcggacccggtggcatccctgacttttcggggagtcaagaagcggaccaaggtcatcaagaactctgtcaatcccgtgtggaacgaaggcttcgagtgggatctgaagggcatcccgttggaccagggtagcgaattgcacgtagtggtgaaggaccatgagacgatgggtagaaaccggttccttggagaagcaaaggtgcctctgcgcgaagtgctggcaactccctccctctcggcctcgttcaacgcgccactgcttgatacgaagaaacagcccactggcgcttcgctggtgctgcaggtttcgtacacgccgctccctggcgcggtgcctctgtttccaccgccgacccctctggaaccctcccctactctgccggatctggacgtggtagccgatactggaggtgaagaggatacggaggatcagggcctcaccggtgatgaggctgaaccgtttctcgatcagtccggggggccgggcgcgccgaccactccccgcaagctcccttcccggccgccaccgcactacccgggaatcaagcgtaaaagaagcgcgccgacgtcgcggaagctgctctcagacaagccgcaggactttcaaatccgcgtgcaagtgatcgaaggacgccagctccccggagtgaacatcaaacctgtcgtcaaggtcaccgcggccggacaaactaaacgcactaggatccacaaagggaattccccgctgtttaatgaaacgctgttcttcaacctcttcgattccccaggcgaacttttcgacgaacctatcttcatcactgtcgtggattcacgctcgctgcggaccgatgccctgctgggcgagttccggatggacgtgggaactatttaccgggaaccaaggcacgcctacctccggaagtggttgctcttgtcagacccagacgatttctcggcaggtgcacgaggatatctcaaaacgtcgctgtgcgtgttgggtccaggtgacgaggcccctctggaaaggaaagacccgagcgaagataaagaagatattgagtccaatctgctccggccaaccggagtcgcattgcgcggagcccacttttgcctgaaagtgttcagagcagaagatctgcctcagatggacgatgcagtgatggataacgtcaaacagatcttcggatttgaatctaataagaagaacctcgtcgaccctttcgtcgaagtctcattcgccggaaagatgctttgctccaaaatcctggaaaagacggcgaatccgcagtggaatcaaaacatcaccttgccggccatgtttccgtcgatgtgcgaaaagatgcggatccggatcattgattgggatcgcctgacccataatgacatcgtggccactacctatttgtcgatgtccaagatcagcgcccccggtggagagatcgaagaagagccggcaggagctgtgaagccgagcaaggcgagcgatttggatgactacctcggatttctccctaccttcggaccgtgctacattaacctttacggatcaccacgcgaattcacgggtttccctgatccgtacactgaactgaacactgggaagggcgaaggcgtggcttaccgcgggcgccttctgctctcactggaaaccaagctcgtggaacactcggagcaaaaagtggaggacttgccagcagatgatattctgcgcgtggagaaatatctgagacgacggaaatacagcctgttcgctgcgttctacagcgccactatgctgcaagacgtggacgatgcaatccaattcgaagtgtccatcggcaactacggcaataagttcgacatgacctgcttgccgctggcctcgactacccagtactcacgcgcagtctttgatggatgccactactactacctcccatggggcaacgtgaaaccggtggtggtgctctcttcctactgggaagatatttcccaccggatcgaaactcaaaatcagctgctgggaattgccgatcggctggaagcgggactggaacaagtccatctggccctcaaggcgcaatgctcgactgaagatgtcgatagcctcgtggcccagcttaccgacgagctgatcgcggggtgcagccagccgcttggggacatccacgaaaccccctcagccacccaccttgatcaatacctctaccagctgagaacccatcatctcagccagattactgaggctgctctggccctgaagctcggccactcggaactgccagctgccctggagcaagcggaggattggctcctgcgcctgagagccttggcggaagaaccccagaattcgctgccagatattgtgatctggatgctccagggtgacaagcgggtggcataccagcgtgtcccagcgcatcaggtgctgttttcgagacgcggagctaactactgtggcaagaactgtggaaagctccagactattttcttgaagtacccgatggagaaggtgcctggcgcgaggatgccggtccagatcagagtgaagctctggttcggactctcggttgatgaaaaggagttcaatcaattcgcggaaggcaaacttagcgtgtttgctgaaacctacgagaacgaaaccaagctggctctggtcggaaattgggggactactggactgacctacccgaagttctcagacgtcactggaaagattaagctgccgaaggattcctttagaccttctgccggatggacctgggccggagactggttcgtgtgccccgaaaagaccttgctgcatgatatggacgccggacatctgtcatttgttgaggaggtattcgagaaccagacccggctcccgggaggacagtggatctacatgagcgataactacacggacgtcaacggggagaaggtgttgccgaaagacgacatcgaatgcccgctcggctggaagtgggaggacgaggaatggtcgactgacttgaaccgggctgtggacgaacaaggctgggaatactcaatcactatcccaccggaacgcaagccaaagcactgggtcccagccgagaagatgtactacactcacagacgccgccggtgggtgcgcctgaggcgccgggacctctcgcaaatggaagctctgaaacggcatcggcaagccgaggcggagggagaaggatgggagtatgccagcctgttcgggtggaaattccacctcgaataccgcaagacggatgcgtttcgccgcagacggtggcggcgacggatggagccactggaaaagactggtcctgcggcagtctttgctctggaaggagctctgggcggggtgatggacgacaaatccgaggacagcatgtccgtctcaaccctgagcttcggtgtgaacagaccaaccatctcatgcatttttgattacgggaaccgttaccacctccgctgctacatgtaccaggccagagatctcgccgcaatggataaggactcgttcagtgacccgtacgctatcgtgtcattcctgcatcagtcgcagaaaactgtcgtggtcaaaaacacgctgaatccaacctgggaccaaaccctcatcttctacgaaatcgaaatcttcggagaaccagcaaccgtggcggaacagccgccgtcgatcgtcgtggagttgtacgaccatgacacgtacggcgcagacgagtttatgggaagatgcatctgccagccgtcgctcgagcggatgccgcgcctggcgtggttcccactgacccgcggatcgcaaccgtccggtgagttgctggcctcctttgagctgattcaacgcgaaaaaccagctatccatcatatcccgggattcgaagtgcaggaaacttctaggatcctggatgagtcggaggacaccgacctgccgtatccaccgccgcaacgtgaagctaacatatacatggtcccacagaatatcaagcctgcactgcaacgcaccgcgatcgagatcctggcctggggactgcgcaacatgaagagctaccaactggccaatatctcgtcgccgtcacttgtggtagaatgcggcgggcagactgtgcaatcctgcgtgatccgcaacttgcgcaagaaccccaacttcgacatctgcactctctttatggaggtgatgctgccccgcgaggaactgtactgcccgcccattactgtgaaggtcatcgacaatagacagtttggacgcagacctgtcgtgggacagtgcaccatccgttcgttggaatcgttcctgtgtgacccttactcggccgagagtccatcacctcagggtggacccgacgatgtgtcgttgctgtccccgggcgaggacgtgctcatcgacatcgacgataaggagccactcatcccaatccaggaagaagaattcatcgactggtggtctaagtttttcgcgtccatcggtgagcgggagaagtgtgggagctacctggagaaggacttcgacactctcaaagtgtacgacactcagctggaaaacgtggaagcgttcgaagggctgtccgacttttgcaatacctttaagctctaccgaggtaaaacccaagaggaaaccgaggatcctagcgtgatcggtgagtttaaaggactcttcaagatttatcccctcccggaggatccagctatcccgatgccgccaaggcaattccatcagctggccgctcagggaccgcaagaatgtctggtgagaatctacatcgtccgagccttcgggcttcaacctaaggacccaaatgggaagtgtgatccctatatcaaaatctcaatcggaaagaaatctgtgtcagatcaagacaattacattccgtgcactttggagccggtgttcggtaagatgttcgagctcacctgtactctcccgcttgaaaaggatctgaagattaccctttacgactacgacctcctttccaaggatgagaaaattggtgagactgtggtagatctggaaaacaggctgctgtcgaaattcggtgcgcggtgcgggctgccacaaacctactgtgtctctggacctaaccagtggcgggaccagttgcgcccttcacagttgctgcacctcttctgccagcaacacagggtgaaggccccggtgtaccgcaccgatagagtcatgttccaggacaaggagtattcgatcgaagaaatcgaggcaggaagaattccgaacccgcacctcggtcctgtggaggagcggctcgcgctccacgttctccagcagcagggcctggttccggagcacgtcgaaagccgcccgttgtactcgccactgcagccggacatcgagcagggaaagctgcagatgtgggtggacctgttccctaaagccctcggccggccgggaccaccattcaacatcaccccacgtagagctcgccgcttcttcctccggtgcatcatctggaatacccgcgatgtcatcttggacgacctgtcattgaccggagagaagatgtctgacatctatgtcaagggatggatgattggcttcgaggagcacaagcagaaaactgacgttcattaccggtccctgggtggagaaggaaacttcaattggcggttcattttccctttcgattaccttcctgctgagcaggtgtgcactatcgccaagaaggatgcattctggcggttggataaaaccgagtcgaagatcccagcgagggtggtgtttcagatctgggacaacgacaaattcagcttcgacgacttcctgggatcgctgcaactggatctcaacagaatgccaaagccagccaaaactgccaagaaatgctcactggaccagctggatgacgcttttcatcctgagtggttcgtcagcctgttcgagcagaaaacggtgaaggggtggtggccttgtgtggcagaagaaggcgagaagaagatcttggcaggcaagctggagatgaccctcgaaatcgtggccgagtcggaacacgaggaacgcccagcgggacagggccgcgacgaaccaaacatgaacccgaaattggaggaccctcgccggccggatacgtccttcctgtggtttacttcgccttacaagactatgaagttcatcctgtggcggcgctttcgctgggccataattctgtttatcatcctgttcatcctgctcctgttcctggcaatcttcatctacgcgttccctaattacgcggccatgaaactcgtgaagcccttctcc

SEQ ID NO: 48071 - DNA, 6243 bp, Artificial Sequence
  derived and/or modified sequence
atgctgtgctgtctgctggtgcgtgcaagcaatcttccttccgcaaagaaagacaggagaagcgatccagtggcgagcttgacctttaggggagtgaagaaacgcactaaggtcataaagaattcagtcaatcccgtgtggaatgaaggatttgagtgggacctgaagggaattccactggatcagggctccgagctccacgtggtggtgaaggatcatgaaactatggggcggaaccgatttctgggtgaggcaaaggtgccactgagagaggtcctggcgactccgtcgctgtcagcatcttttaacgcaccgctgctggatactaagaagcaacctactggagcatccctcgtcctgcaagtcagctacaccccactgcctggagcagtgccacttttccctccaccaacccctcttgagccaagccctactctgcctgacctggacgttgtggcagacaccgggggtgaagaggacactgaagatcaaggacttaccggagatgaagcggaacccttccttgaccaatccggtggacctggagcacccactaccccaagaaagctgccttcgcgacctccccctcactaccctgggataaaacgtaaacgcagcgcacccaccagccggaagctgctgagcgataaacctcaggatttccagattagggtgcaggtgatcgaaggacgacaactgcccggtgtgaatatcaagcctgtcgtcaaggtgacggcggcaggccaaaccaagagaactcggattcataagggaaattcccctcttttcaacgaaaccctgtttttcaatctgttcgatagccccggggaactttttgacgaacctattttcatcacggtggtggattcacgatcgctgcgaactgatgcactcctgggagaatttaggatggacgtcgggactatctaccgggagcctcgtcatgcctacctgagaaagtggctgttgctgtccgaccctgatgattttagcgcaggagcaaggggctatcttaagacttccctgtgtgtgctgggtccaggagatgaggcgccactggaaaggaaagatccgtccgaggacaaagaggacattgaaagcaatttgttgcggccgaccggcgtggcgctgcgaggtgctcatttctgtctgaaggtgtttagagcagaggatctcccgcaaatggacgacgcagtgatggataacgttaagcaaatctttggatttgaatcgaacaagaagaacctcgtggacccctttgtggaagtctcgtttgcaggcaaaatgctctgctcgaagatacttgaaaagaccgccaatccacaatggaaccaaaacatcaccctcccggcaatgtttcctagcatgtgtgaaaagatgagaatccgcatcattgactgggataggcttacccacaatgatatcgtggcaaccacttacctctcgatgagcaaaatcagcgcaccaggaggagagatcgaagaggagcctgctggggcggtcaaaccatccaaggcatctgatcttgatgattaccttggcttccttccaactttcggtccatgttacattaacctctacggttcgcctcgagaatttaccggatttccggacccatacactgaactgaacactggaaagggagaaggagtggcgtacagaggaaggcttctcttgtccctcgaaaccaagctggtggaacattccgaacaaaaggtggaggacctgccagcagatgatattcttagagtggaaaagtacctgcgcagacgaaaatactctcttttcgcagcattttactcagctactatgttgcaagacgtggatgacgcaattcaatttgaagtgtccattggaaattacggaaacaagttcgacatgacttgcctccctctggcaagcaccactcaatactcccgggcagtgttcgacgggtgtcactactactacctcccctggggaaacgtgaagcctgttgtcgtgctctcgtcgtactgggaggatattagccacaggattgaaacccaaaaccaactgcttggaattgcggataggttggaggcaggtctggaacaagtgcatttggcattgaaggcacagtgttccacggaggatgtcgattcgcttgtcgcccagctcaccgatgagctgatcgcaggatgttcccagccactgggcgacatacatgaaaccccgagcgcaactcatctggaccagtatctctaccagctccgcactcatcatctttcgcagatcaccgaggcagcactggcattgaagctgggccactcagaactgccagcagcccttgagcaagctgaagattggctgctgcgactgagagcactcgcagaagaaccccaaaattcgctccctgatatcgtgatttggatgctgcaaggcgataagcgtgtagcttaccagagggtgcccgctcatcaagtgcttttttcgagaaggggtgcaaactactgcggaaagaactgtgggaagctccagactatctttctgaagtacccgatggaaaaggtgcctggtgcacgcatgcccgtgcaaattcgggtgaaactttggtttgggttgtcggtcgatgaaaaggaattcaaccaatttgcagaaggaaagctgtctgtgttcgcagagacttacgaaaacgaaaccaaacttgcactggtgggcaactgggggaccaccgggttgacgtacccaaagttttcggatgtgaccgggaaaatcaagctcccgaaggattcgttcagaccatcagctgggtggacttgggcaggggattggtttgtgtgtcctgaaaagacgctgctccatgacatggatgcaggacacttgagcttcgtggaagaagtgtttgagaaccaaactcgacttcctgggggacagtggatatacatgagcgacaactacaccgatgtgaatggggaaaaagtgcttcctaaagatgacatcgaatgcccactggggtggaaatgggaagatgaggaatggtccaccgatctcaatagagccgtggatgagcaaggctgggagtactcgattaccattccacctgaacgtaaacctaagcattgggtaccagcagagaagatgtactatacccataggcgtcgccggtgggtgagactgcggcgcagagatctgtcacagatggaggccctgaagcgccatagacaggccgaagccgaaggagaaggatgggaatacgcgtccctgtttgggtggaagttccacctcgagtacagaaaaaccgatgcctttaggaggcgccggtggcgaagaagaatggagcctcttgaaaaaacgggtcctgccgcagtgtttgccctcgagggtgccctggggggtgttatggatgataaatcagaggactcgatgagcgtgtcgaccctctcgtttggggtgaaccgccccactatatcctgcatatttgactacggaaatcgctaccatcttagatgttacatgtaccaagcccgagatctggcggcaatggataaagattccttttctgatccctatgcaatcgtgtcctttctccaccagagccaaaagaccgtggtcgtgaagaatactctgaatccgacctgggaccagaccttgattttctacgaaattgagatttttggtgagccagcaactgttgcagaacaaccaccctcaattgtcgtcgaactgtatgatcacgacacgtacggtgccgacgaattcatgggaaggtgcatatgtcagccttcccttgaacgtatgccccgcctggcatggtttcctcttacccgggggtcccagccctcaggcgaactgctggctagtttcgagctcattcagcgtgaaaaacctgcgattcaccatattcctggcttcgaggtccaggaaacttcgaggatcctggacgaatcggaggatactgatctcccttaccctccacctcaaagagaggccaatatctacatggtgccgcagaacatcaagccggccctgcagcgaactgcaatcgaaattctggcgtggggattgcggaacatgaagagctaccaactggccaacattagctcccccagcctggtggtggaatgcggcggtcagactgtgcaatcgtgtgtgatacgaaacctgcggaagaatcccaattttgatatctgcacgttgtttatggaagtcatgctgcctcgagaagaactttactgcccaccaattactgtgaaggtgattgataataggcaatttgggcggcggcctgtggttggtcaatgtaccattagatcgcttgaatcctttctgtgtgacccatactcggctgagtcaccaagcccacaagggggccccgatgatgtgagcctcctgtcacctggtgaggatgttctcatcgacatcgacgataaggagccactgattccaatccaagaggaagaattcatcgattggtggtctaagttttttgcgtcgattggtgaacgcgaaaaatgtgggtcgtacctggaaaaggattttgatacgctgaaggtgtacgatacccagcttgaaaacgtggaagcctttgaaggattgtccgacttctgtaacacctttaagctctacagaggcaagacccaggaagaaactgaggatccctcggtcattggggagtttaaaggactcttcaagatttaccctctgccagaggatccagccattccgatgccacctagacagtttcatcagctcgccgcacaaggacctcaggaatgtctggtgagaatttacatcgtcagggccttcggccttcaacccaaggaccctaatggaaagtgtgacccttacatcaagatatcgattggtaagaagtcagtgtcggatcaagataactacatcccttgtacgcttgaacctgtatttggaaagatgttcgagcttacctgtaccctgcctctcgaaaaggatctgaaaatcaccctgtacgactatgacctgctttccaaggatgagaagattggtgaaaccgtcgtcgacttggagaacagacttctgagcaagttcggagctcgttgcggcctgcctcagacctactgtgtcagtggaccaaatcaatggagagatcaactgcgtccttcgcagctccttcaccttttttgtcagcagcatagagtcaaggcaccagtgtaccggaccgatcgagtgatgtttcaggacaaagaatacagcattgaagaaattgaagcgggaaggatccctaatccccacctcggacctgtggaggaacggcttgcgctccacgttcttcaacagcaaggccttgtgccagaacatgtggagtcgcgccctctgtactcgccacttcagcctgatattgaacaaggcaaacttcagatgtgggtcgatctgtttccgaaagcccttgggaggcccggacctccattcaacattactccgcgacgagcaaggagatttttccttagatgtatcatttggaacactagagatgtgattctggatgatctgtcgctcactggagagaagatgtctgatatctacgtgaagggttggatgatcggctttgaagaacacaagcagaaaacggatgtgcactaccggtccctcggaggtgaaggtaactttaactggcgattcatttttcctttcgactacctgccagccgagcaagtgtgcacgatcgctaagaaggatgcgttctggcggctggataagaccgagtccaagattccagcaagggtggtgttccagatttgggacaacgataagttctcctttgatgattttctcggctcgttgcaactcgacttgaatcgtatgcccaaaccggccaagactgctaaaaagtgctcactggatcaactggacgacgcatttcaccctgaatggtttgtctccctttttgagcaaaagactgtcaaaggatggtggccttgcgtcgcggaggaaggagaaaagaagattctggcaggaaagctggagatgacgctggaaatagtggcagagagcgaacacgaagaaagaccagccggacaaggtcgggatgaaccgaacatgaatcccaagttggaggatccaagacggccagataccagctttctttggtttacctcgccttacaagacgatgaagttcatcttgtggcgccggttcagatgggccattattcttttcattatcttgtttattcttcttttgtttcttgcgatcttcatatatgcgtttcctaactatgcagccatgaagctggtgaaacctttttcg

SEQ ID NO: 48072 - DNA, 6243 bp, Artificial Sequence
  derived and/or modified sequence
atgctgtgctgcctcctggtccgggcatcgaatctgccgtcagcaaagaaggatagacggtcagatcctgtcgcctcgcttacctttcgaggtgtcaaaaaacgaaccaaggtgatcaagaattcagttaaccctgtgtggaatgaagggtttgaatgggatctgaagggcattcctctcgatcaaggttcggaacttcatgtggtcgtgaaggaccatgaaacgatggggcgcaaccgttttcttggcgaagcaaaggtcccccttcgggaagtgctcgcaacccccagcttgtcggcatcgttcaacgcaccacttcttgacaccaagaagcagcccaccggtgcttccctggtactgcaagtgagctacactccccttcccggagcagtgccgcttttccctcctcccaccccgctggaaccctcacccactctgccagacctcgatgtcgttgcggataccggaggtgaagaagataccgaagatcaaggccttactggggacgaagcagaaccatttctggaccaaagcgggggcccaggcgcacctaccactcctcgtaagctcccttcgcgcccacccccacattacccaggaataaagagaaagcggagcgcaccaacttcacgaaagctgctttcagataagccccaggattttcaaattcgggtgcaagtgattgagggtcgtcaacttccaggcgtcaacatcaagcctgtggtcaaagtgactgccgcaggtcagaccaagagaactagaattcataagggaaactcgccacttttcaacgaaactctcttctttaatctgtttgattcaccaggtgaactgtttgatgaacctatcttcattactgtggtcgactcacgaagccttcggaccgatgcactgcttggagagtttcgtatggacgtaggaactatttacagagaaccacgtcacgcgtacttgagaaagtggctcctgttgtccgatcctgatgatttctcagcgggtgctcgaggataccttaaaacgtccctttgtgtgcttggaccgggtgacgaggcccccctggaacgaaaggacccttcggaggacaaagaggatatcgaaagcaaccttctgcgcccgactggagtagccctccgcggcgcacacttttgtctgaaggtgtttcgcgcagaagatctgccgcaaatggacgacgccgtgatggacaatgtcaagcagatatttggatttgagtccaataagaaaaaccttgtcgaccctttcgtggaagtctcctttgcaggtaaaatgctctgttccaagattctcgaaaagacggcaaacccacagtggaaccaaaacattactcttcctgcaatgttcccttcaatgtgtgagaagatgagaatacgcataattgattgggatagactgacccataatgatattgtggctactacttacctctcgatgtcaaaaatctcggcaccaggaggagaaattgaagaagagccagcgggggcagtgaagcctagcaaagcatcggatttggatgactaccttggatttttgccgacgtttggaccttgctacatcaacctttacggatcgcctcgcgaatttactgggtttcccgacccatacactgagcttaataccggaaaaggtgaaggagtcgcgtaccgcggacgtctgctcttgtcccttgaaactaaactggtggaacattccgaacaaaaggtggaggacctcccagcggacgatatcctccgggtcgaaaagtaccttcggcggcgcaagtacagcctgtttgcagcattctattcggcaaccatgttgcaggatgtggatgacgcaattcaatttgaggtgtcgattggaaattacggcaacaagtttgacatgacttgtctgccattggcatccactacccagtatagcagggctgtgttcgacggatgtcattactactacctcccatggggcaacgtgaagcctgttgtggtgcttagctcctactgggaggatatatctcatcggatcgaaacccagaatcagcttctgggaattgcagatcgtcttgaagcaggactcgaacaagtccatctcgcacttaaagcccaatgcagcaccgaggacgtggattcgctcgtggcgcaactgactgatgaactgattgcgggatgttctcaacctctgggggacatccacgaaacgccttcggccactcacttggatcaatacctttaccagctgaggacgcatcacctgtcacaaataaccgaggccgcgcttgcgctcaagctgggccactccgagctgcccgccgcgctggagcaggcagaggattggttgttgaggctgagagcactcgccgaagaacctcaaaactcgctcccagacattgttatttggatgctccagggtgataaacgtgtggcataccagcgcgtgccggcacaccaggtgctcttttcgagacgaggcgcaaactactgcggaaagaattgtggaaagttgcagacgatttttctgaagtaccctatggagaaggtgcccggagcaagaatgcctgtgcaaattcgcgtcaagctgtggtttggactcagcgtggatgaaaaagagtttaaccagtttgccgaaggaaagctgtccgtgtttgcggaaacctatgaaaacgagactaagctggcccttgtgggaaactggggaactacgggcctgacttatccgaaattctcggacgtgactgggaagataaaactgccaaaggattcgtttcggcctagtgcaggatggacctgggcgggtgattggtttgtgtgtcccgaaaagactcttcttcatgacatggatgcaggacatctgtcgtttgtcgaagaggtctttgaaaaccagactcggctccctgggggacaatggatctatatgtcggacaattacactgatgtcaacggggaaaaagtgctgcctaaggatgatatagagtgtccccttggatggaaatgggaggatgaagagtggtccaccgaccttaaccgcgcagtggatgaacaggggtgggagtactccataaccattcctcctgaacggaagcctaagcattgggtgccggccgaaaagatgtactacacccatagacgcaggcggtgggtgcgtctccgtcgccgtgacctcagccagatggaagccctgaaaagacatagacaagcagaagcagagggagaaggctgggaatacgcctctctttttggttggaagttccatctggagtacagaaagaccgatgctttccgccgccgcagatggagacgcagaatggaacctcttgaaaagacggggcccgcagcagtgtttgcgctggaaggagcattgggaggcgtcatggatgataaatccgaagattcaatgtcggtttcaactctgagctttggtgtgaacagacccaccatcagctgtatctttgactacggtaacagataccacctgagatgttacatgtatcaagcgagagatctggcagccatggacaaggatagcttcagtgacccatacgccatcgtctctttcctccaccaatcgcaaaaaaccgtagtcgtcaagaatactttgaacccaacctgggatcaaaccctgattttctacgagatcgaaatctttggtgaaccggcgaccgtggctgagcagcccccttccatcgtggtggagctgtacgaccacgatacttacggggctgatgaattcatgggtaggtgtatttgtcagccctcccttgaacgcatgcctagactggcctggtttcctctgacccgcggttcacagccatcaggagaacttcttgcatcctttgaacttattcagagggaaaagcctgcgattcatcatatccctggattcgaagtgcaagaaacttctcgcatcctcgacgaatctgaggacactgatttgccgtacccaccacctcaacgagaagcaaacatttacatggtgccacaaaacattaaaccagccctccaacggacggcgattgaaatcctcgcatgggggttgagaaacatgaaatcgtaccaactggcgaatatcagctccccttcgcttgtggtcgaatgtggaggtcagactgtgcaatcgtgtgtgattcggaacctcagaaagaaccccaattttgacatctgcaccctcttcatggaggtgatgcttcctagagaggaactttactgtccacccatcacggtgaaggtcatcgacaatcggcaatttggccggcgcccagtggtgggacagtgcacgatacgaagcctcgagtcctttctgtgtgacccttactccgctgagtcacccagcccacaagggggcccagacgatgtgtcgttgctgtccccaggagaagatgtgcttattgacattgatgataaagaacctctcattcctattcaggaggaggagtttattgattggtggtcgaaattcttcgcatccatcggagaacgcgagaagtgtggttcgtaccttgaaaaggatttcgatacgcttaaggtctacgatactcaactggagaatgtggaagcattcgaaggtttgtccgacttctgcaacacgtttaaactgtaccggggaaaaactcaggaggaaaccgaggatcctagcgtgattggtgagtttaagggccttttcaagatttaccccctgcctgaggatcctgccattcccatgcctccgagacaatttcatcaattggcagcgcagggacctcaggaatgcttggtgcgcatctacattgtcagggcatttggactgcagccgaaagatccgaatggtaagtgcgacccgtacattaagatttcaataggcaaaaagtcggtatcagatcaggataactacattccatgtactctggaacctgtgtttggaaaaatgttcgaattgacgtgtaccctgccactcgaaaaggatctgaagataaccttgtatgattacgatcttctttcgaaggatgaaaagataggcgaaaccgtcgtggacctggagaatagacttctgtcaaagttcggagcgcggtgcggtttgccacagacttactgtgtgtcaggaccaaaccagtggcgggatcaactccggcctagccagctgctgcatcttttttgtcaacagcaccgcgtcaaggcacctgtgtaccggaccgacagagtgatgttccaagataaggaatactcgattgaagagattgaagccggaagaattccgaaccctcatctcggtcctgtggaagagagacttgcccttcatgtgctgcaacagcaaggcttggtcccagaacatgtggaatccagacccctctactctcctctgcaacctgatatcgagcagggtaagctgcagatgtgggtggatctgttccctaaggcactcggtcggcctgggccaccattcaacataactcccaggcgtgcgcgcaggttctttcttaggtgcattatctggaatacccgcgacgtgatcctcgacgatctgtcactgaccggggaaaagatgtccgacatttacgtgaaaggatggatgatcggctttgaagagcacaagcaaaaaacggatgtccattacaggtccctggggggagaaggaaactttaactggagattcatattcccatttgactaccttcctgcagaacaggtctgtaccattgcaaagaaagatgctttttggagactggataagacggaatccaagatccccgcaagagtggtttttcaaatttgggataatgacaagttctcctttgatgactttcttgggagtctgcaacttgatctgaaccgtatgcctaaaccagccaagaccgccaagaaatgttcgctcgatcagctcgatgatgcctttcatcccgagtggttcgtgagcctgttcgagcaaaagactgtgaaaggttggtggccatgcgttgcggaagaaggagaaaagaaaatcctcgccggaaagctggaaatgaccctggagatcgtggcagaatcggagcatgaagagcgccctgcaggtcaaggtcgcgatgaaccaaatatgaacccaaagctcgaggaccctaggcgtcctgatacctcgttcctttggtttacttcgccatacaagaccatgaagtttatcctttggcgtagatttagatgggcaatcatactctttatcatcctgtttatcttgcttctcttcctggcaattttcatttacgcatttccgaattacgcagcgatgaagttggtgaagcctttcagc

SEQ ID NO: 48073 - DNA, 6243 bp, Artificial Sequence
  derived and/or modified sequence
atgctgtgctgcttgctcgtgcgagcatcaaatctcccgtcggcaaagaaagaccgccgctcggacccggtcgcatcccttacttttcgaggcgtgaagaaaaggaccaaggtgatcaaaaacagcgtcaacccagtttggaacgaaggattcgaatgggacctgaagggcattccacttgatcaaggatctgaactgcatgtcgtggtcaaggatcacgaaaccatgggacgaaatcggtttctcggagaagcaaaagtgccccttagagaagtgctggcaactccatcactttcggcttcgtttaacgcacctctgctggatacgaagaagcaacctaccggtgcctcgttggtcctgcaagtgtcctacaccccactgcccggggcagtccctctgtttcctccaccaacccctctcgaaccctcacctactctgccagatctcgacgtggtcgccgacaccggaggtgaggaggacacggaggaccaaggactgaccggtgatgaggcagaaccatttcttgatcaatcaggcggccctggtgcccctaccaccccgcggaaattgccatcacggccaccacctcactaccctggaatcaaacggaagcgttcggccccgacgtcccgcaagctccttagcgataaaccacaagacttccagattagagtgcaggtgattgagggtagacaactgccaggtgtgaacattaaaccggtcgtgaaggtgaccgcagctggacaaaccaagaggacccggattcataagggaaactcgccacttttcaatgaaactctcttctttaaccttttcgacagtcctggtgaattgttcgatgagcctatctttatcacggtggtcgattcaagatcgttgaggaccgacgccctgcttggggaatttcgcatggatgtcggaactatttaccgggaacctcgccatgcttaccttcggaagtggctcctgttgtccgacccagacgacttttccgcaggagcaagaggctacctgaaaacttctctttgcgttctcggtccgggtgatgaagcacctctggaaagaaaggatccttcagaggacaaagaggatatagaaagcaaccttctccgaccaactggagtggcgttgcggggagcgcatttttgcctgaaagtgtttcgggcagaggaccttcctcagatggacgacgcagttatggataacgtgaagcagatttttgggtttgaaagcaacaagaagaacctcgtggacccctttgtcgaagtgtcgtttgcaggaaagatgctctgttcgaaaatcctggaaaagactgccaatcctcaatggaatcagaacattactcttccagcaatgtttcctagcatgtgcgaaaagatgagaattcggataattgattgggacagactgacccacaacgatatagttgcgaccacgtacctttcgatgagcaaaatcagcgcgcccggaggtgaaatcgaggaggaacctgccggcgccgtgaagccgtccaaggcaagcgatctcgatgattacctcggctttcttccaaccttcggcccttgttacatcaacctgtacgggagtccgagagaattcactggatttcctgatccctacactgagttgaacactggtaaaggagagggagtggcttaccgcggacggctgctcctttcccttgagactaaactcgtggaacattcagaacaaaaggtggaagatctgccagcagacgatattctgagggtcgagaagtacttgaggcggcgaaaatacagcctcttcgcggccttctactcagcaaccatgctgcaagacgtcgatgatgcaatccaatttgaggtgagcatcggtaactacggaaataagtttgatatgacctgcctgccactggcctcaaccacccaatattcgagagccgtgttcgacggctgtcactactactacctcccatggggtaatgtgaagcccgtcgtggtgcttagctcctactgggaggacatctcgcatcggattgaaacccaaaatcaactgctcggaatcgcagaccgacttgaagcgggactcgagcaggttcacctcgcgctgaaggcacaatgttctactgaggacgtcgacagcctcgtggcacaacttactgatgaactcatcgcaggatgttcgcagccgcttggggacattcacgaaaccccatccgcaacccatctcgaccagtacctctaccagcttaggactcatcatcttagccagatcaccgaagccgcgctggccttgaaactcggccatagcgaactgcccgcagcccttgaacaggccgaggattggcttctgcggctgagagctctggcagaagaaccacagaattcgctcccagatattgtgatttggatgcttcagggagataagcgcgttgcatatcaaagagtccctgctcatcaggtgctgttttcgagaagaggtgcgaactactgtgggaagaattgcggaaagctgcaaaccatttttctcaagtaccccatggaaaaagtcccaggtgcacggatgccagtgcagatccgggtgaaactttggttcggactgtcggtggatgaaaaggagtttaatcagtttgctgaagggaaactgtctgtgtttgcggaaacttacgaaaatgaaactaaactcgcgctcgtggggaactggggcaccactggtttgacctaccctaaattctcggatgtcactgggaagattaaactgccaaaggatagcttcaggccctcagctgggtggacctgggcaggagactggttcgtgtgccctgaaaagacgctgcttcatgatatggacgcaggacacctctcatttgtcgaagaagtctttgaaaatcaaactcgccttccaggcgggcaatggatatacatgtcggacaactacaccgacgtgaacggggaaaaggtgcttcccaaggacgatattgagtgtcctctgggatggaagtgggaggacgaagaatggtccactgaccttaacagagcagtggacgaacagggttgggagtacagcataactatccccccggaaagaaaacctaagcattgggttcctgcagagaagatgtattacacccatcgtcgtcgtcgctgggtgcggctcagacgccgtgatctttcccagatggaagcactgaagcggcatcgtcaagcggaagcagaaggagaaggatgggaatacgcttcgcttttcggctggaagtttcacctggaatacagaaagactgatgcattccgtcgaaggagatggcgacgccgtatggaaccactggagaaaaccggcccagcagccgtctttgcactggaaggagcactcggcggcgtgatggatgataagagcgaggacagcatgtcggtgtcaactctgagctttggtgtgaacagacctaccatttcctgtattttcgactacggcaaccggtaccatctgaggtgctacatgtaccaggccagggatcttgctgccatggataaggactcgttctccgatccgtacgcaattgtttcgttccttcatcaatcgcagaaaactgtcgtcgtgaagaatacccttaatccgacctgggaccagaccttgatcttttacgaaattgagattttcggtgaacctgcaactgtggcagaacagcctccttcaattgtcgtagagctgtacgatcatgatacgtacggagcggatgagtttatgggccggtgtatatgccaacctagccttgagagaatgcctagactggcgtggttcccgcttacgcgcggatcgcagccatccggggaactgctcgcatcatttgagcttattcaaagggagaaacccgccatacatcatatccccggctttgaggtccaagagacgtcacggattttggacgagtcagaagataccgacctgccataccctcccccacaacgagaggccaatatctacatggtgccacagaacatcaaacctgccctccagcgaaccgccatagagattcttgcctggggactccgtaacatgaaatcctaccaattggctaacatatcttcaccgagcctggtggtggaatgtggagggcaaacggtccagtcctgtgtgattaggaatctcagaaaaaaccctaacttcgatatttgtacgctgtttatggaagtcatgcttcctcgggaggagctctactgccctcctatcaccgtcaaagtgatcgataataggcaatttggccgcagaccagtcgtgggccagtgtactattcgctcgctcgagagcttcttgtgtgatccttacagcgcggaaagcccttcccctcaaggaggaccagacgatgtttcgctcctgtcaccaggagaggatgtgcttatcgacatcgacgataaagaacctctgattccgattcaagaagaagagtttatcgactggtggtcgaaattctttgcatcgattggtgagcgtgaaaaatgtggatcctaccttgagaaagattttgatactcttaaggtgtacgatacccagttggagaacgtggaggcattcgaaggactctcggacttttgtaacacgttcaagctgtacagaggaaagacgcaagaggaaactgaagatcctagcgtgatcggggagtttaagggccttttcaagatctaccctttgcccgaggaccctgcaattccaatgccccctaggcagttccatcagctcgcagcacagggtcctcaggaatgcttggtgcggatctacatcgtccgggcatttgggcttcagcctaaagatccaaacggtaaatgtgatccatacatcaagatctcaataggaaaaaagagcgtgtctgatcaagacaactacatcccttgtaccctggagccagtctttggaaagatgtttgagctcacctgtacgcttccattggaaaaggatctcaagatcactctgtatgattacgacctgctttctaaggatgaaaagataggggagactgtcgtggatttggaaaaccgccttctttccaagtttggggcacggtgcggacttccccagacgtactgtgtgtcggggccaaatcaatggcgtgatcaattgcgaccatcccagctgctgcatctgttttgtcaacaacatagagtaaaggcacctgtgtatcgcactgatagggtgatgtttcaggataaggagtactccatcgaagaaattgaagcaggaagaattcctaacccgcatctgggtccagtggaggagcggctggcccttcatgtgcttcaacagcagggtcttgtgccggaacatgtggagtcgcgaccgctgtactcgccgttgcaacccgacattgaacaaggcaaactgcagatgtgggtggatctgtttcctaaggcgctggggcgccccggtcctccttttaacattacgccgaggcgcgcaaggagattctttcttcgatgtatcatttggaacactcgagatgttattcttgatgatctttcattgacgggggaaaagatgtcagatatctatgtcaaggggtggatgattggatttgaagaacataagcaaaagaccgacgtgcattacaggtccctcggcggagaaggcaatttcaattggagatttatctttccattcgactaccttccggctgaacaagtgtgtacgatcgcaaagaaggatgcattttggaggttggacaagactgaatccaagatccctgccagagtggtctttcagatttgggataacgataagttttcctttgatgatttcctcggttccttgcaactggacctgaatcggatgccgaagccagcaaagaccgctaagaagtgtagcctggaccaactcgacgacgcatttcatccagagtggttcgtgtcactgtttgagcagaaaaccgtcaagggatggtggccgtgtgtcgctgaggagggagaaaagaagatacttgcaggcaagctggagatgactcttgaaattgtcgccgaaagcgagcacgaagagcggcccgctggccagggccgtgatgagcctaacatgaatcctaaactggaagatcctagacggcccgatacttcgtttttgtggttcacttccccgtacaagaccatgaagtttattctgtggcgcaggttccgatgggcaattatcctgttcatcatacttttcattcttcttctgttccttgctattttcatttacgcatttccaaattacgcagctatgaagctcgtaaagccattttcc

SEQ ID NO: 48074 - DNA, 6243 bp, Artificial Sequence
  derived and/or modified sequence
atgttgtgttgcctcctggtgcgtgcctccaacctgcccagtgcaaaaaaggacaggcggtcagatcctgtggcttcactgactttcagaggggttaaaaaaagaaccaaggtgatcaaaaactccgtgaacccggtgtggaacgagggattcgagtgggacctgaagggcatccccctagaccagggtagcgagttgcatgtcgtcgtgaaggaccacgaaacaatgggccgtaatagattcttaggcgaggccaaagtgccactcagggaggtgttggcaactccctccctgtccgcatccttcaacgcccccctgctagatactaaaaaacagccgacaggcgccagcctggttcttcaggtgtcctatactcctctgcctggtgccgtgcccctgtttcccccccctacaccattggaaccctcccccactctgccggatcttgatgtggtggctgacacaggcggtgaagaagataccgaagaccagggacttaccggtgatgaggccgagcccttcctggatcagagcggaggcccaggcgcccctacaacgccaaggaagctgcccagtagaccccccccacattacccagggattaagagaaaaagatctgccccaacttcccgcaaattactttctgataaacctcaggattttcaaataagagtgcaggtgattgaggggcgacagcttcccggggtcaacatcaagcctgtggttaaagttaccgctgcaggacagacgaaacggacccggatccacaaaggcaattcaccactgtttaacgagaccctgtttttcaacctattcgacagtcccggggagttattcgacgaacctatatttatcacagtggtggacagccgctcactgaggacagacgctttacttggcgagttccggatggatgtaggtactatttatcgtgagcctagacatgcttacttgcgcaagtggctcctgcttagcgaccctgacgatttttctgccggcgcgaggggctacctgaaaacatctttatgtgtattagggcccggcgatgaggctcccctagagaggaaggaccccagcgaagacaaagaggacatcgaatcaaatctactcagaccaacgggagtggccctgcggggggctcatttctgccttaaggtcttcagggcagaagatctgccccagatggacgacgcggttatggataatgtcaagcagatctttggattcgagagcaataagaagaacctggtggatccctttgtggaagtgtcgtttgctggtaaaatgctgtgcagcaagatcctggagaaaacagcaaacccccaatggaatcagaacatcaccctgcccgctatgttcccgtccatgtgcgagaaaatgcgcattcggatcatcgattgggaccggctaacacataatgatattgtagcgactacctatctttccatgtcgaagatctctgctccagggggtgagattgaggaggagcccgctggggcggtaaagccaagcaaagcctcagaccttgacgattatctcgggttcctccctacctttggcccctgctatataaacctgtacggctcacctagggagttcactggattcccagacccttacaccgagttgaacactggaaaaggcgaaggagttgcttacagaggccggctgctcttgtcactggagaccaaactagttgagcacagcgaacagaaggtcgaggatcttcccgctgatgatattcttcgagtcgaaaagtacctgcgccgcaggaagtactctctgtttgcagccttctattccgcaaccatgctgcaggatgtggacgatgcaatccagttcgaagtctccatcggcaactatggaaacaagtttgacatgacttgtcttcccttggcatccacaactcagtattctcgcgcggtgttcgatgggtgtcactattattatctcccctgggggaatgtaaagcccgttgtagtcttgtcctcatactgggaagatatttctcaccgcatagagacacaaaaccagttattaggtatcgctgataggctggaagccggcttggagcaggtccatttggcacttaaggcccagtgctctacagaggacgtggacagcttggtcgctcagctgactgacgaacttatagcaggatgcagccagccacttggtgatatacatgaaacaccgtctgctactcacctcgaccagtatctatatcagctgcggacccatcacctgtctcagatcaccgaggcagcactcgcactgaagctgggccacagtgagctgcctgcggcgcttgaacaggctgaagactggctgttacggcttagggccttggcagaggaaccccagaattcactgcccgacattgtgatctggatgctgcagggcgataaaagagtggcataccaacgcgtgccagcccaccaggtgctattttcgaggagaggcgcgaattactgtgggaaaaattgcggaaagttgcagaccatattcctcaagtaccctatggagaaagtcccaggggccaggatgccagtccagatcagagtgaagctgtggttcggactgagcgttgacgaaaaggaattcaaccagtttgcagaagggaagttgtccgtattcgcagagacgtatgagaacgagacaaagttagcccttgtgggtaattgggggactaccgggctgacgtaccccaaattctctgatgtgacagggaaaatcaagctccccaaggacagctttagaccctcagcgggttggacgtgggcgggagattggttcgtctgcccggaaaagactctgctacatgatatggatgcggggcacctctctttcgtggaagaggtattcgagaaccagacccgcttgccagggggccagtggatctacatgagcgataactacaccgacgtgaacggggaaaaggtgcttcctaaggacgacatcgagtgccctttggggtggaagtgggaggatgaggaatggagtaccgacctcaacagagctgtggacgaacagggctgggaatactccatcactattccccctgagaggaaacctaagcactgggtccccgccgaaaagatgtattatacgcacagacgaaggcgatgggttcgactgcggcgtcgcgatctgagtcagatggaggcgctgaaaaggcatcgtcaggcagaagctgaaggggagggctgggagtatgcaagtctgttcggctggaaattccatctggagtacaggaagacagatgccttcaggagaaggcgatggaggagaagaatggagcccctggagaaaaccggtcccgctgctgtgtttgcacttgagggtgcgctgggaggggtgatggatgataagagcgaggacagcatgtccgtgtcaacactatccttcggggtcaaccggcctaccatttcgtgcatctttgattatggtaacagatatcacctcaggtgttatatgtaccaagcccgcgacctcgctgccatggacaaagactctttctcagatccctatgccatcgtcagctttctgcatcagagccagaagacagttgtggtgaagaataccttaaatcctacgtgggatcagactcttatcttctatgagatcgaaatctttggagaaccagcaacagtcgcggagcagccaccctctattgtggtggagttatatgaccacgatacttatggcgccgatgaattcatgggccggtgcatctgccagccgagtctcgaaaggatgccacgcctcgcatggtttcctttgaccaggggatctcaaccaagtggggagttactcgcaagcttcgaactgatccagagagagaagcccgcgatccaccacataccaggattcgaggtccaggagaccagtcgcattctggacgagtctgaagacacggatctcccttacccgccgccacaaagggaggctaatatttacatggtgccccagaatattaaaccggctcttcagcgaactgctattgaaatccttgcctggggtctgagaaacatgaagagctaccaactagccaatattagcagtccttcactggtggtggaatgtggcggccagaccgttcagagctgcgtgattcggaatcttcgcaagaaccccaattttgacatttgcaccctctttatggaggtgatgttgccccgtgaggagctttactgcccaccaattactgtaaaggtgatcgacaaccgtcagtttggtcgacgacccgtagtgggccagtgcaccatccgatccttggagagctttctgtgtgatccatattcggctgaatcaccttccccgcaggggggcccagacgatgtttcccttctcagtcccggggaagacgtgttgatcgatattgacgacaaagaaccactcatccctattcaggaggaggaatttatcgattggtggagtaagtttttcgccagcatcggtgagagggagaaatgtgggtcttatctggagaaggatttcgataccctgaaggtctatgatacacagctcgaaaatgtggaagcctttgagggcctttccgacttctgcaatacattcaagctttatcggggcaaaacgcaggaggagaccgaggacccgagcgtgataggggagttcaagggcctgtttaagatttatcctcttcccgaggaccctgccatacccatgcctccaaggcagtttcaccagctcgctgcccagggcccccaagagtgtttggtcaggatctacatcgtccgcgccttcggattgcaaccaaaggaccctaacggcaagtgcgacccatatatcaagatctccatcggcaaaaagtccgtgtccgaccaagacaattacattccatgcacattagagcccgtctttgggaagatgttcgagctgacctgcacccttcccttagaaaaggacctgaaaatcaccctgtatgactacgacctgctgagcaaggatgagaaaataggagagaccgtcgtggatctcgaaaataggctcctctctaaatttggagcccgatgtggtctcccgcagacttattgcgttagcggcccgaaccagtggcgcgatcagcttcgccctagccagctgttacacctcttttgccagcagcaccgcgttaaagcccccgtgtatagaaccgatcgcgtgatgttccaggacaaggagtacagcatcgaggagattgaagccggccgcatcccaaatccccacctgggaccagtggaagagcgcctagcattgcacgtgttgcagcagcagggactggtgcccgagcacgtggaatcaaggcccctgtatagtcctctgcaacccgacattgaacagggcaagctgcagatgtgggtcgacctgtttcctaaggccctcggaaggcccggaccgcccttcaacatcacgccgcgtcgggcacggaggttctttctgaggtgcattatctggaacacccgcgatgtgatactggatgacttgtccctgacaggggaaaagatgtctgatatttatgttaagggatggatgatagggttcgaggagcataaacagaagaccgacgtgcattatcggagccttggcggtgagggcaactttaattggcgtttcatctttccctttgactatctgcctgctgagcaggtctgtacgatagcaaagaaagatgccttttggcggctggacaaaaccgagagcaagatccccgccagagtcgtgttccagatctgggacaatgacaagttttctttcgacgactttctgggttctctgcaactcgacctgaataggatgcctaagcctgctaagaccgccaagaagtgcagcctggatcagctggatgatgccttccaccccgaatggttcgtgagcctgttcgaacagaagaccgttaaaggctggtggccatgtgtggccgaagaaggcgaaaagaaaatcctggccggaaagcttgagatgaccctcgagatcgtggccgagagcgagcatgaggaacggccagccggccagggccgggatgaaccaaatatgaatcccaagctcgaggatccgcgcagacctgatacgtcctttctttggttcacctctccgtataagactatgaagttcatcctgtggcgccgatttcgttgggccataatcctctttattattctattcattcttcttctcttcctcgcgatcttcatatatgcctttccaaactatgctgctatgaagctcgtaaaacccttcagc

SEQ ID NO: 48075 - DNA, 6243 bp, Artificial Sequence
  derived and/or modified sequence
atgttgtgctgtctccttgtgagggcctcaaatcttccctccgcaaaaaaggaccgtcggtctgacccggtggcctcactgacgtttagaggggtgaaaaagaggacaaaagtcatcaagaactcagtcaacccagtgtggaacgagggttttgagtgggacctgaaggggattccattagatcagggctctgagctgcatgttgtggtgaaagaccatgagaccatgggacggaataggttccttggagaagcgaaggtcccgttgcgagaggtgctggccacaccctcgctgtcagcttcctttaacgctccgctgctagatacaaaaaagcagccaaccggggcatcattggtcttgcaggtctcttacacaccgctgccgggtgcagtccctctcttcccaccgcccactcccctggagccatctcccactcttccagatcttgatgtggtagctgataccggcggagaggaggacacagaagatcagggcctgactggtgatgaagcggagccttttctagaccagtccgggggcccaggtgcgcctaccactccccggaagctccccagccggcctccgccgcactaccccggcatcaaaagaaagcgtagcgcaccgactagcaggaagttgctttctgacaaaccccaggattttcaaattagggtgcaggtaatcgagggaaggcaactgcctggcgtcaatatcaagcccgtcgttaaggtcacggctgctggccagaccaagcggacccgaatccataaagggaattcacccttatttaacgaaacattgtttttcaacctgttcgacagtcccggtgagcttttcgacgagccaattttcataacagtcgttgactcaaggagcctacggacagacgcgctccttggagaatttcgcatggacgtaggcactatatatagagagcctcgccacgcttatttaaggaagtggttactgctttctgaccccgacgacttctcagcaggcgctagggggtacttgaaaacttccctgtgtgttttggggcccggcgacgaagctccactcgaaaggaaggatccgtcagaagacaaagaggacatcgaaagcaaccttctcaggccgacaggcgtcgcgctgaggggggctcatttctgcctgaaggtttttcgtgctgaggacctgcctcagatggatgatgccgtcatggataatgtaaagcagatattcggtttcgagagcaacaaaaaaaacctagtggaccctttcgttgaagtgtcctttgccgggaagatgctgtgttcaaagatcctcgaaaagactgcaaatccccaatggaatcaaaatataacacttcccgccatgttccccagtatgtgcgagaaaatgagaatccgcatcatcgattgggatagactgacccacaacgatatcgttgctacgacctacctatccatgagcaagatctccgccccaggcggtgagattgaagaggagcctgcaggtgctgttaaaccgtccaaggcctctgacctggatgactatctgggatttctgcccactttcgggccctgttacataaacctgtatgggtcaccccgcgagttcaccggctttcccgacccctacactgaactcaataccgggaaaggtgagggcgtggcgtataggggcaggctcctgctgtctcttgaaacgaaactggtggagcactcagaacagaaagtcgaagaccttcctgccgacgacatcctgcgcgtggaaaagtacctcaggcgcaggaagtattctttgttcgctgctttttactccgccactatgcttcaggacgttgacgatgcaatacagttcgaggtgtccatcggaaattacggaaacaaatttgacatgacctgtttgccactggcatccactactcagtacagtcgggccgttttcgacggttgccactactactacctcccctggggcaacgtgaaaccggtcgtggtcctgagcagctactgggaggatattagccaccggattgagacacagaaccagctgttagggatagccgatcgcctggaggcagggcttgaacaggtgcatctggcgttaaaggcacagtgcagcactgaggacgtggatagtttggtagctcagctgacggatgaactgattgctgggtgcagccaacctctcggagacatccatgaaactccttcagctacacacttagaccagtatctgtatcagcttcggacacaccacctctcacaaatcacagaggccgctctagctctgaagctgggtcactccgaactcccagctgccctcgaacaggcagaggactggctgttaagactcagggcgctggccgaagagccccaaaatagcttgcccgatattgtaatctggatgttgcagggcgacaagcgagtggcatatcaacgagtaccggctcatcaggtgctgttcagccgcaggggcgccaactattgtggcaagaactgcggtaagttgcagacgattttcttaaagtatcccatggagaaggtgccaggcgcgcggatgcctgtccagatccgggtcaagctatggttcgggctctctgtcgatgaaaaggaattcaatcagttcgctgagggaaaactgagtgtctttgcggaaacttatgagaatgagacaaagcttgcgctcgtgggcaactggggcaccaccggcttaacatatccaaagttcagcgacgtgacgggcaaaattaagctacccaaggattcattccggccttccgccggatggacatgggccggcgactggttcgtgtgtcctgagaagacgctgctccacgacatggacgccggacatctctctttcgttgaagaggtcttcgaaaaccagaccagactgcccggaggacagtggatttatatgtctgataattacactgacgttaacggcgaaaaggtgctccctaaagacgatatcgagtgtccattgggatggaaatgggaggatgaagagtggtccacggacttgaaccgcgctgtcgacgaacagggatgggaatattccattaccattccccctgagcggaagccaaaacattgggtgcctgcggagaagatgtactatacccataggcggcgccgctgggtgagattgcggcggagggacctgtcacagatggaggcccttaaaaggcatcgccaggccgaagccgaaggggaagggtgggagtacgcatcactcttcggatggaagtttcaccttgaataccgtaagaccgacgcctttagacgccggcgctggagaagaagaatggagccactcgaaaaaaccggccctgccgcagttttcgcactcgaaggggccttaggcggcgtgatggatgataaatctgaggactctatgagtgtgtcgactctgtcgtttggtgtaaatcgcccaacgatcagctgtatctttgattacgggaatagatatcacctcaggtgctatatgtatcaggccagagatttggccgctatggataaggacagcttctcggacccatacgccatagtgagctttctccaccagtcgcaaaaaactgtggtagtcaagaatacgttgaatcccacatgggaccagaccctgattttctatgagattgaaatcttcggagagcctgcaactgtagccgagcagccacctagtatcgtggtggagctgtacgaccatgatacctatggcgccgatgaatttatgggacgttgcatttgccaacctagcttggagagaatgccaaggctggcctggttcccgttaacgcggggctctcaaccctccggagaacttctggcctcattcgaactgatacagcgcgagaaaccggcaattcatcatatccccggctttgaggtccaggagacaagccgtatcctagatgagtctgaggatacagacttgccctatccaccccctcagcgggaggctaatatatacatggtccctcagaatataaaacctgcacttcagaggactgccattgaaatacttgcttggggcttgcggaacatgaaatcctatcaattggctaacattagttccccatctctggtagtggagtgcggaggacaaacagtgcagagttgtgtgatcaggaacctgcgtaaaaacccaaacttcgatatttgcacactctttatggaagtaatgctcccccgggaggagctatattgtcccccaatcactgttaaggtcatcgacaatcgccagttcggacggcggccagtcgtggggcagtgtacgattaggagtttggagtcatttctgtgcgacccgtattctgcagagtcaccgagccctcaaggcggcccagatgatgtcagcctcttatctccaggggaggacgtgctgatcgacatcgacgataaagagcccctgattcctattcaggaagaagaatttattgattggtggtctaagttttttgcttccatcggggagcgagagaagtgcggtagctacttggagaaagacttcgatacgctgaaggtgtacgacacgcaactcgagaacgtcgaggcctttgagggtctctcagacttttgtaatacgttcaaactttatagaggcaagacccaggaggagaccgaggatccgtccgtcattggtgagtttaagggtctgttcaaaatctatcctctccctgaagaccccgcaatccctatgccgccaaggcagtttcatcagttagccgcccaaggccctcaggagtgtttggtccgcatctacatagtgagagccttcgggctgcagccgaaggacccaaatggcaaatgcgacccttacattaaaatcagtatagggaagaaaagtgtgagtgaccaagacaattacatcccctgcaccttggagcctgtgtttggaaagatgttcgagctcacctgtactcttcctcttgagaaggatctgaagatcacactttacgattatgacttgctgtctaaagacgagaagatcggcgaaacggtagtcgatctagagaatcggttgcttagcaagttcggagcgcggtgcgggctacctcagacatactgcgtctctgggcctaatcaatggcgcgatcagctaaggccatctcagctattgcatctgttttgccagcagcatcgagtgaaggcccctgtgtaccggactgatcgtgtgatgtttcaagataaagaatattccatcgaggagatcgaagcagggagaataccgaacccccacttgggcccagttgaagaacgcctggcactccacgtcctccaacaacagggtctggtaccagagcacgtggaatcaagaccactctactcccccctgcaaccggacatagaacaaggaaagctccagatgtgggtggacctatttcctaaggccttgggccggccagggcctccttttaacattacaccgcggcgcgcccgccggtttttcttgcgctgcataatttggaatacaagggacgtgatcctcgacgatctgagccttacaggcgagaaaatgtccgatatctatgtaaaaggatggatgatcgggtttgaggagcacaaacaaaagactgatgtccactatagatccctgggcggagaagggaattttaactggcgtttcatctttccattcgactatctgcccgcggaacaagtttgtacaatcgcaaagaaggacgccttctggcggctggacaagacagaaagtaaaatacccgcccgtgtggtgttccagatctgggacaacgataagtttagttttgatgacttcctgggctcactgcagttggatttgaacaggatgccaaagccagccaagacagctaaaaagtgttccctcgaccaacttgacgatgcattccaccccgagtggtttgtctcgctcttcgaacagaaaacagtgaagggttggtggccctgtgtggccgaggagggagaaaagaaaatactggccggtaagttggaaatgactctggaaattgttgctgagtccgaacatgaagaaaggccagccggacaaggacgcgacgagccaaacatgaaccccaagctggaagatccgagacgtccagacaccagcttcctctggtttacttcaccttacaagaccatgaaatttatcctgtggcgcaggttccgctgggctattatcctgttcatcattctgtttattctgctgctgttccttgccatttttatttatgcattccctaattatgctgcaatgaagctggttaaaccattttca

SEQ ID NO: 48076 - DNA, 6243 bp, Artificial Sequence
  derived and/or modified sequence
atgctgtgctgcctgcttgtgcgtgctagtaacctgccgtcggcgaagaaagatcgcagatcggaccctgtggccagcctgaccttcaggggggtcaagaaaagaactaaagtgatcaagaactcggtcaacccagtgtggaatgagggattcgagtgggatctgaaagggatcccacttgaccagggcagtgaactgcacgtggttgtcaaggaccatgaaacgatggggcggaacagattcctgggtgaagcgaaggtgcccctgcgcgaagtgctcgctacgccatccctctccgcgtccttcaatgccccgcttctggacaccaagaagcagccaacgggcgcttccttggtgctgcaggtgtcttacaccccactgccgggtgcggtcccgcttttcccgccgcctacgcctctggagccgtcccccaccttgcctgacctcgacgtggtggccgacactggcggagaggaagatacggaagatcagggtctgaccggagacgaagccgagccgttcctcgatcagtcaggcggaccgggcgcacctactacccctagaaaactgccgtcccgcccgccaccacactacccgggaatcaaaaggaagagatccgctccgacttcacggaagctcctgtcagataagccccaggactttcaaatcagagtccaagtgatcgaaggacgccagctccctggtgtgaacatcaagcccgtcgtcaaggtgaccgccgcaggacagaccaagagaacccggattcacaaaggtaattcccccttgttcaacgaaaccctgtttttcaatttgttcgattccccaggagaactgttcgacgaaccgatctttatcaccgtggtcgacagcagatcgctgaggactgacgctctgctgggagaatttaggatggatgtgggaaccatttacagggagccgcgccacgcctacctcagaaagtggcttctgctgtccgaccctgacgacttcagcgccggagcccgcggataccttaaaacctcgctctgcgtgctgggtccaggcgacgaggccccgctggaacggaaagaccccagcgaagataaagaggacatcgaatccaaccttctccgcccgaccggtgttgcactgcggggagcgcatttctgtctgaaggtgttcagagcggaagatctcccacaaatggatgacgccgtgatggacaatgtcaagcaaatcttcggatttgaatcgaacaagaagaatctcgtcgacccatttgttgaagtctcgttcgcgggcaagatgctgtgttctaagatactggaaaagactgctaatccacagtggaaccagaacatcactctccccgcgatgtttccatctatgtgcgaaaagatgcggatccggattatcgattgggaccggcttacccacaacgatatcgtggccaccacttacttgtctatgagcaaaatcagcgccccgggaggagaaatcgaagaggagcctgctggcgcggtcaagccctcaaaggcttcagaccttgatgattacctggggttcctcccgacttttggaccgtgctacatcaatctgtacggaagcccacgggaattcaccggatttccggatccgtacactgaattgaacaccgggaaaggtgagggagttgcctaccgggggagactgctgctgtcactcgagactaagctggtcgaacattcggagcaaaaagtggaggacttgccggccgacgatatcctgcgcgtcgaaaagtacctccgcaggcggaagtactcactgttcgccgccttctactccgcaactatgctgcaggatgtggatgacgccatccagttcgaagtgtccatcggcaattacggcaataagttcgacatgacctgcctgcctctggcatcgacgacccagtacagccgggcagtgttcgacggatgtcattactactacttgccgtgggggaacgtgaagccggtcgtggtgttgtcatcatactgggaagatatttctcaccggatcgagactcagaaccaactgctcggaatcgccgatagactggaggcgggcctcgagcaggtccacctggcgctgaaggcccaatgctccacggaggatgtggatagcctggtggcacagctcactgatgagctcattgcagggtgctctcagccgctgggagacatccacgaaactccttcggcgactcacttggaccaatacctctaccaacttcgcactcaccatttgtcccaaattactgaggctgccctggccctgaagctgggacactccgaactcccggccgctctggaacaggccgaggactggttgctgcggttgcgggccctggccgaagaaccgcaaaattcactcccggacatcgtgatctggatgctgcagggagacaagcgcgtggcttaccagcgcgttccggcacaccaggtgctgttcagtagacggggagcaaactactgcggtaagaactgtggaaaactccagactatcttccttaagtaccctatggaaaaggtcccaggagcaaggatgcctgtgcagattagagtgaaactttggttcggactgtcggttgacgagaaggagtttaaccaattcgccgagggaaagctcagcgtttttgccgaaacttacgagaatgaaactaagctcgctctggtcgggaattggggaaccacgggactcacgtacccaaagtttagcgacgtgaccggtaaaatcaagctgccaaaggattcgttccgcccttcagcaggatggacttgggcaggggattggttcgtctgcccagaaaagactctcctccacgatatggatgcgggacacctgagttttgtggaggaagtgttcgagaaccaaactcgactgccgggcggacagtggatctacatgtcggataactacactgatgtgaatggtgaaaaggtgctgccgaaagacgacatcgaatgcccgctcggctggaaatgggaggatgaagagtggtccaccgaccttaacagagccgtggacgaacagggttgggagtactcgatcaccatcccgccggagcggaagccgaaacattgggtcccggccgagaaaatgtactacactcacagacggcgccgctgggtgaggttgcgccgcagagatctttcccagatggaggcgttgaaacgccaccgccaagcagaagcggaaggagaggggtgggaatacgcatccctcttcggatggaagtttcacctcgagtatagaaaaaccgacgcgttccgtcggcggagatggcgccgccgcatggaacccctggaaaagacgggcccggccgcggtattcgctctcgaaggagccttgggaggcgtgatggacgacaagtccgaagattcaatgtcggtgtcgactctgtcgttcggcgtgaacaggcccaccatctcgtgcattttcgactacgggaatcggtaccacctcaggtgctacatgtatcaagcccgggacctcgctgcgatggataaagactccttttcggacccgtacgcaatagtctccttcctgcatcagagccaaaagactgtcgtggtcaagaacaccctgaatccgacttgggaccagactctgatcttctacgagatcgagatatttggtgaaccggccactgttgctgagcaaccaccgtccatcgtcgtcgaactgtacgatcatgacacctacggcgcggacgagttcatgggtaggtgtatttgtcagcctagcctggaacggatgccgcggctggcttggttcccgctgactcgcgggtcgcaaccgagcggagaactgctcgcttcctttgagctgatccagcgggaaaagcccgcgattcatcacatcccgggtttcgaagtacaggagacttccaggatcctcgatgagtccgaggataccgatctgccctacccaccgccgcagcgcgaagctaatatctatatggtcccacagaacatcaaaccggccctccagcgcacggcgatcgaaatcctcgcttggggactgcgaaatatgaagtcctaccaactggccaacatctcctccccttcgctcgtggtggaatgcggcggacagactgttcaatcctgcgtgatcagaaatctgcgaaagaaccctaatttcgacatttgcactttgtttatggaagtcatgctgccccgggaagagttgtactgccctcctatcaccgtcaaagtcatcgacaaccggcaattcggtcgccggccggtggttggccagtgtaccatcaggtcgctggaatcgtttctttgcgacccatacagcgcagaatcccccagcccgcagggcgggcctgatgatgtgtcgctgctctcacctggggaagatgtgttgattgatatcgatgacaaagaaccgctgattccgattcaggaagaggagttcatcgactggtggagcaagttcttcgcgtccattggcgaaagagaaaagtgcggatcatacctcgaaaaggatttcgacacgctgaaggtgtacgacactcaacttgagaacgtcgaagccttcgaagggctttccgatttctgtaacacttttaagctgtaccggggcaagacccaagaagagactgaagatccatccgtgatcggagagttcaagggcctgttcaagatctaccccctgcccgaagatccggctatccctatgccaccacgccaattccaccaattggccgcgcaaggcccgcaggaatgcctggtgagaatctacatcgtgcgggcattcggacttcagcctaaggatccgaacggaaagtgtgacccctacatcaagatctcgatcgggaaaaagtcagtctccgaccaagacaactacatcccctgtactttggagcctgtgttcggcaagatgttcgaactgacctgcactttgcccctcgagaaagacctgaagatcaccctgtacgattatgatctcctgtcgaaagatgaaaagatcggagagacggttgtggacctggagaaccgcctgttgtcgaaattcggagcccgctgcggactcccacagacgtactgcgtgtccggaccgaatcagtggagggatcagctccggcctagccaactgttgcacctgttctgtcagcagcacagagtcaaggctcctgtgtaccggactgatcgcgtgatgttccaggacaaagagtactcaatcgaagaaatcgaagcgggtagaatcccgaatcctcacctgggccccgtggaagaacgcttggccctccatgtgctgcagcaacagggacttgtgccggaacacgttgaaagcagaccactgtactcgccgctccagccagacatcgaacaaggcaagctccaaatgtgggtggatttgttcccgaaggccctggggcgcccagggccccccttcaacatcactcctcgcagagccagacgattctttcttcggtgcatcatctggaacactagggatgtcatccttgacgacctgagccttaccggagagaaaatgtccgacatttacgtcaagggttggatgatcggattcgaagagcataagcaaaagaccgacgtgcactaccggtcgctcggaggagaaggcaacttcaactggagatttatctttcctttcgactacctcccggccgagcaggtgtgcaccatcgcgaagaaggacgcgttctggcgcctggacaaaactgagagcaagattcctgcacgcgtggtgtttcaaatctgggacaacgataagttctcgttcgatgacttcttgggttccctgcaactggatcttaataggatgccaaaacctgctaagactgctaaaaagtgctccctggaccagctggacgacgccttccatccggagtggttcgtgagcttgttcgagcagaaaactgtgaagggatggtggccgtgcgtggcggaagagggcgagaagaagatcctggccggaaaactggaaatgactctcgaaatcgtggcggaatccgaacatgaagagcggcctgcggggcagggaagggatgaaccaaacatgaatccgaagctggaagatccccggaggccagacacttcgttcctctggttcacttccccatacaaaaccatgaagtttattctctggcgtagatttagatgggcgatcatccttttcattattctgttcatcctgctgctcttccttgcaatcttcatctacgcgtttcccaactacgcggcaatgaagctggtgaaacctttcagc

SEQ ID NO: 48077 - DNA, 6243 bp, Artificial Sequence
  derived and/or modified sequence
atgctctgctgccttctggtgcgcgcttccaacctgccttctgcaaaaaaggatcggagaagcgatccagtcgcgagcctgacttttcggggggtcaagaagagaacaaaggttatcaagaattcagttaatcccgtgtggaatgaggggtttgagtgggatctgaagggtattcctctggaccaggggtctgagctccacgtcgtcgtgaaggatcatgaaacaatgggtaggaacagatttctgggtgaggccaaggtgccgcttagggaggtcctggcgactccatctcttagcgctagctttaacgctcctcttctggacaccaagaagcagcctacaggtgcgtcactggtgctgcaggtcagttacactcccctgccaggagccgtacccctctttccacctccaacccccctggaacccagcccgacactgcccgacctcgacgtggtagccgacacaggtggggaggaagatacggaggatcagggcctcaccggagacgaggccgagccattcctggatcaatccggcgggccaggggctcccactacccctcggaagctccccagtagaccaccccctcattatccaggaataaagcgaaagcggagcgcacccacctctaggaagcttttgtccgataagccccaggacttccagataagggtgcaggtgattgagggccggcagctgccaggcgtgaacataaagcccgtggtgaaggtgaccgcagctggccaaacgaaacgcacgcgcatacacaagggcaattctcctctgtttaacgaaacgctgttctttaacctgttcgatagccctggcgaactgttcgatgagcccatcttcatcacagtcgtcgactctcggagccttaggacagacgccctcttgggtgagttccggatggacgttggtaccatctatagggagcctcgccatgcatacttgcgaaagtggctgctcctgagcgacccagacgatttttctgcaggcgcacggggttacctcaaaacctccctgtgcgtactgggtcctggcgacgaagcgcctcttgagagaaaagaccccagtgaagataaggaagacatcgaatctaatctgctgcggccaaccggggtggctctgcgcggtgcacatttttgtctgaaggtattcagggccgaagacttgccacagatggacgatgccgtcatggataatgtcaagcagatattcgggttcgagtccaataaaaagaatctggtcgacccatttgtagaagtctcttttgcagggaagatgctttgcagtaagattctggagaagacagctaaccctcagtggaaccaaaatatcacccttcccgcgatgtttccaagtatgtgtgaaaaaatgcgaatccggatcatcgactgggatcggctgacgcacaacgatatagtggctacgacatacctgagcatgagcaagatttctgcacccggaggggaaatcgaggaggagcctgccggggctgttaagcccagcaaggcatccgacctggacgattacctcgggtttctgccgacattcggcccctgctatatcaatctgtacgggtcacctagagaattcaccggctttcctgacccctacactgagctcaacactgggaagggggaaggggtggcataccgcggccggcttctgctctctctcgagactaagctggtggaacacagtgagcaaaaagtggaagacctccccgccgatgacatccttagggttgagaaatatctgaggagaagaaagtacagcctgtttgccgccttctacagtgccactatgctccaggatgtcgacgatgcgatccagtttgaagtgtcaattggcaactatgggaataaatttgatatgacctgcctgcctttggcatcaacgacacagtacagccgggctgtgttcgacggatgccactattattatctgccctgggggaatgtaaaacctgtggtcgtgttgtcctcctattgggaggatatttcacatagaatcgagacacagaaccagctcctcggaattgctgatagattggaggctggccttgagcaagtgcatctggccctgaaagctcagtgctccaccgaagacgtcgacagcttggtggcccagttgactgatgagttgatagccgggtgtagtcagccactgggcgatattcacgaaacccctagcgccacccaccttgaccagtacctgtaccagctgaggactcatcacctgtcccaaattaccgaggcagctctggcccttaaactgggtcacagcgagctgcccgctgccctggaacaggccgaggattggctgttgcgactgcgagccctcgcggaagaacctcagaattcactgcccgatattgtgatttggatgttgcagggggataaacgggtcgcctatcagcgggtccccgcgcaccaagtactcttttcacggcggggagcaaattattgtgggaaaaattgtgggaaactgcagaccatttttcttaagtatccaatggaaaaagtccccggcgcccggatgccggtgcagatccgcgtgaagttgtggtttgggctttcagtggacgaaaaggaattcaaccagtttgctgaaggcaagttgtctgtgttcgccgagacctatgaaaacgaaacaaaactcgccctcgtgggaaattgggggacgacgggccttacttaccccaagttctccgatgtgacaggcaagataaagctgcccaaagattccttcaggccgagtgccggttggacatgggctggagactggttcgtgtgcccagaaaaaacattgctgcacgatatggatgcggggcatctgtcttttgttgaggaggtcttcgagaatcaaactcgccttcccggaggtcagtggatttacatgtccgacaactacaccgacgtcaacggtgagaaggttctgccaaaagacgatatcgaatgccccctgggctggaagtgggaagatgaggagtggagtacagatctgaaccgggcagtcgacgagcagggttgggagtattctattactattcctccggaacggaagccaaaacactgggtcccagctgagaagatgtattacacccacagacggcgccgctgggttcggcttagaaggagagacttgagtcagatggaggcccttaaacggcacaggcaggctgaagccgaaggcgagggctgggaatacgcttctctgttcggctggaagttccaccttgaataccggaagacagatgcttttcggcgcagacgctggaggagacggatggaaccgctggagaagaccggccccgcggccgtgttcgcacttgaaggagctctgggcggagtgatggatgacaagagcgaggacagcatgagtgtgtcaaccctgagctttggggtcaaccggcccacgatcagttgtatttttgactacggaaatagatatcacctcagatgctacatgtatcaggcccgggatctggcagccatggacaaagactccttttcagacccctacgccatcgtgtcctttctgcaccaatctcagaagacagtggtcgtcaaaaatacgctcaaccctacgtgggatcagacactcattttctatgagatagagatctttggggagcctgctaccgttgcagaacagcctccctctatcgtcgtggagctgtatgatcacgatacttatggagcagacgagttcatgggtcggtgtatctgtcagccttccctcgagcggatgccccgactggcctggtttccactgacccgggggtcccagcctagcggcgagctccttgcaagctttgagctgattcagcgagagaagcccgccatccaccacataccggggtttgaagtgcaggagaccagtcgcattctcgatgagtctgaggatacagatctgccctaccctcccccccagcgcgaggctaatatctacatggttccccagaacatcaagcccgccctgcaacggaccgcgatcgagattctggcatggggtctgcgcaacatgaagtcctaccagctggccaatatatcttcccccagcctggtcgtcgagtgcgggggacagactgtgcagagctgcgtcatccgaaacctccgcaagaatcccaacttcgatatttgtaccctgtttatggaagttatgcttccacgcgaggagctgtactgtccaccgattaccgtaaaggtgatcgataatcggcagtttggacggaggcccgtggtgggacaatgcactatcaggagtttggagtcctttctctgcgatccctacagcgctgagagcccttccccccagggtgggccagacgacgtgtccctcctgtctcccggagaagatgtgctgatcgacatcgatgataaggagcccctgattcctatacaggaagaggagtttattgattggtggtctaagttcttcgccagcatcggagagcgggaaaagtgtggcagctacctcgagaaggattttgatacgcttaaagtgtacgatacccaactggaaaacgtggaagcgttcgaaggacttagcgacttttgtaacaccttcaagctctacagaggtaagacccaggaggagactgaggatccctccgtgattggcgaatttaagggactgtttaaaatttacccccttcccgaggatcctgccattcccatgccacccaggcagttccaccagttggccgcgcaggggccgcaagagtgtcttgtgcgcatctacatagtgcgcgctttcggcctgcagccaaaggacccaaacggaaaatgtgatccatacatcaaaattagcattggcaagaaatcagtttctgatcaggataactatattccatgcacgctggaacctgtcttcggaaaaatgttcgagcttacgtgcaccctgccgttggaaaaagacctgaagattaccttgtacgattatgatctgctgtccaaggacgagaagattggagaaacggttgtagacttggaaaaccggctgttgtccaaattcggagctaggtgtggattgccccagacctactgtgtatccggtcccaatcagtggagagaccaacttcgaccgagtcagttgcttcacctgttctgccagcagcatagagtgaaggccccagtgtatcggactgatagggtgatgttccaggacaaggagtattcaatcgaggaaatcgaggctggaagaatccctaaccctcatttgggtcccgtagaggagaggttggcacttcatgttttgcaacagcagggattggttccagagcatgtggagtccaggccactctattcccctctgcagcctgacattgagcagggcaagttgcagatgtgggttgatcttttcccaaaagccctgggtcgcccgggccccccgtttaatattacacctaggcgcgcaagaaggttctttctgagatgtattatatggaatacccgcgacgtcatcctcgatgatctgtcactgactggcgaaaagatgtctgatatttatgtaaagggatggatgatcggttttgaagagcacaagcaaaaaacagacgtgcactacagaagcctgggtggtgaaggaaacttcaattggcggttcatctttcccttcgactacttgcctgccgaacaggtctgcacaatcgcaaaaaaggacgccttctggaggctggacaaaaccgagagcaagatcccagctcgggtagttttccaaatttgggataacgataagttcagttttgacgatttcctgggaagcctgcagcttgacctcaatcgaatgccaaagcctgccaaaaccgcaaaaaagtgttccctcgaccagctggatgatgcttttcaccctgagtggtttgtgagcctttttgaacagaagacagtgaagggctggtggccttgtgtggccgaagaaggagagaagaaaatcctggcaggtaagcttgaaatgacattggaaatcgtagcggagagcgaacacgaggagcgaccagctggtcagggacgggatgaacctaatatgaatccaaagctcgaagacccgcgccgacctgatacctcttttctgtggttcacctccccctacaagaccatgaaatttattttgtggcgaagatttcggtgggcaattatcctctttattattctgttcattctgctgctcttcctggcgattttcatctacgcatttccaaactatgccgccatgaaattggtcaagccattcagt

SEQ ID NO: 48078 - DNA, 6243 bp, Artificial Sequence
  derived and/or modified sequence
atgttgtgctgcctccttgtccgtgcatccaatcttcccagcgctaagaaggaccggcgtagcgatcccgtggcgagtctaacctttcgaggagtgaagaagcggaccaaggtgataaaaaacagtgtgaaccccgtgtggaacgaaggattcgagtgggacctaaaaggaatcccactcgaccagggatcagagttacatgtagtggtgaaagaccatgagaccatggggcggaatcgcttcctgggggaggcgaaggtgcccctccgggaagtgctggctactcccagcctgagcgccagtttcaacgctccactactggatacaaagaagcagccaactggagcttccctagtgctacaagtgtcttataccccccttcccggagctgtgccactttttcctccacccactcccttggagccttctccgacgcttccagatctggatgtggtcgccgatacggggggagaggaggataccgaagaccaggggttgactggcgacgaggcagagccgttcctcgatcagtctgggggtcccggggcccctacaacaccccgaaaactcccaagccgaccccccccccactatcctggcatcaagaggaagcggagcgctcccacatccagaaagcttctatccgataaaccacaggatttccagattcgggtccaggtgatcgaagggcgtcagctgcctggagtcaatattaagcctgtggttaaagttaccgcagccggtcagacaaaaagaacccgtatacataaggggaattccccgctcttcaatgagaccttgttctttaatttgttcgacagccccggcgagctgttcgacgagccaatctttatcacagtcgtggacagtcgatcgctcagaactgacgcgctgctaggggagtttcgaatggatgtgggtaccatataccgcgagccgcggcatgcttacctgagaaaatggttgttgttgtctgacccagatgatttctcggctggtgcccgggggtacctgaagactagcctttgtgtgcttgggcccggcgacgaagcacccctggagaggaaggatcccagtgaagacaaggaagacatcgagtcaaacctcctgaggccaaccggggtggctcttagaggtgcccacttttgtctgaaggtttttagagcggaggacttgccgcaaatggacgacgcggtgatggacaacgttaagcagatattcgggttcgagtcgaacaagaagaatctcgtggacccttttgttgaggtgagtttcgcgggaaaaatgctttgcagcaaaattctcgagaaaactgctaacccacagtggaatcagaacataacattaccggccatgttcccttccatgtgtgagaagatgagaattcgtataatcgattgggaccgcctaacccacaatgatatagtggcgacaacctacttgtccatgagcaaaatctccgcccctggaggcgagatcgaggaggaacctgccggggccgtaaagcccagcaaagcttccgatcttgacgattacttgggcttcctgcccacttttggtccttgttatatcaatctgtacggctcaccccgcgagtttaccgggtttcccgacccttacaccgaactaaacactggcaaaggggagggcgtggcctaccgcggaagactcctcctcagcctagagaccaagctcgtcgaacactctgagcagaaagtcgaagaccttcctgccgacgatatcctcagagtggagaagtacctgcggagacggaaatactccctgttcgctgccttctattcagctacaatgttacaggatgtcgatgatgccattcaattcgaggtgagcatcggcaactatggcaataaattcgacatgacttgcctgcccctcgcttctaccacccagtatagccgcgcagtgttcgacggatgtcactattattatcttccatgggggaacgtcaaaccagtggtggtcctgtcttcatactgggaggacataagtcatcggatcgaaacacagaaccaactgctgggcatagctgacaggctcgaagccggcctggagcaagtgcatctcgccttgaaagctcagtgctcgacagaggacgtggattctctcgttgctcaactgaccgatgaactgatcgccggatgctcacagcccctgggagatatacatgaaacacccagcgcaacacaccttgaccaatatctgtaccaactacgcacacaccacctgagccagattaccgaggcagcattggcccttaaactaggccacagcgaacttccggccgctctggagcaggcagaggactggttgttgcgacttagggccctagccgaagagccccagaacagtttgccagacattgttatctggatgctacagggggacaaacgagtggcataccagcgcgtgcctgcccatcaagtcttgttctccaggagaggagccaactactgcgggaagaattgtggaaagctccaaacaatattccttaaataccccatggagaaggttcctggagctcgaatgcctgtccagatccgggtgaaactgtggtttggcttgtctgtggacgaaaaagaattcaatcagtttgcggaaggaaagttgtccgtcttcgcagaaacctacgagaacgaaacaaagttggctctggtaggcaactgggggacaacagggctgacatatcctaagttctcggatgtgactggcaagatcaagttaccaaaagattcgtttagaccaagcgcaggatggacatgggccggcgattggtttgtgtgccccgaaaagacactcttgcacgatatggatgctgggcatctgtccttcgtggaggaggtgtttgagaatcagaccagactccctggcggccagtggatttacatgtccgacaactacaccgacgtaaacggcgagaaggtgttgcccaaagacgacatagaatgccctctgggctggaagtgggaggatgaggagtggagcaccgatctgaaccgtgctgtggatgagcaaggctgggagtattctataaccatcccgcccgagcgtaaaccaaaacactgggtccccgcagaaaagatgtactacacccatcgccggcggcgctgggtccgcttacggcggcgagatctctcccagatggaagccctaaagaggcatcggcaggccgaagctgagggtgagggatgggaatatgcatccctatttgggtggaagttccacctggagtatcgcaaaaccgatgcgttcaggcggagaaggtggagacgccggatggaacccttagaaaagacaggcccggctgcggtctttgcgctggagggcgctctggggggagtcatggatgataaatccgaggactctatgagtgtttcaaccctgtcctttggggttaacaggccaacgatcagctgtattttcgactatggcaatcgctaccacctacgatgttatatgtaccaggctcgcgatttagccgcgatggacaaggactcgttcagcgacccctacgccattgtttctttcctgcatcagagccagaaaacggttgtggtgaaaaataccctaaatccgacgtgggatcaaactctcatcttctatgagatcgagatcttcggggagcccgcgaccgtagcagaacagccacccagtatagtggtggaactttacgatcatgacacttacggcgccgatgagtttatgggccggtgtatctgccaaccgtcactcgaaagaatgccacgcctcgcgtggtttccccttacaagaggatctcagccctccggagagcttctcgcatcatttgagttgattcagcgggagaaacctgcaattcatcacattcctggtttcgaagtacaggaaacctcacgtattctggacgagtccgaggataccgaccttccctacccaccaccccagagggaggccaatatctatatggtcccgcagaatatcaaacctgcacttcagcgaacagctattgaaattttagcatgggggttacgaaacatgaaatcataccaactcgcgaacatcagctctccgagcctggtggtggagtgtggagggcagactgtccagtcttgcgtcattagaaatttacggaagaaccctaatttcgacatatgcaccctgtttatggaagtaatgctaccgcgggaggaactctactgccctcccataacggtgaaagtgatcgacaaccggcagtttgggcgcaggcccgttgtcggccagtgtaccatacggagccttgagtcatttttatgcgatccatattctgcggagtcccccagcccacaaggagggcctgacgatgtgagtctgttgtctccaggagaggacgttttgatcgatattgacgacaaagagcctcttatccctattcaggaagaagagtttatcgactggtggtccaagttctttgcttctatcggcgagcgcgaaaagtgtgggtcataccttgagaaggattttgacactctcaaggtgtatgatacccaactggaaaatgttgaagcattcgaggggctgagtgacttctgtaatacttttaaattataccgtggaaaaactcaggaggagactgaggacccgtccgtgatcggagagttcaaagggttgtttaaaatttaccccctgccggaggatccggctatccccatgccacccaggcagttccatcagttggcagcgcagggcccacaggaatgcctggtacggatctacattgtgagagccttcgggttgcagccaaaggatcctaacgggaaatgcgatccgtacatcaagatctcaatcggtaaaaaaagcgtctccgaccaggataattatatcccttgtaccctcgaaccagtgttcggcaaaatgttcgagctgacctgtaccttacccctggagaaggacctcaagatcaccttatacgactatgacctgttgagtaaggacgagaaaataggggagaccgtggtcgacctcgagaaccggctgctttcaaaattcggggctcggtgtggtcttcctcagacttactgcgtgagtggaccaaatcagtggcgggaccaattgcgccccagccagctgctccacctgttttgtcagcaacatcgggtgaaggccccagtctatcggaccgacagagtgatgtttcaggacaaggaatattcgatcgaggaaattgaggcaggccgcatcccaaaccctcatttggggcccgttgaggagcggctggcacttcacgttctgcagcaacagggtctggtaccagagcatgtggaaagtcgccccctgtacagtcctctgcaaccagatattgagcaaggtaaactccagatgtgggttgacttatttcctaaggccctgggtcggccaggtcctccttttaacattacacccagacgggcacgtagattctttctgcgatgtataatttggaacactcgggatgtcatcctggatgatttatctctcactggagaaaaaatgtctgatatatacgtgaaaggctggatgattgggttcgaggagcataaacagaaaaccgatgttcattacaggtctttgggtggcgagggaaatttcaactggaggttcattttcccgttcgactacctgcccgctgaacaggtgtgtacaattgctaaaaaagacgctttctggaggctggacaagaccgaatcaaaaatcccagcacgggtggtgtttcagatctgggacaacgataagttcagctttgacgacttcctgggcagccttcaactggatcttaatagaatgccaaagccggcaaagacagcaaaaaaatgttcactcgaccagctggatgatgcattccatcctgagtggttcgtctcattgtttgagcaaaagactgtaaaaggttggtggccatgcgtagcggaggagggagaaaaaaagattctcgccggtaagctggaaatgactttggagatcgtggctgagagtgagcacgaggagcggccagcaggacaggggagggatgaacctaacatgaatcccaagctggaggacccgcgccggccggacactagctttctctggtttacatccccctataaaacaatgaagttcatcctatggcgcagatttcgctgggcaatcatcctcttcatcatcttattcatcctcctcttatttttggccattttcatttacgcatttcctaattacgccgctatgaagctggtaaaaccctttagc

SEQ ID NO: 48079 - DNA, 6243 bp, Artificial Sequence
  derived and/or modified sequence
atgctttgctgtctgctggtgcgggcgagcaatctgccgtctgcaaaaaaggatcgtcgttcagacccagtcgccagcttgacctttcggggagtgaaaaagcgaactaaggtgattaagaactccgttaatcctgtgtggaacgagggcttcgaatgggatttgaagggtatccccctcgaccagggatctgagctgcatgtcgtggtgaaggatcacgaaaccatgggccgcaatcggtttctgggagaggccaaggtgccactcagagaagtcctcgcgacgccctccttgtcggcttcatttaacgcaccactgctggatactaagaagcagcctacgggggcttccctggtgctccaagtgagctacaccccgctgcctggagccgtgcctttgttcccgccgcctaccccactcgagcccagccccactctcccagacttggatgtggtggcggacactggcggagaagaagatactgaggaccagggcctgaccggagatgaagcagaaccgttcctggatcaatcaggagggcctggagccccgaccactccgcggaagctgccctcccggcctccgccgcactaccctggcatcaagagaaagcggtccgccccgacgtcacgtaagctcctctcggataagccacaagactttcaaatccgcgtccaggtcatcgagggtaggcaactcccgggtgtgaatatcaaaccagtggtgaaagtgacggccgcgggtcagaccaaacggaccagaatccacaaaggtaactccccgctgttcaacgagactctgtttttcaatctcttcgacagcccgggggaacttttcgacgagccgatcttcatcaccgtggtcgactcaagatccctgagaactgacgctctgcttggagagtttcgaatggacgtgggaaccatatacagggaaccgcggcacgcgtacctgaggaagtggttgctgctgagtgacccggacgatttttcagcgggggctcgcggatatcttaagaccagcttgtgtgtgttggggccaggagacgaggcaccgttggaacgcaaagatccgtccgaagataaggaggacatcgaaagcaacctgctcaggccgactggagtcgccctgcgaggggctcatttctgcctcaaagtctttagagcggaggacctcccacagatggacgatgccgtgatggataacgtgaagcagatcttcggattcgagtcaaacaaaaagaatctcgtggacccgtttgtggaggtgtcctttgccggcaagatgctgtgcagcaaaattctggaaaaaacggcaaatccacaatggaaccagaacattactttgcctgcaatgttcccgtcgatgtgcgagaagatgcggatcagaatcatcgattgggatcggctgacccataacgatatcgtggcgaccacgtaccttagcatgagcaagatctccgctcctggcggagaaatcgaggaggagccggcaggggcggtgaaaccatccaaagcctccgatctggacgattacctgggattcctcccaactttcggaccgtgttacatcaacctgtacggatcgccgagagaattcaccggtttcccagacccgtatactgaactgaataccggcaagggggaaggagtggcttaccgaggccggctcctgctttcgctggaaaccaagctcgtggagcactcagagcaaaaggtggaagatctgccagccgacgatatcttgagagtagagaaatacctccgccgccgaaagtactctttgttcgcagccttctactcggccaccatgctccaggatgtcgacgatgcgatccagtttgaggtttccattgggaactacggaaataagttcgatatgacttgcctgccactggcaagcactactcagtacagtcgggctgtgttcgatggatgccactactactaccttccgtggggaaacgtgaagccagtcgtcgtgctctccagctactgggaggacatttcgcaccgaattgagactcagaaccaattgctgggcatcgcagaccggctggaagccgggctggagcaagtccatctcgcactgaaggcacaatgtagcaccgaggacgtcgactctctcgttgcccaattgaccgacgaactgatcgccggatgtagccagcccctgggggacatccatgaaactccctcggcaactcacctcgatcagtacctgtaccagctgcgcacccaccacctgtcccagatcaccgaagcagccctggcgctgaagctgggtcacagcgaactgccggcagcgctcgagcaggctgaggactggctgctgcggctgagagcgttggccgaagaacctcaaaattccctgccggatatcgtgatttggatgctccagggagacaagcgggtcgcgtaccagcgggtcccggcccatcaggttttgtttagtcgcaggggagccaattactgcggtaaaaactgtggaaagctccaaaccatcttcctgaagtacccaatggagaaggtcccaggcgcccgcatgccggtccagatccgcgtgaagctgtggttcggactctctgtagacgaaaaggagtttaaccagttcgccgagggtaagctgtcggtgttcgctgaaacctacgaaaatgaaaccaagctggctctggtgggaaattggggtactaccggcctgacttacccaaagttctcggacgtgactggaaaaatcaaactccctaaggacagctttagacccagtgccgggtggacttgggctggcgattggttcgtgtgcccagaaaagaccctgctgcatgatatggacgccggccatctgagcttcgtggaagaagtgttcgaaaaccaaactcgcctcccggggggacaatggatttacatgtcagacaactataccgatgtgaatggagaaaaggtgttgccaaaggacgacatcgaatgccctctgggatggaagtgggaggacgaggagtggtcgactgatcttaaccgcgccgtggatgaacagggatgggagtactccattacgatcccgcccgaacgcaagccaaagcactgggtgccggccgagaagatgtactatacccatcgccgtagacgatgggtcaggctgagacgccgcgacctctctcaaatggaggcactgaagcggcaccgccaagcagaagctgagggcgagggatgggaatacgcgtccttgttcggttggaagttccacctggaataccgaaagactgacgcattccgccgccgcaggtggagacggcggatggaacctctggagaaaactggcccagctgcggtgtttgcgttggaaggagccctcggcggagtgatggatgataaatccgaggactcaatgtccgtgtccacccttagcttcggagttaatagacctactataagctgcattttcgactacggaaaccgctaccatctgcggtgctacatgtatcaggctcgggatctcgccgctatggataaggactcatttagtgacccgtacgccatcgtgtccttcctccatcagtcgcaaaagaccgtggtggtcaagaacacgctgaatccaacctgggatcagaccctgatcttttacgaaattgagatcttcggcgaaccggctaccgtggccgaacagccaccatcgatcgtggtggaactctacgaccacgatacttacggtgccgacgaattcatgggtaggtgcatctgtcaaccgtcattggaacggatgcctcgactcgcctggttcccgctgaccagaggtagccaaccgtccggagaactgctggcctccttcgaactgatccagagagaaaagccggccattcatcacattcccggctttgaggtccaggaaacctccaggatcctcgatgagtcggaagatactgacctgccatacccgcccccacagagagaggccaacatctacatggtgcctcaaaacatcaaaccggctttgcagcgcactgcaatcgagattctggcgtggggactgaggaacatgaagtcgtaccaacttgctaacatctcaagcccttcgctggtggtagaatgcggaggccagacggtccagtcgtgcgtgatcagaaaccttcgcaaaaatccgaatttcgacatttgcacccttttcatggaagtcatgctgcctagagaagagctttactgccctcctatcaccgtcaaggtgatcgataaccggcaattcggacggaggcctgtcgtgggacaatgcaccatcaggtcattggagagcttcctctgcgacccttattccgcagaatcgccatccccgcagggtggcccagatgacgtcagcctcctctcccccggcgaggacgtgctgattgacatcgacgacaaagaacccctcatcccaatccaggaggaagaattcatcgactggtggtcgaaattcttcgccagcatcggggaacgggaaaaatgcggctcgtacctggagaaggacttcgatacgctgaaggtctacgacactcagctcgaaaatgtcgaggccttcgaaggactgtcggacttttgtaacactttcaagctgtaccggggaaagacccaagaggaaactgaagatccgtcggtgattggagagttcaagggacttttcaaaatctaccccctgccggaagatccggcaatccccatgccgccacggcagtttcatcagctggccgcccagggaccccaggagtgcctggtccgcatttacatcgtgcgggcgttcggactgcaacccaaggacccgaacgggaaatgtgacccttatatcaaaatcagcatcggcaagaagtcggtgtcggaccaggataactacatcccctgcacccttgaaccagtgttcgggaaaatgttcgaattgacctgcacgctccctttggaaaaagacttgaaaatcaccctctacgactacgatctcctctcgaaggatgagaagatcggtgagactgtggtggacttggaaaaccggctcttgtcaaagttcggtgcgcggtgtggactgcctcagacgtactgcgtgtcaggcccgaatcaatggcgcgaccagctccggccttcacagctccttcacctcttctgtcagcagcaccgggtgaaggcgccggtctaccgaaccgatcgcgtcatgttccaagacaaagaatactcgatcgaagagatcgaggccggacgcatcccaaacccacacctcggccctgtggaggagcgcctggccctgcacgtgctccagcagcagggactcgtcccggagcacgtggaaagccgcccactttactcccctctgcagccggacattgagcagggaaagctgcagatgtgggtggatctgtttccgaaggcactcggccgcccgggaccccctttcaacataacccctagaagggcccgccgcttcttcctgcgatgcatcatctggaacactagggacgtgatcctggacgacctgtcactgaccggcgagaagatgtcggacatctacgtgaaaggatggatgataggattcgaggagcacaagcaaaaaaccgacgtccattaccgttcactgggcggggagggaaactttaactggaggtttatcttcccgttcgactacctgcctgctgagcaggtctgcaccatcgccaaaaaggacgcgttctggcggctggataagaccgaatctaagatcccggctcgcgtagttttccaaatctgggataacgataagttttcattcgatgattttctgggctcgttgcagctggacctgaatcggatgcctaagccggcgaaaacggcaaagaagtgctcccttgatcaactggacgacgcgttccacccggaatggttcgtttcccttttcgagcaaaaaactgtgaagggctggtggccatgcgtcgcagaagaaggagaaaagaagatccttgcgggaaaactcgaaatgactcttgaaatcgtggccgaaagcgaacatgaggagcggccggctggtcaagggagagatgaaccgaatatgaaccccaagctggaggacccccgccgccctgacacttcgttcctttggttcacctcgccgtacaagacgatgaaattcatcctgtggcgcaggttccgctgggccattatactctttatcatcctgtttatactcctcctctttctggccatcttcatttatgcatttccaaattacgcagcgatgaagttggtaaagccattctca

SEQ ID NO: 48080 - DNA, 6243 bp, Artificial Sequence
  derived and/or modified sequence
atgctctgttgtctccttgtgagagcctcgaacttgccaagcgcaaagaaggatcgacgctccgatcctgtcgcctcgctgacgtttagaggcgttaagaagcgaacgaaggtgatcaagaactcggtgaatccagtttggaatgaagggttcgaatgggatcttaaaggaataccactggatcaaggctctgaactgcacgttgtggtgaaggatcacgaaaccatgggccgtaatcgctttcttggtgaggcaaaggtgcctctccgcgaagtgctggcgaccccatccctctccgcatcatttaacgctcctcttctcgacactaagaagcagcctaccggcgcaagcctggtcctgcaagtgagctacacccctctcccaggtgctgtgcctctgtttcctcctcctactccactggagccatcgccaactctgccggatctcgatgtcgtggccgacactggtggagaggaggataccgaagatcaaggtctgactggggacgaggcagagccattcctcgatcaatcaggtgggcctggggcacccactaccccaagaaagctgccgagcagacctccaccacattaccccggaattaagagaaagcgaagcgcaccaacttcgcgcaaactgctgtcggataagccccaagacttccaaattcgtgtgcaagtgattgaaggacgccaacttcctggagtgaatatcaagcctgtggtgaaagtgaccgcggcagggcagacgaaacgaactcggattcataagggaaactcgccattgtttaacgaaactctctttttcaatctgttcgattcccctggcgaactgtttgacgagcctatctttatcaccgtggtggattcacgttcgcttaggactgatgcacttcttggtgagtttagaatggacgttggtactatttacagggaaccaagacacgcatacttgagaaagtggctccttctgtcggatccagatgactttagcgctggcgcccgcggatacctgaaaacctcgctgtgcgtcctgggacctggtgacgaggcccctctggagagaaaagatccaagcgaagataaggaagatattgaatccaaccttcttaggcctaccggtgtggcactgcgaggagcccacttttgtctcaaagtgttcagagcagaggaccttccacaaatggatgatgccgtgatggacaacgtgaagcagatttttgggttcgaatcgaataagaagaacctggtggacccatttgtggaggtgtcctttgcaggaaaaatgctttgcagcaagattctggaaaagaccgcgaacccccagtggaaccagaacattactcttcctgcaatgttcccttccatgtgtgagaaaatgcgaattcgaataatcgattgggacagactgacccataacgacattgtggcaactacttacctctcgatgtcgaagatatcggcccctggtggagaaattgaggaggaacctgcaggcgctgtcaagccatcgaaggcatcggatctggatgattaccttggttttcttccgacctttgggccttgctacattaacctgtatggttccccgcgggaatttactggattccctgatccgtacaccgaactcaacaccggtaagggcgaaggtgtggcatacagagggagactgttgctgagcctcgaaactaaactcgttgaacattccgagcagaaggtcgaagatcttccagcagacgacatcctgagagtggaaaagtacctcagacgacgtaagtactcactctttgcagcattttactccgcaaccatgctgcaggacgtggatgatgcaatccagtttgaggtgtcgattggaaactacgggaataagtttgatatgacttgtctgccactcgcctcgaccacgcaatactcacgggcggtgttcgatggctgccattactactaccttccttggggaaatgtcaaacccgtagtggtgctgtccagctattgggaggatatcagccacagaattgaaactcagaaccaacttctgggtattgctgatcggctggaagcaggactcgagcaggtgcatcttgccctcaaagctcagtgttccactgaagatgtggactcgctcgtggcccagctcaccgatgaactcatagcagggtgtagccaaccccttggagatattcacgagactccttccgcaacccaccttgatcaatacttgtaccaactgcgcactcaccatctttcccaaatcacggaggctgcactcgcgctgaagttgggtcactcagaactgcccgccgcactggaacaggccgaggattggcttctgaggctgcgagcacttgcagaagaaccccaaaactcacttccagacatcgtgatttggatgttgcaaggggacaagagggttgcgtaccaaagagtgcctgcacatcaggtgctgttttcacggagaggagctaattactgcggtaaaaactgtggtaaacttcaaaccatctttcttaagtacccgatggaaaaggtgccaggcgccagaatgcccgtgcaaattcgagtgaaattgtggttcgggctgtcggttgatgagaaagagttcaaccaatttgcagaggggaagctgagcgtgttcgcggaaacctatgagaatgaaaccaagctcgcactggtcggtaactggggaacgactggacttacctacccaaagttctcggacgtcaccggaaagataaaactgccgaaagactcctttcggcctagcgccggctggacttgggcaggagactggtttgtgtgccctgaaaagaccctgttgcatgatatggacgcaggacacctgtcattcgtggaggaggtctttgaaaaccaaaccagactgccaggcggtcagtggatttacatgtccgacaactatactgatgttaacggagaaaaggtgcttcctaaggacgacatcgagtgtccccttggctggaagtgggaggatgaggaatggagcaccgacctgaacagagcggttgatgagcaaggttgggaatactccatcactattccgcccgaaaggaagccaaaacattgggtgccagctgaaaagatgtactacacccatcgacggcggcgctgggtgcggcttcgtcggcgagatctgtcccagatggaggcattgaagagacacagacaagccgaggcagagggtgaagggtgggagtatgcctccctgtttgggtggaagttccatcttgaataccgaaaaactgatgcttttagacggaggcggtggcgtcggagaatggaaccgcttgaaaaaaccgggcccgcggcggtgtttgcccttgaaggagcacttggaggcgtgatggacgataagtcagaggattccatgtcggtgtccaccctgtcgtttggagtcaaccggccaactattagctgcattttcgactacggtaaccggtaccatttgcgctgttacatgtaccaagcccgggatcttgcagcgatggataaggacagcttttccgatccttacgcaatcgtttcatttctgcaccagagccaaaaaaccgtcgttgtgaagaatacccttaacccaacctgggatcaaactcttatcttctacgagattgagatattcggagagccagcgactgtcgcggaacaaccgcctagcattgtcgtcgaactttacgatcatgatacctacggtgccgatgaattcatgggaaggtgcatctgtcagccgtcgcttgagagaatgcctagacttgcatggtttcctctcactagaggttcgcagccatcaggagaacttcttgcatcattcgaactgattcagagagagaagcccgcaatccatcacattccaggctttgaggtgcaggaaacctcaagaatccttgatgaatccgaggacaccgatctcccgtacccacctccgcaaagggaagcgaacatctacatggtcccccagaacattaagcctgcccttcaaaggaccgcgatcgagatcctggcgtggggactgcgcaacatgaaatcgtatcaattggcgaatatctcctcgccatcgcttgtggtcgaatgtggagggcagaccgtgcaaagctgtgtcataagaaaccttaggaagaaccctaatttcgatatatgtactctctttatggaagtcatgcttccgcgggaggaactgtactgccctcctatcaccgtgaaggtcattgataatcgacaatttggtcgtagacccgtggtgggacaatgtaccatccgtagcttggagagctttctgtgtgatccttacagcgcagagtcgccttcacctcaaggcgggcctgatgatgtgtcactcctgtctccaggagaagatgtgcttatcgacattgatgacaaggagccactgattcctattcaggaggaggaattcatagattggtggagcaaattcttcgcatccattggggaacgcgagaagtgtggttcctatcttgagaaggactttgacacccttaaagtctacgatacccagctcgaaaatgtggaagcatttgagggtctgtcggatttctgtaatacgtttaaactctaccgcggaaagactcaggaagaaaccgaggacccttccgtgataggggaattcaagggattgtttaagatttaccccctgcctgaagatcctgcaattcccatgccacctaggcaatttcatcagcttgcagcacaaggccctcaagaatgtcttgtgcggatctatatagtcagggccttcggtctgcagccaaaggatcccaacggtaagtgcgacccgtacattaagatttccattggaaagaaaagcgtgtccgaccaagacaactatatcccttgtaccctcgaaccagtgttcggtaaaatgttcgagcttacctgtacccttccccttgagaaggatcttaagattaccctgtacgattatgaccttctttcgaaggatgaaaagattggcgaaactgtggtggaccttgaaaaccgcctgctgtcgaagtttggcgcgcggtgtggactccctcaaacctactgtgtttcaggacctaatcaatggcgagatcaactccggcctagccagcttcttcatctgttttgtcagcaacacagggtcaaggcccctgtttacagaaccgaccgagtgatgttccaagacaaagagtattccatagaagaaatcgaagcaggtaggatccctaacccacacctcggaccggtggaagaaaggctggctcttcatgtccttcagcagcagggactggttccagagcatgtcgagagcagaccattgtactccccactccaaccagatattgaacagggcaaacttcaaatgtgggtggacctgtttcctaaagcacttggtcgcccaggaccaccttttaacatcactccaagacgggcgcgccggttttttcttagatgtattatctggaacacccgcgacgtgattcttgacgatctgtcacttaccggtgaaaagatgtccgatatctacgtgaaaggctggatgatcgggtttgaggaacataagcaaaagacggatgtccattacagaagcctcggaggagaaggaaacttcaactggaggttcatatttccatttgactatcttccggcagaacaagtgtgtactattgctaaaaaggatgcattttggaggcttgacaagactgaatctaagatacccgcaagagtcgtgttccagatttgggacaatgataagttttcgtttgacgactttctcgggtccttgcagctcgatctgaataggatgccaaagccagccaaaaccgcgaaaaagtgctccctggatcagctcgatgacgcgtttcatcccgaatggtttgtctcgctcttcgaacagaaaaccgtcaagggatggtggccatgcgtggcggaagagggagaaaagaaaatcttggctggtaagctcgagatgactcttgagattgtggccgagtccgaacatgaggaacgtcctgccggacaaggccgtgatgagcccaatatgaaccccaagctcgaagatccgcggcgtccagacacttcgtttctttggttcactagcccctacaagaccatgaagtttattctttggcgaaggtttagatgggctattatccttttcataattctctttatcctgcttctgtttctggccatctttatctacgcttttccaaactacgcagcaatgaagctcgttaagccttttagc

SEQ ID NO: 48081 - DNA, 6243 bp, Artificial Sequence
  derived and/or modified sequence
atgctttgctgtcttctggtgagggcaagcaatctgccttcagcaaagaaggataggcgatccgatcccgtcgcttcgcttacgttcaggggcgtgaaaaagagaacgaaggtgattaaaaactctgtgaacccggtgtggaacgagggatttgagtgggacctcaagggcattccactggaccaaggaagcgaactgcacgtcgtggtaaaagatcatgagaccatgggccgtaatcgtttcctcggagaggccaaagtgcctctaagggaggtacttgcaaccccatccctgtctgcttctttcaatgcacccctcctggacacaaaaaagcaacccacgggagcatcactggtcctacaggtaagctacactccccttcctggggcggtacctttgttcccaccaccgacccccctggaaccaagtcccacacttcccgacctcgacgtcgttgccgataccggcggtgaggaagacaccgaagaccaaggattaaccggagacgaggctgagccattcctggatcagtcaggagggccaggggctcccacgacccctagaaagctgccatctcgcccaccgccgcactaccccgggatcaagcgcaagcggtctgccccaacctcccggaaactgctcagcgataagcctcaggatttccaaatacgtgtgcaggttattgagggaaggcaattacccggcgtgaacatcaagcctgtcgttaaggttacagccgctgggcagacaaagcggactagaattcacaaaggaaactctcctcttttcaacgagacactgttcttcaacctttttgactcccccggggagctgtttgacgaacccatctttattaccgttgtcgacagccggagccttcggacggacgctctgctcggagaattcagaatggatgttgggaccatttacagggagccgcgtcatgcttacctgagaaagtggctgctgctctctgatccggatgacttctcagccggcgcaaggggataccttaagaccagcctgtgcgttctcgggcccggcgacgaggccccactagaacgcaaggatccctccgaagataaggaggacatagaatctaacctattgcggccaactggagtggcacttaggggggcccacttctgtctgaaagtttttagagccgaggatctgccacaaatggacgacgctgtgatggataatgtgaaacagatctttggctttgagagcaataaaaaaaacttagtggacccctttgttgaggtgtccttcgccggcaagatgctgtgcagcaaaatattagaaaagactgccaacccccagtggaatcagaacataactctccctgccatgttcccctctatgtgcgagaaaatgcgcatccgcattattgattgggacagactcacccacaatgatatcgtggccactacctacctctctatgtccaagatctctgcgcccggcggggagattgaagaagagcctgccggcgccgtaaagccgagtaaagcctccgacctggacgactacttgggttttctgcccaccttcggaccctgctatatcaatttatatggatctccaagggagttcactgggtttcccgacccttacacagaactgaacactggcaagggcgaaggagtcgcataccgtggtagactacttctgtctttggaaacaaagcttgtcgagcattccgagcagaaggtggaggatctgccagccgatgatattttaagagtggaaaagtatctcaggcggcgcaaatacagcttattcgctgcattttactcggcgacaatgctgcaggacgtggacgacgctattcagttcgaggttagcataggaaattacgggaataaatttgacatgacctgcctgcccttggctagcaccacgcaatacagtagggccgtattcgacggctgtcattactactatctgccttggggaaacgtcaaaccagtagtggtgctatcctcatactgggaagatatttctcatcgcatcgaaacgcagaatcagctcctcggcatcgccgacagattagaagccggcctggagcaggtgcacctagctttgaaggcacagtgcagcacagaggacgtggactcactcgttgctcagctgaccgacgagttgattgcagggtgtagtcaaccgttgggggacattcacgaaacgcccagtgcgacacatctcgaccaatacctatatcaactgcgaacgcaccacctgagccagatcaccgaggccgccctcgcactgaagttgggccattcagagttaccagccgctctagagcaggcagaggattggctgctccgcctgcgggcactcgctgaggaaccgcaaaactccctcccagacattgtgatctggatgctacaaggcgacaaacgagtggcttaccagcgagtacctgcccatcaggtgctattttcccgtaggggtgccaactactgtgggaagaattgtggaaaacttcagacaatctttctcaagtaccctatggagaaggtgcctggcgccagaatgccggttcagatccgggtcaaactctggttcggcctatctgtggacgagaaggaatttaaccaattcgcagaggggaagctgagcgtctttgcggagacatacgaaaacgagaccaagctcgccttggttggcaactggggaaccactgggctgacatatccaaagttctcggacgtcaccggtaagatcaagctacccaaggattcatttagaccatctgccggctggacatgggccggggattggtttgtgtgtccagaaaaaactcttctccatgatatggacgcaggtcacctttcattcgtagaggaggtgttcgaaaatcagactcgactcccaggcggtcagtggatctatatgtctgataattacaccgacgtcaacggcgaaaaagtgttaccgaaagacgacatcgaatgtcccctggggtggaagtgggaggatgaggagtggagtacagacctcaatcgggcagtcgatgagcagggctgggaatactctatcaccattccgcccgagcgcaaacctaagcattgggtgccggccgaaaaaatgtattatacccatcggcggcgacgatgggtgaggctccgcaggagagatcttagccagatggaagctttgaaaaggcatcgccaggcagaggctgaaggtgaggggtgggaatacgccagtttgttcggctggaaatttcacctcgaatatagaaagaccgatgccttccgccggcggcgatggcgcaggagaatggagcccctagagaagacaggacccgctgcggtcttcgctctggagggtgcgttgggtggcgttatggacgacaaatcggaggactctatgtccgtcagtaccctatccttcggggtaaatagacccaccattagctgcatattcgattatgggaatagatatcacctacgctgttatatgtaccaggccagggatcttgccgctatggacaaagattccttcagcgacccttacgcgatcgtctcctttctccaccaaagccagaaaactgtcgtggtgaagaacacactgaaccctacctgggatcagaccctgattttctacgagattgaaatctttggggaaccggctaccgtggccgaacagccgccttccattgtcgtagagctgtacgaccatgatacctacggggctgatgagttcatggggaggtgcatttgccagccatccctggaacgaatgccgcgtctagcttggtttcctctgacacgcggaagccagccttccggcgagctcctcgcttctttcgagctgatccagcgtgaaaaaccagccatccaccatatccccggttttgaggtgcaggaaacttctcgcattcttgacgagagcgaagacacagacctgccatatccacctcctcagcgggaagccaacatttacatggttccgcagaacattaagccagctctccagcggaccgcaatcgaaatcctggcttggggactgagaaatatgaagtcgtatcagcttgccaacatctcttctccctcactggtggttgagtgcggaggccaaactgttcagtcctgcgtgattagaaacctccgaaagaacccgaacttcgacatttgcacccttttcatggaggtcatgttaccaagagaggagctgtattgtccacctatcaccgtgaaggtgattgataatcgccagtttggtcgccgaccggtggtgggtcagtgtacgataagatccctggagtcgttcctatgtgatccgtattctgccgagtcccccagtccacagggcggcccagacgacgttagtctattgagccccggtgaagatgtcttgatcgatattgatgacaaggagcccctgatacctatacaggaggaggaattcatcgactggtggtccaagttctttgctagcataggtgagcgggagaaatgtggctcttacctcgaaaaggactttgacactttgaaagtgtacgacactcagctagagaatgttgaagcttttgaaggcctgtccgatttctgcaatacgttcaagttgtaccgaggcaagacccaggaggagacagaagatccttccgtcatcggcgagttcaaggggctgttcaagatctaccccctcccagaggaccctgcgattcctatgccaccccgtcagttccaccaattagccgctcagggtccacaggagtgcctggtgcgcatctacattgtacgtgccttcggactgcagccaaaggatccaaacggaaagtgcgatccctacataaaaatcagcattggcaagaaatctgtgtccgatcaggataactatatcccttgcaccctggaacctgtttttggcaaaatgttcgagctcacatgcacactgccactggagaaagatcttaaaatcacattatatgattatgacctgctgtctaaggacgagaagatcggggaaaccgttgtagaccttgagaaccggctgctgtccaagtttggagctcggtgcggtcttccccaaacctattgcgtgtccggtcctaatcagtggagagaccagttgcggccttcacagctccttcatttgttttgtcagcagcatcgcgtaaaggcacctgtgtaccgaacagatcgtgttatgttccaggataaagaatactctattgaggaaatcgaggcagggcggatccccaaccctcacctcggtccagttgaagaacgactggctctccacgtcctgcagcagcagggcttggtacctgagcatgtggagagcaggccattgtattctccgctgcaaccagacatcgagcagggaaagctgcagatgtgggtcgatctcttccctaaggctctgggtagaccaggacccccattcaacatcaccccaaggcgggctcgccgcttttttcttcggtgcatcatctggaacactagagacgtgatcttagatgatctgagtctgaccggggaaaaaatgtcagatatctacgtgaagggatggatgattggctttgaggaacataagcagaagaccgatgttcactatcgttccctcggaggagaggggaacttcaactggcggtttatctttccatttgactatcttcctgccgagcaagtttgtaccatcgcaaaaaaagatgctttctggcgcctggacaagaccgagtctaagatccccgctcgtgttgtgtttcaaatttgggataacgacaagttctcctttgacgactttcttggatccctccaactggatcttaacaggatgcctaagcctgccaagactgctaagaagtgtagcctggaccagctggatgacgcatttcatcctgagtggttcgtgagcttattcgaacagaagacggttaagggctggtggccatgtgttgccgaggagggcgagaagaaaatcttggccgggaagttggagatgacactcgaaatagtggccgagtctgagcacgaagagaggccggcaggccaaggccgcgacgaacccaatatgaatcccaagctggaggacccaaggagacctgacacatcctttctgtggtttacctccccctataaaacaatgaaattcattttatggagaagattccggtgggccattatactgtttatcatcctgttcattttgctgctatttcttgcaatcttcatatacgcattcccaaactatgccgcaatgaaacttgtcaaacctttttct

SEQ ID NO: 48082 - DNA, 6243 bp, Artificial Sequence
  derived and/or modified sequence
atgctgtgttgcttgttagtgcgcgcaagcaacctgccatctgccaaaaaagacagacgctccgacccagtcgcaagcctgacgtttaggggcgtgaagaaacggacaaaggtaatcaagaatagtgtcaacccggtctggaatgagggatttgaatgggacctgaagggcatacccttggatcaaggaagcgagctgcatgtggtcgtgaaagaccatgagacaatgggtcgtaatcgcttccttggggaggccaaagtgcctctgagagaagtgctggcgacaccatctctgtcggcttctttcaatgcccctttattagataccaaaaaacagcccacgggagcttcgctcgtgcttcaggtctcttatacccctttgccaggtgctgtgccgctcttccccccccctacacctctggagccgtccccaacgctaccagatcttgatgtggtggccgacaccggcggcgaggaggataccgaggatcagggactgacgggtgatgaggctgagcctttccttgatcagtcaggaggccccggcgcaccgaccaccccacggaaactaccctcaagacccccaccccattatccagggatcaaacgcaagcggtctgccccgacatcaagaaaactgctgtctgataagccccaagacttccagatacgggtgcaggttattgaggggcggcagcttcctggcgtgaacattaagcccgttgtcaaggttacagccgctggccagacaaaaaggactcgtattcataagggcaacagtcctttgttcaatgagaccctcttcttcaaccttttcgatagccccggggagctgtttgatgagcccattttcataacggttgtggacagtcgctcattgaggactgacgcccttctcggggagtttcgaatggatgtgggaaccatttatagggagccacgccacgcttacttgagaaagtggctactcctctccgacccagacgatttcagtgctggagcccgcggctatctcaagacctcgctgtgcgtattaggcccgggtgatgaggcccctttggaacgtaaggaccccagcgaggacaaggaagacatagagtcaaacctgctgagacccactggggtcgccctgcgaggcgcccacttttgtttaaaggtatttcgcgcagaggacttgccccagatggacgatgctgtcatggacaatgtcaaacagatcttcgggtttgagagtaataagaagaatttagtcgatccttttgtggaagtgagctttgcaggcaagatgttgtgtagcaaaatactggagaagaccgccaacccacaatggaatcagaatatcacgctgcccgctatgtttccatccatgtgtgagaaaatgcggattaggattatcgactgggatcgactcactcacaatgacattgtggcaaccacatacctgtctatgtctaagattagcgctcctggcggagaaattgaggaggagccagcgggtgctgttaagccttccaaagcaagtgatctggacgactatctgggcttcctccccactttcgggccctgctatataaacttatatgggtctccgcgggaatttacaggctttcccgacccttatacagagctcaacaccgggaaaggggaaggggtggcctaccgtggcagactactgctaagcttggaaaccaagctcgtcgagcatagtgaacagaaggtggaggacctgccagctgatgatattcttcgcgtcgaaaaatacttacggcgacgcaagtactctctgtttgcagccttctattcagccactatgctgcaagacgttgacgacgcaatccaatttgaagtgtccatcgggaattatggtaacaagtttgacatgacctgcctgcctctcgccagcaccacacagtatagccgggccgtgtttgatggctgccattattattacctgccctgggggaatgtgaaacctgtggtggtgctgtctagctactgggaggatatctcacaccgcattgagactcaaaatcagctgctcggaatcgccgaccgccttgaagcaggcttggaacaggttcacctggcactcaaagcacagtgcagcacggaggacgtggactctctggtcgcacaactcacagatgaactgatagccggttgtagccagcctctcggcgatattcacgagacccctagcgcaacccatttggatcaatacctgtaccagctccggactcaccatctgagccagattactgaggccgctctcgcgttgaagcttggccacagcgaactcccagccgcacttgagcaggctgaggactggctacttcgcctgcgcgcgctagctgaagagccacagaattccctgcccgacattgtaatatggatgcttcaaggcgataagcgtgttgcttaccagcgggtccccgcacatcaagttctcttcagccgaagaggcgcgaactattgtggaaaaaactgtggcaaactccaaactatcttcctgaagtaccctatggagaaagtgcccggagctagaatgccagtgcagattagggtaaaattgtggttcggcttatctgtggatgagaaggagttcaaccagttcgctgaaggcaagctgagtgtgtttgccgagacatatgaaaatgagacaaagttggcactggttgggaactgggggaccactggcttgacataccccaagttctcggatgtgactggcaaaatcaaactccctaaggatagctttcggcctagcgctggttggacttgggcaggtgactggttcgtttgtcccgaaaagacactcctgcacgacatggacgccgggcatctcagctttgtggaagaagtgtttgaaaatcagactagactgcctggaggccagtggatttacatgagcgacaactatacggacgtcaatggggagaaggtgctcccgaaggatgatatcgagtgtccccttggctggaagtgggaggatgaagaatggagcaccgacctgaaccgggccgtagatgagcaggggtgggagtatagcatcacaattcctccagagaggaaacccaagcactgggttcctgcagagaaaatgtattacacccaccggcgcagacgctgggtccgattgcggcggcgagatctctcacaaatggaggccctcaagagacatagacaggctgaagcagagggagaggggtgggagtacgccagtctcttcggttggaaattccaccttgagtataggaaaactgatgctttccggcgccggaggtggcggcgccgaatggaacccctggagaagaccggacccgccgcagtattcgccctagaaggcgcactggggggcgtcatggatgataaatcagaggattcaatgagtgtctctactctgtctttcggcgttaaccgacccacaatttcttgtatttttgattatggaaaccgctaccatttacgctgctacatgtatcaggccagggatttggccgcgatggacaaggattcattcagcgacccttacgccatcgtgtctttccttcaccagtcccagaagaccgtagtcgtgaaaaatacactgaaccctacttgggatcagaccctcatcttttacgagattgaaatctttggagagccagctaccgtcgcagaacagcccccttcaatcgtggtggaactatatgaccacgacacctatggcgctgatgagttcatgggccggtgtatctgccagccatcccttgaacgcatgcccagactggcctggtttcctcttactcgcggtagtcaacctagcggcgaattgctagccagtttcgagctgatccaacgcgaaaagcctgccattcaccatatccctggcttcgaagtccaagagacatcccggatcctcgatgagagcgaggacaccgatctgccctacccacccccgcaaagagaggcaaatatctacatggtcccccagaacatcaaacctgccctacagcggactgcaatagagatcctggcttggggcctgcgaaacatgaagagctatcaactcgccaatatttcaagtcccagtttggtggttgagtgtggcggccagacagtgcagagctgcgtgatacgcaaccttcgaaaaaaccctaattttgatatttgcacactgttcatggaggtgatgctgccccgggaggaactgtattgccccccaattacagttaaagtcatagataaccgccagttcgggcggaggcccgtggttggacagtgtacaatccgatctctggaaagctttctatgcgacccttattctgcagagtccccatctccacaggggggaccggatgacgtaagtctgctaagtcccggagaagatgtcctaattgacattgacgacaaggaacccctaatcccaatacaagaagaggaattcattgactggtggtcaaagttttttgcctctattggcgagagagaaaaatgtggttcatacctggaaaaagatttcgacaccttgaaggtgtatgacacccagctggaaaacgtggaagcattcgagggactgagtgacttctgtaatacatttaagttgtaccgagggaagacccaggaagagacagaagatcccagcgttatcggcgaattcaaaggactgtttaagatttacccgctgcctgaagatcccgctatacctatgcctcctaggcaatttcatcagcttgcggcacagggaccccaggagtgcctggtgagaatctacattgttcgggcatttggccttcagcccaaagaccctaacggaaagtgtgatccatacattaaaatttctatcgggaaaaagagcgtctccgaccaagacaactatataccctgtaccctcgaacctgtcttcggtaaaatgtttgaactcacatgcactcttcccctcgaaaaagaccttaaaattactctatacgattatgacctcctgagtaaagatgagaaaatcggagagactgtggtcgacttagaaaacaggctgttgagcaaattcggcgcacgatgcggcttgcctcagacatattgcgttagtggcccaaaccagtggcgagatcagttgcgacctagccagcttttgcacctgttttgtcagcagcaccgcgtaaaggcccccgtctaccgaaccgaccgtgtgatgtttcaggacaaggagtactccattgaagaaatcgaagctggacgcatccctaaccctcacctggggccggtggaggaacggcttgctttacacgtgcttcagcaacagggattggtgccagagcatgtcgaaagtcggcctctgtactcgccactccaacccgacatcgagcaaggaaagctccagatgtgggtggacctgttccctaaggctctggggcgcccaggtcctccatttaatattacgccccggcgggcaagaagattttttctgcgatgcataatctggaacacgagagacgttatccttgacgacctatcgctaacaggcgagaaaatgtcggacatttatgtcaaaggttggatgatcgggttcgaggagcacaagcagaagaccgatgttcactatagaagcctggggggcgagggcaactttaactggcggtttatctttccattcgattacctgcccgcagaacaggtgtgcaccattgccaaaaaggatgccttttggaggttggataaaactgaatccaagattcccgcccgggtcgtattccagatttgggacaatgataagtttagtttcgacgattttctcggctccctgcagttggacctgaatcgcatgcccaagcctgccaaaacggcaaagaagtgctctcttgaccagctcgacgacgcctttcaccctgagtggtttgtttcactctttgaacaaaaaaccgtgaagggttggtggccgtgcgtggccgaggagggggagaaaaaaatactggccggcaagctcgaaatgacgttggagatcgtggccgagagcgaacatgaagagagaccagctggccaaggtcgggacgagccaaacatgaatcctaaactggaggatccacgacgacccgatacatcttttttgtggtttacgagcccgtacaaaacaatgaaattcatcctctggcgcaggtttaggtgggctattatcttgttcataatcctatttatattgctgcttttcttggcaatttttatctatgcgttccccaactacgcggccatgaagcttgtgaaacccttcagc

SEQ ID NO: 48083 - DNA, 6243 bp, Artificial Sequence
  derived and/or modified sequence
atgctgtgttgcctgctcgtgagggcctccaacttgccatccgccaaaaaagaccgccgcagcgacccagtcgcttctctaacattccggggcgtcaaaaagagaacaaaggtgatcaaaaacagtgtaaaccctgtgtggaatgaaggattcgaatgggatttgaaggggattcccctggaccagggctctgagctccacgtcgtcgtgaaggatcacgagacaatgggacgaaaccgcttcttaggggaagctaaagtcccattacgagaggtgcttgccacaccctcactaagcgctagcttcaacgctcccctgcttgacacaaaaaaacagcccaccggagcgtcattggttcttcaagtctcatatacccctcttcccggcgctgtgccgctgttcccccccccgactccacttgagccatcacctaccctcccagatctggacgttgtagctgacactgggggtgaggaagacacagaagaccaggggctgacgggcgacgaggctgagccttttctggatcagtcaggaggaccaggggcaccaacgacgccacggaagctgccctctagaccaccccctcattacccgggtatcaaaagaaagcggtcagcccctactagcagaaagctgttgagtgacaagcctcaggacttccagatcagggtacaggtgatagagggacgccagctgcctggtgtgaacatcaaacctgtcgtgaaggtgacggctgccggccaaaccaagcggaccagaattcacaagggcaactcccccctgtttaacgagacgctattcttcaacttattcgactctcctggggagctttttgatgagccgatcttcattaccgtggtcgattcccgaagcctaagaacagatgccttgctaggcgaatttcgcatggatgttggcactatttaccgggagccccgccacgcctatctgcgcaaatggctgttgctgagtgatcctgatgacttctctgctggcgccagggggtatctgaaaacatcactgtgcgtgctgggaccaggcgatgaagcgcccctggaacgtaaggatccctctgaggacaaggaagacattgaatccaacctactcagaccgaccggggtcgccctgagaggcgcacacttctgccttaaggttttcagagcagaagacctgccacaaatggacgatgcagttatggataatgtgaagcagatatttgggttcgagtcgaacaagaaaaatttggtggacccatttgtggaggtcagtttcgccgggaagatgctgtgcagtaagatcctcgagaagaccgcaaaccctcagtggaaccagaatattaccctgcccgctatgttcccaagcatgtgcgagaaaatgagaatccgtattattgattgggacagactcactcacaacgacattgtggccaccacatatcttagcatgagtaagatatccgcacccggtggagagatcgaggaagaacccgcgggcgccgtgaagccatcaaaggccagcgacctggacgactacctcggttttctccccacctttggtccttgttacattaatctgtacgggagcccccgggagttcaccggattccctgatccttatacagagctgaacactggtaagggcgaaggagtggcctatagaggcagactgcttctcagtctagagacgaaacttgttgagcactccgagcaaaaagtcgaggatttacccgcagatgacattcttcgcgtggaaaagtacttgcgaaggcggaagtatagtcttttcgcagccttttattccgccacaatgctgcaggacgtggatgacgctattcagtttgaagtatcaatcggaaattacggcaacaagttcgacatgacatgcctgccgttggcctcaacaacgcaatactccagagcggtgtttgacggatgccattactattacctgccatggggaaacgtaaagcccgtcgtcgtactcagtagttactgggaggatatttcacacaggattgagacacagaatcagctgctgggcatcgccgaccgactggaggccggattagaacaggttcatctggcactcaaggcccaatgcagcactgaagatgtcgattccctggtggcgcagctaaccgatgaattaatcgccggctgctctcagcctctcggggacattcacgagacccccagcgcaacccatctggatcagtatctgtatcagctgcgaacccaccacttgtcccagatcaccgaggccgccctggctcttaaacttggccattccgaactgccagctgcattagagcaggctgaggactggctgttacggctgcgagccctggcagaggagccacagaattccctacctgacatagttatatggatgctacagggggataagagagtagcataccaaagggtgcccgcacatcaagtcctgttttccagacgcggcgctaactactgcgggaagaattgcggcaaattacagacaatctttctcaaatacccaatggagaaagtccctggcgctcgtatgcctgtccagattcgggtgaaattgtggtttggactgagcgtggatgagaaggaatttaaccagtttgcagagggcaaactgtccgtcttcgcagagacttatgaaaatgagacgaaactcgctctggtagggaattggggtaccacaggtctcacttacccaaagttttcagacgtgacagggaagatcaagctccctaaggactcattcaggccgagcgcagggtggacttgggccggagactggtttgtgtgtcccgagaaaaccctgttgcacgacatggatgccggacacctgtcattcgtagaggaggtattcgaaaatcagaccagactgcccggcggccagtggatttatatgtccgacaattatactgacgtgaacggcgagaaggtactaccaaaggacgacatcgagtgccctctgggctggaaatgggaggacgaagagtggagcaccgacctgaacagagcggtcgatgagcaaggatgggagtattccataactatcccccctgagagaaaacccaaacactgggtgcctgctgagaagatgtactacacccaccgaagaagacgctgggtgaggctccggcggcgggatctgtcacagatggaggcccttaagagacataggcaggccgaggccgagggagaggggtgggaatacgcctctctttttgggtggaagtttcaccttgagtatcggaagaccgacgcattccgccggagaaggtggagacgccgcatggagcctctcgaaaagactggcccagccgcagtattcgctctcgagggtgcattaggaggggtgatggacgacaagagcgaggacagcatgtctgtttccactctctccttcggcgtgaatcggccaacaatcagttgcatttttgactacggaaacaggtatcatcttaggtgctacatgtatcaagctcgggacctggccgcgatggataaggactccttcagtgacccctacgcaattgtctcttttctgcatcagtcccagaagactgttgtggtgaaaaacacccttaaccctacatgggatcaaactctcatcttttacgagatcgagatcttcggtgagccagcaacggtcgcagagcagccacccagtatcgtggtggaattgtatgaccacgatacctatggggccgatgagttcatgggtcgatgtatctgccagccttctctggagcggatgcctcgcttggcctggttccccctgactcggggctcacagcctagcggggaattgttggctagcttcgagcttattcagagagaaaagcccgcaatccaccatatcccagggttcgaggtgcaggagacttcccgcatactagatgagagcgaggataccgacctgccataccctccaccacaacgagaggcgaacatctacatggtgccacagaatatcaagccagccctgcagcgaactgctatcgaaatcttggcatggggacttaggaacatgaaatcttaccagcttgctaatatatctagcccctccctcgtggtggaatgtggaggtcagacagtacagagctgcgttattaggaacttaaggaaaaaccctaattttgatatttgtacattgtttatggaagttatgttgcccagagaagaattatactgtcctcctatcacggtcaaagtgatagataataggcagttcggtcgccggcctgtggtcggccagtgtactatccgctctctggagagctttctttgtgatccttattctgccgaaagtccatccccccaaggtggacccgacgatgtctcactgctttctccaggagaagatgttctgatcgacattgacgacaaagagcccctgattcccattcaggaagaagagttcatcgactggtggagcaagttctttgctagtatcggggagcgtgagaagtgtgggtcatacctggagaaggatttcgacaccctgaaggtgtacgatacccagttagagaatgtcgaggctttcgaaggcctgagtgacttttgcaatactttcaaactttacagaggcaagacgcaggaggaaaccgaggacccatctgtcatcggcgagtttaaggggctgttcaaaatctatcctttacctgaagaccccgccatacctatgcctccccgccagttccatcagctggctgctcaaggcccacaggaatgcttggtccgaatctacatcgtcagggcattcgggttacagcctaaggaccccaatggaaagtgtgatccatacattaagatctctattggaaaaaagtcagtgagcgatcaggataattatatcccatgcaccctcgaaccagtctttgggaaaatgttcgaactgacttgtacactcccgttggagaaggatctgaagattacgctgtacgactacgacctgctttcaaaagatgaaaagattggcgagactgtggtggacttagagaatcggcttctgtctaagttcggcgcaaggtgtggtttgccccagacatactgtgtctctggtcccaaccagtggcgtgatcagctacgaccttcgcagcttctgcatctgttttgccagcagcatagagtgaaggcacccgtgtatcgtacggacagggtgatgttccaggataaagagtattccatcgaggagattgaggccgggcgtatccccaatccacatctggggcctgtggaagagcggttggcacttcacgtactgcagcagcaggggcttgtgcctgaacatgtagagtcacggccactgtacagtccgttacagccagatatcgaacaggggaagctccagatgtgggtagatctcttccccaaggcactggggaggccaggtcccccatttaacatcactcctcggagggcaaggcggtttttcttgcgctgtatcatctggaacacccgcgacgtcatcctggatgacctcagtctgaccggagagaagatgagcgatatttacgtaaaggggtggatgatcggctttgaagagcacaaacaaaaaaccgacgtgcattacaggtcccttggaggcgagggaaactttaattggcgattcatcttcccatttgattacttaccggctgagcaggtgtgtacgatcgcaaagaaagacgcattctggcggttggataaaactgaatctaagatccctgcaagagtggtgttccagatttgggataatgacaagttcagcttcgacgacttcttggggagtctgcagctggacctgaaccgaatgccaaagcccgccaaaaccgccaagaagtgttcactggaccagctggatgacgcctttcacccggagtggttcgtctccctgttcgagcagaagacagtgaaaggatggtggccgtgtgtggctgaggagggagaaaaaaaaatcttagccgggaaactcgaaatgacccttgaaattgtggccgaatccgagcatgaagagagacccgccgggcagggtagggatgagcctaatatgaatccaaagcttgaagacccccgtcgacccgacacaagtttcttatggttcacctcaccatataagaccatgaagtttatattgtggaggcgcttcagatgggccattatcctgttcatcatcttatttatcctccttctgtttttggcaatatttatctacgccttcccaaattatgcagccatgaaactcgtcaagcctttctcc

SEQ ID NO: 48084 - DNA, 6243 bp, Artificial Sequence
  derived and/or modified sequence
atgctgtgttgcctccttgttcgagcgtctaacctcccctccgccaagaaggatagacgaagcgatcctgttgcctcactgacctttcgcggcgtcaaaaagaggactaaggtcatcaagaactcggtgaacccggtgtggaatgagggattcgagtgggacctcaaaggtatcccattggaccagggttcagaactgcatgtcgttgttaaggaccacgaaaccatgggccgtaatcggttcctgggagaagcgaaggtcccgctgagggaagtcctcgccaccccgtccctgtccgcctccttcaatgcaccgctgctggacaccaagaagcaaccgactggtgccagtctcgtgctgcaagtctcctacacgccattgcctggcgcggtcccgctcttccccccgccgaccccccttgagccgtcgccgactctgccggatctggacgtcgtggcagatactggaggagaggaggacacggaggatcaggggctgaccggcgacgaagcagagccgttcctcgaccagtcgggcggaccaggcgccccaaccacgcctagaaaactcccatcgcgcccgcccccacattaccctggtatcaaaagaaagcgctccgcccccacgtcccggaagttgctgtcggataagcctcaggactttcaaattagggtccaggtcatcgaaggacgccaacttcccggagtgaacatcaaaccggtggtcaaagtgaccgcggcaggccaaacgaagcggactcggatccataagggaaattcccccctgttcaacgaaaccctgttctttaaccttttcgactcaccgggggaactgttcgatgaaccaatcttcataactgtggtggatagcagaagccttcgcactgacgctctcctgggagaattcagaatggatgtgggaaccatctacagggaaccccgccacgcctacctgcgaaaatggctcctcctcagcgaccccgatgatttctcggccggggctcgcggttacctcaagacttccctgtgcgtgctgggaccaggggatgaagccccgctcgaaagaaaagacccttcagaggacaaagaggatatcgagtccaacctgcttagaccaaccggagtggcactgcggggggctcatttctgtttgaaggtctttcgtgccgaggatttgccgcagatggatgacgccgtgatggataacgtgaaacagatctttggattcgaaagcaacaagaagaatttggtggacccgttcgtcgaagtgtcctttgccggaaaaatgttgtgctcgaagatcctcgaaaagaccgctaatccgcagtggaatcaaaacattaccctgcccgccatgtttcctagcatgtgtgagaagatgcgcatcagaatcatcgattgggatagattgacgcacaacgatatcgtggcgaccacttacctctccatgtcgaagatttccgcaccgggaggggaaattgaggaagagccggcaggcgccgtgaaaccttctaaggcatcagacctggatgattacctgggtttccttcctacctttggaccgtgttacatcaacctgtacggaagcccgcgggaattcaccggttttccagacccttataccgagctcaacaccggaaagggggaaggagtggcgtacagagggcggcttctcctgtccctcgaaacgaagctcgtcgaacacagcgaacagaaggtggaggacctcccggcggacgatatcctgcgggtcgaaaagtacctgcgacggcggaagtacagcctgttcgcggccttctactcggctacgatgctccaggatgtcgacgacgcaatccaattcgaggtcagcatcggcaattacgggaacaaattcgacatgacttgcctgcccctggccagcaccacccagtactcgcgggccgtgtttgatggatgccattactactacctgccttggggcaacgtaaaaccggtggtggtactgtcctcgtattgggaggacattagtcacagaatcgaaacccaaaaccagttgctcggcatcgcggaccggctggaggccggacttgagcaagtgcatctggcccttaaggcgcagtgctcgaccgaagatgttgattcattggtggcccaactcacggacgagctgatcgccgggtgtagccagccactgggtgacatccatgaaaccccgtcagccactcacctcgatcaatacctgtatcaactccgcactcaccaccttagccaaatcactgaagcagcgctggctctgaagttggggcacagcgagctgccagcggccctggagcaggccgaggactggctgctgcgtctcagagccctggcagaagaaccccagaacagcctgcccgacatcgtgatctggatgctgcagggtgacaaaagggtggcttaccaacgtgtgccggctcaccaggtgttgttctcgcgccgcggagcaaattactgtggcaagaattgcggaaagctccagaccatcttcttgaagtacccaatggagaaggttcctggagccagaatgccggtacagatccgggtgaagctctggtttggcctgagcgtggatgaaaaggagtttaatcagtttgctgaaggcaagctgtccgtgttcgctgaaacctacgaaaatgagacgaagctggccctcgtcgggaactggggaactactgggctgacctacccaaagttttcagacgtgaccgggaagattaagctcccaaaagactcattccggccctcggcgggatggacttgggcaggtgactggttcgtgtgccctgaaaaaactctgctgcacgacatggacgctggacatctctcgttcgtggaagaggtgttcgagaatcagacccgcttgccgggaggacagtggatttacatgagcgacaactacactgacgtgaatggagagaaggtgctgcctaaggatgatatcgaatgcccactcggatggaagtgggaagatgaagagtggtcgactgatctcaatcgggccgtggacgagcagggatgggaatactccatcaccatcccgccagagcggaagccaaaacattgggtgccggccgagaagatgtactacacccatcgccgccgcagatgggtccggctgcgcagacgcgacctgtcccaaatggaagcactgaaaagacaccggcaggccgaagccgaaggagaaggctgggaatacgcttccctgtttggatggaagttccacctggagtatcggaaaactgatgctttccggcggagacgctggcggcgtaggatggaaccactcgagaaaaccgggccggccgccgtgttcgcgctggaaggtgcattgggaggagtgatggacgacaaatccgaggactctatgtcggtgtcaaccctgagctttggggtgaaccgacccacgatttcctgcatcttcgactacggaaaccgctaccacctcaggtgctacatgtatcaggctcgggacctggcggcgatggacaaagactcgttctccgacccgtacgccattgtgtcgtttctgcaccaatcgcagaaaacggtcgtcgtgaagaatactttgaatccgacgtgggatcaaacgctcatcttctacgaaatcgaaatcttcggggaaccagccactgtggccgagcagcccccgtcgatcgtcgtggaactgtatgatcacgacacgtacggagcagacgagtttatgggtcgctgtatatgccagccgtcactcgaacgcatgcctcggctcgcctggttccctctgactcggggatcccaaccatccggggaactgcttgcttccttcgagctgattcagcgggagaagcctgcaatccatcacatccccggatttgaagtgcaggaaacctctcgaattctggatgagagcgaagatactgatctgccgtaccccccgccacagagggaagcgaacatctacatggtgcctcaaaacatcaagcccgccctgcaacgaaccgcaatcgaaatcctggcgtggggcctccgcaacatgaaatcataccagctcgcgaatatctcgtctccgtcattggtggtagaatgcggaggacagactgtgcagagctgcgtgatacgcaacttgcgcaagaaccctaacttcgatatttgcaccttgttcatggaggtcatgctccccagagaagagctgtactgcccccctattactgtgaaagtcattgataacagacagttcggcagacgtccggtcgtcggacagtgcactatccgctcgctcgaatcattcctgtgtgacccatacagcgcggagtcaccctcaccgcagggaggtcctgatgacgtgtccctgctcagcccgggggaggacgttctcattgatatcgatgacaaagagccgttgatccccatccaggaggaggagttcatcgattggtggtccaagttcttcgcttcaattggagagagagagaaatgcggatcctacctggaaaaggactttgacaccttgaaggtgtacgacactcagctggagaatgtcgaagcgttcgaaggactgtccgacttctgcaacaccttcaagctctaccggggaaagactcaggaggagactgaggacccgtcggtgatcggcgagtttaaaggactgttcaagatctaccccctcccggaagatccagccatccccatgccccctcgccaattccaccaactcgctgcccagggcccacaggagtgcctcgtgaggatctacattgtccgggcgtttggtctgcaaccaaaggacccaaatggaaaatgcgatccctacattaagatatcaatagggaagaagtcggtgtcggatcaggacaactacatcccatgtaccttggagcccgtgttcggaaagatgttcgaactgacttgcaccctgccgctcgagaaggatctgaaaatcactctctatgattacgacctgctttccaaggacgagaaaatcggggaaaccgtcgtggaccttgaaaataggctcctgtcgaagttcggcgctagatgcggactgccacaaacttactgcgtgtcaggaccaaatcagtggagagatcagctcaggccgagccaactcttgcacctcttctgccagcaacatcgggtgaaggctccagtctaccggaccgatagagttatgttccaggataaagaatattcaatcgaggaaatcgaggcaggcaggatcccaaatccgcatctcggaccggtggaggagagactggccctgcacgtcctccaacagcaaggattggtcccggaacatgtagaaagccggcctctgtattcgccgctgcaaccagatatcgagcaaggtaagctgcagatgtgggtggatctctttccgaaggcactgggacggccaggaccaccgtttaacatcactcctagacgcgcccgccgcttctttcttcgatgcatcatctggaacacccgggacgtaatcctggacgacctgagcctgactggagaaaagatgtccgacatctacgttaagggatggatgatcggattcgaggaacacaagcaaaagacggacgtgcactacaggtccctgggtggcgagggtaatttcaactggagatttatcttcccattcgactatctgccggctgaacaggtgtgtaccatcgccaaaaaggacgcattctggcgcctggataagactgaatcgaagatccctgcgcgggttgtgttccagatctgggacaacgacaagttctccttcgacgattttctgggctccctccagctggatcttaaccgcatgccaaagcctgccaagactgcaaaaaagtgttccctcgaccaattggacgatgcgtttcatcctgaatggttcgtgtcactgttcgagcagaaaactgtcaagggctggtggccctgcgtggcagaagaaggtgagaaaaagatcctcgcgggcaagctggagatgaccttggagatcgtggctgagtcagaacacgaagaacggccggccggtcagggacgggacgaaccgaacatgaacccaaagctggaggaccctaggcggccggataccagctttctttggttcacctcaccgtacaagactatgaagttcatcctttggagacggttccgctgggcgatcatcctgttcatcatcctcttcatccttctgctgtttctcgcgattttcatttacgcctttccaaactacgccgccatgaagctcgtgaagccattctca

SEQ ID NO: 48085 - DNA, 6243 bp, Artificial Sequence
  derived and/or modified sequence
atgctgtgctgcctcctggtgcgtgcgtctaatctgccatccgctaagaaggatcgccgtagcgatccagtcgcatcccttacgtttcgcggcgtcaagaaacgtaccaaggtgatcaaaaactcggtaaaccctgtgtggaacgaaggttttgaatgggatctgaaaggaatccctcttgaccagggatccgagctgcatgtggttgtcaaagatcatgaaactatgggcagaaatcgcttcctgggagaggctaaggtgcccctcagagaggtgctcgccacgccctcgttgtccgcttcgttcaacgcgccactgctcgataccaaaaagcagcccaccggcgcatcgcttgtgttgcaagtctcgtacacgccacttccaggagccgtgcctctgttccctccaccgactccacttgaaccgtcgccaacgctgccggatctcgatgtggtcgctgataccggtggagaagaagatacggaggatcaaggattgactggtgatgaggctgaaccttttcttgaccaatcgggaggtccgggagcaccgactaccccacggaagctcccatcgcgcccccctccacactacccgggcataaagcgcaagcggtccgccccaacttcgaggaagctcctgagcgataaaccacaagatttccaaattagagtccaggtgattgaaggacgccaactccccggagtgaacatcaagccagtggtgaaggtcactgccgcgggtcaaactaagcgtactcggattcacaagggaaattcgccactgtttaatgagactctgtttttcaacctttttgactcacccggggaactgtttgatgagccaattttcattactgtggtcgactccagatcccttcggaccgacgcgcttttgggagaatttcgcatggacgtgggcactatctatcgcgaaccccgtcatgcttacttgcgcaaatggcttctgctttcggatccagacgatttttccgccggagcaagaggttaccttaaaacttcactttgtgtcttgggacccggcgacgaagcaccgctggaaaggaaagatccttcagaagataaggaagatattgagtcgaatctgcttagaccaacgggagtggccctgcgcggtgctcacttttgtctgaaggtctttagagcagaagatcttccacaaatggatgatgcagtgatggataacgttaagcagattttcggatttgagtctaacaagaagaaccttgtcgatccatttgtcgaggtcagctttgctggaaaaatgctctgttccaagatccttgagaaaacggcaaatcctcaatggaaccagaacatcacgttgcctgccatgttcccctcgatgtgtgagaagatgcgcatccgcattatagactgggatcgtctcacccataatgacattgtggcgaccacgtacctctccatgtcgaaaatctcggcccccggaggagagatagaagaggaacctgcaggagcagtgaagccatccaaggccagcgatctcgatgattaccttgggttcctgccaacgtttggtccctgctacataaacctgtatggttcacctcgcgagtttactggtttccctgatccatatactgagctgaataccgggaagggtgaaggagtggcttaccgaggaaggcttcttctttcactcgaaaccaagttggtcgaacactcagagcagaaggtggaggatcttcccgcggacgatattctcagagtcgaaaagtacctgcgcaggcgtaagtactcgctttttgcagcattctactcagcaaccatgctccaggacgtggatgatgcaatacagttcgaggtatccattggcaattacggaaataagttcgacatgacttgcctgccactcgcgtcgaccacccagtacagccgggcagtgtttgacggatgtcattactactaccttccatggggaaacgtgaagcctgtcgtggtcctttcctcatactgggaagatattagccatcgtattgaaacccaaaaccaactgttggggatagcagaccggcttgaagctgggctcgaacaagtgcatctggcccttaaggcacaatgctctacggaggatgtggattccctggtcgcacaacttactgacgagctgatcgcaggctgttcccagcctttgggtgatatacatgaaaccccctccgccacccatcttgatcaatatctgtaccaactcagaactcatcacctgtcgcagattacggaagccgcccttgcccttaaactcggtcacagcgaattgcctgcagcactcgaacaggccgaggactggctcttgagactgagagcccttgcagaagaacctcaaaactcgcttccggacatcgttatctggatgctccaaggggataagcgagtcgcgtaccagcgcgtccccgcccatcaggttcttttttcaaggcggggggcaaactactgtggtaagaactgtggaaaacttcaaactatctttctcaaataccctatggaaaaggtcccaggagctcgaatgccagttcagatcagagtcaagctgtggtttggactgtccgtggacgagaaggagtttaatcaattcgcggaaggaaaattgtccgtgttcgcggaaacctacgaaaatgagactaaactggcacttgtggggaactggggaactaccggactgacctaccccaagtttagcgacgtgactggtaagatcaaactgccaaaggactcgtttcgcccatccgcggggtggacttgggcaggggactggtttgtgtgccctgagaaaaccttgttgcatgatatggacgcaggccacctctccttcgtggaagaggtgtttgaaaaccagaccagacttccaggaggtcagtggatctacatgagcgataactacactgacgtgaacggtgaaaaggttctgccgaaggatgatattgaatgtcctcttgggtggaaatgggaagatgaagagtggtccactgatctgaatcgggcagtcgatgagcagggctgggaatactcaattactatccctccagaacgcaaaccgaagcattgggtgccggctgagaaaatgtactatactcacagacgaaggaggtgggtgcggcttcgccgacgagatctttcacaaatggaagcacttaaacgtcatagacaggcagaagcggaaggagagggttgggaatacgcctccctctttggatggaaattccacctggagtaccggaaaacggatgcgtttcggagacgtagatggagacgcagaatggagccacttgaaaaaactggtccggcagcagtgttcgcactggagggagcattgggaggggtgatggatgataagtccgaggattcgatgtccgtgtcaactctgagcttcggtgtcaacaggcctacgatttcatgtatctttgactacggcaatagataccatctgaggtgttacatgtaccaagcacgggacctcgcagcaatggataaggattccttcagcgatccctacgccattgtgtcatttctgcatcagagccaaaagaccgtcgtcgtgaaaaacacccttaacccaacctgggatcagacgctgatcttctacgaaattgagatctttggtgaacctgcaaccgtggcagagcaacctccatcgatcgtggttgaactctacgatcatgacacttacggggccgacgaattcatgggaaggtgtatttgtcagccctcgctcgaacgaatgccacggttggcctggttcccacttactcgcggctcacaaccgtcgggtgagctcctcgcatcgtttgaacttatacagcgcgaaaagccagcaatccatcacatacctggtttcgaagttcaagaaacttcgaggatcctggacgagtccgaggataccgacctcccttacccgccaccccaacgtgaagctaacatttacatggttcctcagaacattaagcctgcacttcaaagaactgcaattgaaatcctcgcctgggggctcagaaacatgaagagctaccagcttgcaaacatcagcagcccaagccttgtggtggaatgcggcggtcagaccgtgcaatcatgcgttattcggaacctcagaaagaacccaaactttgatatttgtactctgtttatggaggtgatgcttcccagagaagagctctactgcccccctattactgtgaaggtgatagacaacaggcagtttggccgacgtcccgtggtgggtcaatgtacgatccggtccctcgaatcctttctgtgtgatccctactctgcagaatcaccttcccctcagggtgggccagatgacgtaagcctcttgtcccctggagaagatgtgctgattgatattgatgataaggaaccgctgattccgatacaagaagaagaattcattgattggtggtcgaagttttttgcaagcatcggagaaagagagaaatgtggctcctaccttgagaaggactttgatacccttaaagtctacgacacccagctcgaaaacgttgaagcatttgaaggactgtctgatttttgtaacacctttaaactttacagaggaaaaacccaggaggagactgaagatccttccgtgataggtgagttcaagggcctgtttaagatttatcctctgccggaagatcctgcaattccgatgccgcctagacaatttcaccaactcgcagcccagggaccgcaggaatgcctggtgcgcatatacatcgtgagagcctttggcttgcaacctaaagacccaaacgggaagtgcgatccttacatcaagatctcgatcggcaagaaaagcgtgtcggaccaagataactacatcccctgtaccctggagcctgtgttcggtaaaatgtttgagctcacctgcactctgcctctggaaaaggacctgaaaatcactctttacgactacgatctgctgtcaaaggatgaaaagattggagaaactgtggtggacctggaaaacagactgctgtcgaaatttggtgcaagatgtggcttgcctcagacctattgtgtgtcaggaccaaaccagtggagagatcaactgcgcccctctcagctgcttcacctcttttgtcagcagcatcgcgtgaaggcacctgtgtacaggaccgatcgcgtgatgtttcaagacaaggagtacagcatagaggagattgaagcaggtagaattccaaacccacacctgggacccgtggaggaaagacttgcactgcatgtgttgcagcaacaaggcctggtcccagaacatgtcgaatcgcgacctctgtactcgcccctgcaaccggatatcgaacaaggtaagctccagatgtgggtcgatctttttcctaaggcactcggtaggccaggacccccctttaacataactccaaggagagcaaggcgtttcttcctgagatgcataatctggaatactagagatgtgattctcgatgatctcagcctcactggagaaaagatgtccgacatatatgttaaaggatggatgatcggatttgaagaacataagcaaaagactgatgtgcattacaggtcgctggggggtgaaggaaactttaactggcgattcatttttccttttgactacctccccgcagaacaggtgtgtaccattgcgaagaaggatgcattctggagactggataagactgaatcaaagattcctgcaagagttgtgtttcagatctgggacaatgacaagtttagctttgatgatttcctcggttcgctgcaactcgaccttaaccgtatgcctaaaccagcgaaaactgccaagaaatgtagccttgaccaacttgatgatgcatttcacccggaatggtttgtgtccctttttgaacaaaaaactgtgaagggttggtggccctgcgtggcggaagaaggtgaaaagaagattttggccgggaaacttgaaatgactcttgagattgtggcagagtcagagcatgaagagcgtccagccggccaaggtcgcgacgaacctaacatgaatccaaagctcgaagatccccggcgacccgatactagcttcctctggtttacgagcccatacaaaacgatgaagttcattctgtggagacggtttcgatgggctatcattctgttcataattctgttcatcctcctgcttttcctggcgattttcatttacgccttccctaactacgccgcaatgaagctcgtgaagccgttttct

SEQ ID NO: 48086 - DNA, 6243 bp, Artificial Sequence
  derived and/or modified sequence
atgttatgttgcctcctggtcagggcctcaaacctcccctctgcaaaaaaggataggcggagtgatcctgtagcctctcttacatttaggggggtcaaaaaaagaacaaaagtgatcaaaaacagtgtgaaccccgtgtggaacgaaggatttgaatgggatttaaaagggatccctctggatcagggaagtgaactccatgtggtagtaaaagatcatgaaactatgggacgcaaccggtttctgggggaagctaaagtcccactacgagaagtgctggcaactccctcactgtctgcttcatttaacgcacctctgcttgatacaaaaaaacagcccacaggggcgtcactcgtactgcaggtgtcctatacaccactgcctggggctgtccctttattcccacctcctacacccctggaaccctctcccacacttcccgatctagatgtcgttgccgatacagggggagaagaagatactgaagatcaggggcttacaggagatgaagccgagcccttcctggatcagtctggagggcctggagccccaactactccacgcaaactcccctccagacctccacctcactatcctggaataaaacgaaaaaggtctgctcccacttccaggaaacttctctcagataaaccccaggattttcagatcagggtccaggtgatcgaagggagacaattaccaggggtgaatataaagcctgttgtaaaagtcactgccgccggacaaacaaaacggacacggatccacaaggggaattctccattatttaatgaaactctattcttcaacctctttgattcccctggagaactctttgatgaacctatcttcataacggttgtagattctcgctcgctccgcacggatgctctactgggagaatttcggatggatgttggaacgatctatagagaacccaggcacgcataccttagaaagtggcttctgctatcagatccagatgatttttccgcaggagcccggggatatctcaaaacatccctctgtgtactcggacccggggatgaagcacctttagaaagaaaagacccatccgaagataaagaggatattgaatctaacctactcagacctactggagttgcgctaaggggggcgcatttttgcctaaaagtgttccgggctgaagatctgcctcagatggatgatgctgtgatggataatgtaaaacagatttttgggtttgaatcaaataaaaaaaatttagtggatccatttgttgaggtatcttttgcaggaaaaatgttgtgttctaaaatcttagaaaagactgctaacccacagtggaatcagaacataactctgccagcaatgttccctagtatgtgtgagaaaatgagaatacgaatcatcgattgggatcggctcacacacaacgatatcgtggccacaacatatttgtcaatgtctaagatctccgctcccgggggggagatagaggaggaacccgcaggggcagtcaaaccctccaaagcctctgatctcgatgattatctggggttcttgccaacattcgggccttgttatataaatctctatgggtcccctagggagttcactgggttccccgatccctatacagaattgaatactgggaaaggggaaggagtggcataccgcggacgattgcttctatctctcgaaacaaaactagttgagcatagtgaacagaaggtggaggatttacccgccgatgatatcctacgcgtggagaaatacctgcggagaaggaaatattccctctttgcagctttttattctgctacaatgctccaagatgtagatgatgccatacagtttgaagtatctattgggaattatgggaacaaatttgacatgacatgtcttccactggcctctacaacacagtattctcgagccgtgttcgatgggtgtcactattattatctaccatggggaaacgtgaagcctgtcgtggtgctgagttcttattgggaagatattagtcatcggatagaaactcagaaccagctcctggggatagcagatcggcttgaagcaggactcgaacaggtgcatttagcactcaaagcccagtgctctacagaagacgtggattcactggtagctcagctaacagatgaacttatcgcaggatgtagtcagcctttaggagatatacatgaaactccatcagccacacacctggaccagtacttgtatcaattgcgcactcaccatctgtctcagattacagaagccgcactcgccctcaaactagggcactccgaattacccgctgccctggaacaggccgaagattggcttttgaggttgagggccctcgccgaagagccacagaactccttacccgatattgtgatttggatgctccagggggataaacgggtagcctatcagcgcgttcctgctcaccaggtgctgttttcgagaagaggggctaattactgtgggaagaattgcggaaaacttcagactatttttctaaaatacccaatggaaaaagttcctggagctagaatgcctgtacaaatccgggttaaactttggttcggactctctgtggatgaaaaagaattcaatcagttcgcagaggggaaactctcagtctttgctgagacatatgaaaatgagactaaattagcactagtgggaaactgggggacaactggactcacttaccctaaattctcagatgtaacaggaaagatcaagctgcccaaagatagtttcagaccttccgccgggtggacatgggctggagattggtttgtgtgccccgaaaaaacactcttacacgatatggatgcagggcatctctccttcgtggaagaggtttttgagaatcagactagacttcccggaggacagtggatatacatgtctgataactatactgatgtgaatggagaaaaggttctcccaaaggacgatatagagtgccctcttgggtggaaatgggaagatgaggaatggtcaacagatctcaatagagctgttgatgaacaggggtgggaatattccattacaatcccaccagagcgaaaaccaaaacactgggtccccgccgaaaaaatgtactacactcacaggcggcgcaggtgggtgcgattaagacggcgggatctgtcccagatggaagctctcaaacgacatagacaggctgaagccgaaggagaagggtgggaatatgcatccctgtttggatggaaatttcacttggaataccggaagacagatgccttcaggcggaggagatggcggcggagaatggaacccctagaaaagacagggcctgctgccgttttcgcactagagggagccctgggaggagtaatggatgataagtctgaagactctatgtcagtctccacgctctctttcggggtgaatcggcctactatttcctgtatcttcgattatggaaaccgatatcatctccggtgttatatgtaccaggctagggatcttgcagccatggataaagattcctttagtgatccatatgcgatagtctccttcctacaccagtcccagaagactgtagtcgtgaaaaatacactcaatcctacttgggatcagactctaatattttatgaaatagaaatattcggggaacctgctacagtggctgagcagcctccttcaatcgtagtggaactctatgatcatgacacatatggagctgatgaatttatggggcggtgtatatgtcaaccttcattagaacgaatgcctcgcctcgcatggtttcctctaactcgcggaagtcagcccagtggggaacttcttgcatctttcgaactcatacaacgagaaaaacccgcaattcaccacattcctggattcgaggtccaggagacttctaggatcctggatgaatctgaagatacagatctcccctatcccccaccccagagagaggctaatatatatatggtccctcagaatatcaagccagcactgcagagaactgctatcgaaatactagcatgggggctacggaatatgaaatcctatcagcttgccaacatatcatccccaagtctcgtggttgaatgtgggggacagacagtccagagttgtgtcatccgcaatctacggaagaatcctaactttgatatatgtacactttttatggaggtgatgctccccagagaagagttatattgcccccccatcacagtgaaagttatcgacaatcgtcagttcgggagacggccagttgtaggacaatgtactatacgtagtctggaatcctttctctgtgatccctacagtgcagaaagtccttctccccaaggaggacccgatgacgtgtcgctgctcagtcctggggaggacgtgctaatcgatatcgacgacaaagaacccctcatccctatccaggaagaagaattcatagactggtggtccaaattctttgccagtattggagaacgagaaaaatgtgggtcatatctcgaaaaagatttcgatacactcaaagtatatgatactcagctcgagaacgtggaagcttttgaaggactgagtgatttctgtaatactttcaaactctatcgggggaaaactcaggaggaaactgaggatccctccgtgataggggagttcaaagggctctttaaaatctacccactgcccgaagatcccgcaatcccaatgccaccaaggcagttccaccagctcgccgcacagggaccccaagaatgtctggtgcgaatctacatcgtgcgcgctttcggactccagccaaaagatcctaacggaaaatgcgatccttatatcaagatttctatcggaaagaaatcagtctccgaccaggataattatataccctgcacactggaacctgtcttcggaaaaatgtttgaactcacttgtacattgcctctcgaaaaagatcttaagatcacattatatgattacgatctcctaagtaaagatgagaaaataggagagacagtcgtcgatctcgaaaaccggctgttatccaaatttggagcaaggtgcgggcttccacagacatattgcgtctctggacccaaccagtggcgggaccaactcagaccttcccagctattacacttattttgccagcagcatcgggtcaaagcacccgtgtatcggactgatagagttatgttccaggacaaggaatattctattgaagaaatcgaagctgggagaatacccaatcctcacctagggcctgtcgaggagagactcgcattacatgtgcttcaacagcaggggctcgtgccagaacatgtcgaatctcggcccctatattctcctttgcagcccgatatcgaacagggaaaactgcagatgtgggtagatctattccccaaggccttgggaaggccagggcctccatttaacattactcctcgtcgggccagacgattctttctccggtgcattatctggaatactagggatgtgatcctggatgatcttagtctaactggggagaaaatgagtgatatctacgtaaaggggtggatgatagggttcgaagaacacaaacaaaaaacagatgttcattatcggtctctgggaggggaaggaaatttcaattggagattcatctttccattcgattatctaccagccgaacaagtgtgtacaatagcaaaaaaggatgcgttctggcggcttgataaaacagaatctaaaatccctgcccgcgtggtgtttcagatctgggataacgataagtttagtttcgatgattttctcgggtcacttcagttggatctgaatcgcatgcctaaacccgcaaaaacagcaaaaaagtgttcccttgatcagctggatgatgcctttcatcccgagtggtttgtgtccctgttcgaacagaaaacagttaaaggatggtggccctgtgtagcagaagagggggaaaaaaagatccttgctggaaaacttgaaatgacactcgaaatcgtggcagaatctgaacacgaggaaaggcccgctgggcagggaagagatgaacccaacatgaatccaaaattagaggatccaaggcgacccgatacaagttttttatggtttactagtccatataagactatgaaatttatcctatggcgaagatttaggtgggcaattatcctcttcataatactatttatccttctgcttttcctagccatcttcatatatgccttccccaattatgccgcaatgaaactcgtaaagccttttagt

SEQ ID NO: 48087 - DNA, 6243 bp, Artificial Sequence
  derived and/or modified sequence
atgctgtgctgtctgttggtccgcgcatctaacctgccttctgcaaagaaagaccgtcgttcagatccagtggcttcacttacctttcgcggcgtaaagaagcgtactaaggttattaagaacagtgttaacccagtatggaatgagggatttgaatgggatctcaaaggaatccccctggatcaaggttcagagttgcacgtagttgtgaaagaccacgagacaatgggccgcaaccgtttcctgggtgaggctaaggtgcctctccgtgaagtgctggcaacaccatcattgagcgcttcttttaatgcccccttgcttgatacaaaaaaacagcccacaggtgcaagtctcgtgctccaggttagttatacacctctccccggagcagtcccactgtttcccccccctacccctctggaaccatcccccaccttgcccgatcttgatgttgtcgcagacactggtggcgaagaggacaccgaagaccagggactgacaggtgacgaggctgagcctttcctggaccagagcggaggtcccggcgctcccaccacacccaggaagctgccttcccgtccccctccccactaccctggaattaaaagaaaacgttccgctccaacaagtcgcaaactgcttagtgataaaccacaggatttccagatcagagtgcaggtgatcgaaggccgccagttgcccggcgtgaatatcaagccagtggtgaaggtaacagccgctggacagacaaagaggacacgcattcataagggcaactcccctctctttaacgagacactgttttttaacctgtttgactctcccggagagcttttcgacgaaccaatcttcataaccgtcgtggattcacgttccctgagaactgatgcactgttgggcgagttccgtatggatgtgggcactatctacagagaaccccgccacgcctatctccgcaagtggctcctcctgagtgatcctgacgacttctccgcaggtgcccgcggatatcttaagacttcattgtgcgtgctcggccccggcgacgaggcccccctggagcgcaaggatcccagcgaggataaggaagacatcgagtctaacctgctgagaccaactggagtggccctgcgcggagcacacttctgcctcaaggtcttccgcgccgaggatttgccacagatggacgatgccgtgatggacaatgtcaagcagattttcggatttgagagcaacaaaaaaaaccttgttgacccttttgtcgaggtgtcattcgccggcaagatgctttgttccaaaatcctggaaaagacagccaaccctcagtggaaccagaacatcacactgcccgccatgtttccttctatgtgcgaaaagatgcgcatccgtattatcgattgggatagacttactcataatgatatagtggccacaacctatctgtctatgtctaaaatatcagccccaggaggagaaattgaagaggagcctgccggtgccgtgaaaccaagcaaggcaagcgacctcgacgactacctgggctttctccccaccttcggcccatgctacattaatctgtacggatcaccaagagaattcacaggatttccagacccctatacagagctgaacacaggcaagggtgagggagtggcataccgtggaaggctgctgctcagtctggaaaccaagctggtagaacattctgagcagaaggtggaggatctgccagccgatgatattttgagggtggagaagtacttgcgtagacgcaaatactctctgtttgctgccttctattccgctaccatgcttcaggacgttgacgatgctatccagttcgaggtgtctatcggaaattatggtaacaagttcgacatgacctgcttgcctctcgccagcaccacacagtatagtcgcgccgtgttcgacggttgccattactactatctgccttggggaaacgtgaagcccgtggtggtgttgtcttcctactgggaggatatttcacaccgcatcgagacccagaatcagctgctcggaatcgctgatcgtctcgaggccggtctcgaacaggtgcatcttgcactgaaggcccagtgttctaccgaagatgttgacagcttggtggctcaacttactgatgaattgatcgctggttgctcccagcctcttggagatatccatgagactccatccgctacccatttggaccagtacttgtaccagctgcgtacacaccacctgagtcagattaccgaagcagccctcgctcttaagctgggtcacagtgaactgcctgccgccctggagcaggctgaggattggctgctccgcctccgtgctctcgcagaagagccccagaattcactccctgatatcgtcatctggatgcttcaaggcgataaacgtgtcgcctatcagcgcgtgcctgctcatcaagtcctcttctcacgtaggggagcaaattactgcggtaagaattgtggtaaattgcaaactattttcctcaagtatcctatggaaaaggtgcctggagccaggatgcccgtccagatccgcgtgaaactctggttcggactgtccgttgacgaaaaggagttcaaccagtttgccgagggtaaactgtccgtttttgccgagacctatgaaaacgagacaaaactcgctctggttggcaactggggcaccactggactgacttaccctaagttcagcgacgtgactggtaagatcaagctcccaaaagacagctttaggccttcagccggctggacttgggccggtgactggttcgtatgccccgagaaaacactccttcatgacatggacgctggacacctgtctttcgttgaagaggtgttcgagaaccagactaggctgcctggcggccagtggatctatatgtccgacaattatactgatgtgaacggagagaaggtcctccccaaggatgacattgaatgccccctgggctggaagtgggaagacgaggagtggtctacagacctcaatagggctgtggatgagcagggatgggagtacagtatcaccatccctcccgaacgtaagcctaaacactgggttcccgccgagaagatgtattatactcaccgccgtagaaggtgggtgagacttcgtaggcgtgatttgagccagatggaagcactgaaaaggcaccgtcaggcagaggccgagggcgagggttgggagtatgcatccttgttcggctggaagttccacctggaataccgtaaaactgacgctttccgccgtagaaggtggagaaggcgtatggagccactggaaaagactggtccagccgctgttttcgcactcgaaggcgctctgggaggtgtgatggacgacaagagcgaagactcaatgtcagtgagcaccttgtctttcggcgtaaaccgcccaacaatttcttgtatctttgactacggcaacagatatcacctgcgctgctatatgtaccaggcaagggacctggccgccatggacaaagacagctttagtgatccttacgctatcgtgtcatttttgcaccaaagtcaaaagaccgttgtagttaaaaacacccttaaccccacttgggatcagaccctcattttctacgagatagagattttcggcgaacctgctaccgtcgctgagcagccccccagcatcgttgtcgagctgtacgaccacgacacctacggtgccgacgagttcatgggccgttgcatttgccaaccatccctcgagagaatgcccaggctggcatggttccccttgacaaggggaagtcagcctagcggcgagctgctcgccagtttcgaactcattcagagggaaaaacctgccatacatcacattcctggttttgaggtgcaggagacaagccgtatcctggacgaatcagaggatacagatctcccctatccacccccccagcgcgaggccaatatctatatggtgcctcaaaacattaagccagctctccaacgtaccgctattgaaattctcgcctggggcctgcgcaacatgaagagctaccaactggcaaacataagttcaccctcactcgtcgtggagtgtggaggccaaaccgttcagtcctgcgtcataagaaatctgagaaagaacccaaactttgacatctgtaccttgtttatggaggttatgctcccccgcgaggaactctattgtccccccatcaccgtcaaggttatcgataatcgtcagttcggcaggaggcccgtggtgggtcagtgcaccataaggtccctggagtcattcttgtgtgacccctactccgctgagtccccttctcctcagggtggtccagacgacgtgagtctcctttccccaggagaagacgttctgatcgatattgatgacaaagagcccctgatccctattcaggaggaagagttcattgactggtggtccaagttctttgcttcaatcggtgagcgtgaaaagtgtggatcctacctggagaaagacttcgacacattgaaggtatacgacacccagttggaaaatgttgaagcctttgaaggcttgtcagatttctgtaataccttcaagttgtacaggggcaagacccaggaggagacagaggacccctcagtgatcggagagttcaagggtctcttcaagatctatccacttcctgaggaccctgccatccctatgcctccacgccagttccaccagcttgctgcccagggtcctcaggaatgcctggtgaggatttacatcgtgcgtgcattcggcctgcaacccaaggaccctaacggaaaatgcgacccctacatcaaaatcagcatcggtaagaaatctgtctctgaccaagacaactacatcccctgcactctggaacccgtgttcggaaaaatgtttgagcttacttgcacacttcctttggagaaggatctgaagattaccctctacgattacgacttgctgagcaaggacgagaaaattggcgagacagtggttgacctggaaaacagactgcttagtaagtttggtgccagatgcggtctcccacaaacctactgcgtcagcggacccaaccagtggagagatcagctgcgtccctcacagttgctccacctgttctgtcagcagcacagagtcaaggcccctgtgtaccgcaccgatcgcgtaatgttccaagacaaggaatatagtatcgaggaaattgaggcaggaaggattcctaaccctcatcttggccccgtggaagagcgcctcgcactccacgtgctgcagcagcaaggcctggtgccagaacacgtagagtctaggccactttactctcctctccagcccgatatcgaacagggcaagctgcagatgtgggtggacctctttcctaaagccctgggcaggccaggacctccctttaacataaccccaagacgcgctagacgctttttcttgcgttgcatcatatggaacactcgcgatgttatcttggatgatctgagccttactggtgagaagatgtctgatatttacgtaaagggttggatgattggattcgaggagcacaagcaaaaaaccgatgtgcattataggtccttgggaggcgagggaaatttcaactggcgtttcatcttccccttcgactaccttccagccgaacaagtgtgcaccatcgctaaaaaggatgccttctggcgtctcgacaaaactgaatcaaagatacctgcccgcgtagtgtttcagatctgggacaatgacaagttttcttttgatgacttccttggcagcctgcaacttgatcttaaccgtatgccaaagcctgcaaagactgctaagaagtgctcactcgatcagttggatgacgcattccaccccgaatggttcgtttctcttttcgagcagaaaacagtcaagggttggtggccatgtgtggctgaggagggcgagaaaaagattctcgccggtaagctggagatgaccttggaaatcgtggccgagagcgaacacgaggaacgcccagccggccagggaagggacgagcctaacatgaacccaaagcttgaggacccaaggaggcccgacacatctttcctgtggtttacatccccatacaaaacaatgaagtttatactgtggagacgctttcgctgggccataatcctctttatcatcctcttcatcttgcttttgtttcttgctattttcatttacgctttccccaactatgcagccatgaagctggtgaagccttttagc

SEQ ID NO: 48088 - DNA, 6243 bp, Artificial Sequence
  derived and/or modified sequence
atgctttgctgtctccttgtgcgggcctcgaatcttccttccgccaagaaggatcgcagatcggatccagtggcatccctgactttcagaggtgtgaagaaacgcacgaaagtcatcaagaattccgtgaacccagtgtggaacgaaggatttgagtgggacctgaaaggaattccactcgatcagggttcagagttgcacgtcgtcgtgaaagatcatgaaacgatgggacgcaacagatttctcggtgaagccaaggtccctctccgggaagtgctggctactccgtcactctcggcctcctttaacgccccacttcttgatactaagaaacaacccacgggagcctccctggtgctgcaagtctcgtacacccccctcccaggtgcagtgcctctgtttcccccgcccactccactggaaccgtcaccgactctccccgatttggatgtggtggcagacaccggcggagaggaagataccgaagatcaaggacttactggtgatgaagcagaaccgttcctcgatcagtctggtggtcctggagcaccgactaccccccggaaactgcccagcaggcctccccctcattaccccggtattaagaggaagcggagcgcaccaacttcaaggaagctgctgtcagacaaaccacaagatttccaaattagagtccaggtgatagaggggcgccaactccctggtgtgaacataaagccagtggtgaaggtgactgccgccgggcaaactaaaagaactcgaatacataaaggtaactcgcccttgtttaacgagacgcttttcttcaacctgtttgattcccccggagaactctttgacgagcccatctttatcactgtggtggattcccgatccttgaggaccgacgcccttcttggtgaattccgaatggatgtggggaccatatatcgggaaccacgacacgcataccttcgaaaatggcttttgctctcggatcctgatgatttttcggccggtgccaggggataccttaagacctccctttgtgtcctcggtcctggagatgaagccccacttgagagaaaggatccttccgaggacaaagaggatatcgaatcgaacctgctgcggccaaccggggtggcacttcgcggagcacatttttgtctgaaagtgttcagagcagaagatttgccacaaatggatgatgcggtgatggataacgtgaagcagatcttcggttttgagtccaataagaaaaacctcgtcgatccatttgtcgaagtgtcctttgctgggaagatgctctgtagcaaaatccttgaaaagacggcaaacccacagtggaatcagaacattaccctcccagcaatgtttcctagcatgtgcgagaagatgagaatacgcataatcgattgggatagacttacccataatgatatcgtcgcaactacttacctctccatgtcgaagatttccgcaccaggtggagaaattgaagaagaacccgcgggagcagtgaaaccaagtaaggcttcggacctcgatgactacctcggatttctgcccacctttgggccctgttacataaacctttacggaagccctagagaatttactggattcccagatccatacaccgaacttaacactgggaaaggagaaggtgtggcatacaggggtaggctgctcttgtccctcgagactaagctggtggaacactccgaacagaaggtcgaggatcttccagcggatgatattcttcgtgtagaaaagtacctgagacggcggaaatactccttgttcgcagcattttactccgcaacgatgctgcaagatgtggacgatgccattcaatttgaagtctccatcgggaattatggcaacaagttcgatatgacttgcctgcccttggcatccactactcaatactcccgagcagtgtttgacggatgtcattactactatctgccatggggtaacgttaagccagttgtggtcttgagctcgtactgggaagatatttcgcataggattgaaactcaaaaccaactgcttggtattgcggataggcttgaagcggggcttgaacaggtacacctggcattgaaggcgcaatgctcgaccgaggatgtcgattccctcgtcgctcagctgaccgatgaacttatcgcaggttgttcgcagcctctgggcgatatacacgaaactccttcagcaactcatctggatcaatacctttaccagcttagaacccatcacctgagccagatcactgaagctgcacttgccctgaagctgggccacagcgaactgcctgccgctcttgaacaagccgaagattggctgctgcgacttcgggccctggcagaggaacctcaaaatagcttgcctgacatagtcatttggatgctgcagggagataagcgcgtggcgtaccaaagggtgccagcacatcaagtgctgttttcgagacgaggtgccaactattgcgggaagaattgcggtaagctgcaaacgatatttctgaaataccctatggagaaggtgccaggtgcgcgcatgcctgtgcagatccgcgtgaagctgtggtttggactgagcgtggacgaaaaggagtttaaccagttcgcagaaggtaagctgtccgtgttcgcagaaacctacgaaaacgaaaccaagctggcacttgtgggtaactgggggactaccggactcacctaccctaagttctccgacgtgaccggtaaaatcaaacttcccaaggattcgtttcgcccaagcgcaggctggacttgggctggagactggttcgtgtgtcctgaaaaaacgctccttcatgacatggatgccgggcacctgtcgtttgtggaggaggtgtttgagaaccagactaggctgcctggaggacagtggatttacatgtccgacaactacacggacgtgaacggagaaaaggtgctgcctaaagatgatattgagtgtccactgggctggaagtgggaagatgaagagtggtcgaccgaccttaacagagccgttgatgagcaaggttgggagtactcgatcactattccgccagaacgcaagccaaagcattgggtgcctgcagaaaagatgtactacacccatagaaggcggcggtgggtcagacttaggaggcgggatctgtctcaaatggaagcactcaaacgccatcggcaggccgaagcggaaggagagggttgggaatacgcgtccctttttggatggaagtttcatctggaatacagaaaaactgatgcctttagacgcaggcgatggcgtcgtcgaatggagcctctcgagaaaaccgggccggctgctgtatttgccttggaaggtgcccttggaggagtgatggatgataaatcagaagattcaatgagcgtgtcgactctgtcgttcggcgtgaacagacccactatctcatgtattttcgactatggaaatcggtaccatcttagatgttacatgtaccaggccagggacctggcagcgatggacaaagattcattttcagatccgtacgcaatcgtcagctttttgcatcagtcccagaaaactgtcgtggtcaaaaacaccctcaacccaacctgggatcaaaccctgatcttctatgagattgagatcttcggggaacctgctacggtggcagaacaacctccctcgatagtggtggaattgtacgatcatgatacctacggagccgatgagttcatggggcggtgcatctgccaaccctcgctcgaacgaatgcctagacttgcatggttcccactgaccagaggatctcagcctagcggagagctgcttgcctcgtttgaactcatccagagagaaaagcctgccatacatcacatacctggattcgaagtgcaagagacttccagaatcctggacgagtctgaagataccgaccttccctacccaccccctcaacgagaagcgaacatctacatggtcccacagaatatcaaaccagcactgcaacggactgcaattgagattctggcatggggtctgagaaacatgaagtcataccaattggcaaatatctcatcccctagcctggtcgtcgagtgtggtggccaaaccgtgcaatcctgtgttatccgaaatctcagaaagaatcccaacttcgatatctgtacgctctttatggaagtgatgctgccccgggaagagttgtactgcccaccaatcactgtgaaggtgatcgacaatcgccagtttggtcgtagaccagtggtcgggcaatgcacgataagatcactggaatcatttctttgcgacccttactccgccgaatctccatccccccaaggcggacctgatgacgtgtcgctgcttagcccgggagaggatgtcctgatcgatatagatgataaagaaccactgatcccgatccaggaggaagagttcatcgattggtggtcaaagttttttgcatccatcggagaacgagaaaagtgtgggtcctacctcgagaaagactttgatactctgaaggtgtacgatacgcagctggaaaatgttgaagcctttgaaggcctgagcgacttctgtaacaccttcaaactctatcgtggcaaaactcaagaagaaaccgaggacccaagcgtcattggagagtttaaaggccttttcaagatctacccacttcctgaagatcccgcaatcccaatgccccccagacagttccatcagcttgcagcccaggggcctcaggaatgccttgtccgtatttacatcgtgcgggcattcggactccagcctaaagatcccaatgggaagtgcgacccatacatcaagatatcaattggaaaaaagtcggtgagcgaccaagataactacatcccttgtactcttgagcctgtgtttggaaagatgtttgagcttacttgtacgctcccccttgaaaaagatctgaagattactctgtacgattacgatttgctgagcaaggatgagaagattggtgaaaccgtcgtggacttggaaaataggctcctgtcaaagtttggcgcaagatgtggcttgccgcagacttactgcgtgtcaggacctaatcaatggcgagatcaactgaggccgtcccaacttcttcatctcttctgtcagcaacaccgcgtgaaggccccagtctaccgcactgaccgtgtgatgtttcaggacaaggaatatagcattgaggagatcgaagcagggcgtattcctaacccgcatctgggacctgttgaggagcggctggctctccatgttctgcaacagcaggggcttgtgcccgaacatgtggaatcgcgccctctctattcccctcttcaacctgatatagaacaaggaaaacttcagatgtgggttgaccttttccccaaagcactcggaaggccaggaccaccttttaacattactcccagacgggcacgccgcttttttcttcgctgtatcatttggaataccagagatgttatactggatgacctctctcttaccggagaaaagatgagcgacatctacgtcaagggttggatgattgggtttgaggaacacaagcaaaagactgacgtgcactacaggagcctgggaggcgagggaaatttcaattggcgctttatctttccattcgactaccttccagctgagcaggtttgtactattgcaaaaaaggacgcgttttggagattggataagactgaaagcaagattcctgctagggtggtgtttcaaatttgggacaatgataagttctcctttgatgatttcctcggttcgcttcagctcgatcttaacaggatgccaaaaccagctaagactgcgaagaaatgttcccttgaccagctggatgacgcgttccatcccgagtggtttgtgtcgctttttgagcaaaaaactgtgaagggatggtggccttgtgtggcagaggaaggcgagaaaaagattcttgcgggtaagctggagatgactctggagattgtggcagaatcggagcatgaggaacggccagcaggccaaggaagagacgaacctaacatgaatcctaaacttgaggaccctcgacggccagacacctccttcctctggtttacttccccctacaagactatgaagtttatcctttggagacgttttcgatgggcgattattctctttatcatccttttcattctcctcctctttcttgccatctttatctacgcgtttcctaactacgcagcaatgaaacttgtgaagcctttttca

SEQ ID NO: 48089 - DNA, 6243 bp, Artificial Sequence
  derived and/or modified sequence
atgttgtgttgcttgctggtccgtgcctcgaacctgccctcggcaaagaaggataggaggtccgatcctgtggccagtcttaccttccggggggtgaaaaagcggacgaaggtgattaaaaatagcgtcaatcccgtatggaacgaagggttcgaatgggacttaaagggcatcccactggatcaaggttcagagttacacgtggtcgtgaaggatcacgaaactatgggacggaaccgattcttgggcgaagccaaagttccactccgggaagtacttgctacacccagcctcagcgcaagctttaatgctcccttgctcgatactaaaaagcagccgacaggcgccagccttgtcctgcaagttagctacactcccctacctggggctgtcccactatttcccccccccacgcctctcgagccgtcaccgacgttgccagacctagacgtagtggccgataccgggggagaggaggacactgaggaccagggcttgactggtgacgaagccgaacccttcctcgaccagtccgggggtccaggagcccctacaacacccagaaagctccccagccgacctccccctcattacccaggcatcaagcggaagcggagtgcccctacctcgagaaaactgctgtctgataaaccgcaggattttcagatacgtgttcaggtgattgaggggcgccagttacccggtgtgaatatcaaacctgtggttaaggtcacggccgccgggcaaactaagcgaaccaggatccataagggaaactcaccactgtttaacgagacactgttcttcaacctgttcgactcacctggcgagcttttcgacgagccaatttttatcaccgtggtcgatagcagatcactgcgcaccgacgctcttctgggcgaatttcgcatggacgtggggacgatttacagagagcctcggcatgcatatctacgaaagtggttgctgctgagcgatccggacgatttcagcgccggagcccggggttacctgaaaaccagtctttgtgtgttaggaccaggcgatgaggccccactggagaggaaagatccctcagaggataaggaagacatcgaatccaatctgctacgacccaccggcgtggcccttcgaggcgcccacttctgcctcaaagtgtttcgcgcggaagacttgcctcaaatggacgatgccgtcatggataacgtcaagcagatctttggcttcgaaagtaataaaaagaatctggtggatccttttgttgaagtctcatttgccgggaagatgctgtgctctaagatattggagaagaccgccaaccctcagtggaatcagaatattacgcttccagccatgttccctagcatgtgtgagaaaatgcgaatcagaatcattgactgggacagacttacccataacgatattgttgcaactacctacctgtcaatgagcaaaatatcagccccaggcggggaaatcgaggaggagccagctggggccgtcaaaccttccaaggcaagcgacctggatgactacctcggctttctgcctacttttggaccatgctacataaatctctacgggtccccaagggagtttactggatttcctgacccatatacggagctgaacaccggaaaaggcgagggagttgcataccgaggacgcttgttgctctctctcgagacaaaactcgtagaacactctgaacagaaggtagaggatctgccggccgatgatattctgagggttgaaaaatatctgcgccgccggaagtatagtctgttcgccgccttttacagtgctacaatgttgcaggatgtagatgatgcaattcaatttgaggtttccatagggaactacggcaataaatttgacatgacgtgcctccctctagcttctaccactcagtattctcgagctgtcttcgatgggtgccactattactatctgccctgggggaacgtcaaaccagttgtggttctgtcctcctactgggaagacattagccatagaattgaaacccaaaaccagctgcttgggatcgctgaccgactggaggccgggttggagcaagtgcacttagcccttaaagcacagtgttccacagaggatgtggactcactagtagcacagctgactgacgagttaatcgccggctgcagtcagccactgggcgatattcacgagacaccctcagctactcatctggatcagtacttataccaattgagaacccaccatctctcccagataacagaggctgccctggctcttaagttgggacacagtgagctgcccgccgcccttgagcaggcagaggactggttattgcgacttcgtgcccttgccgaggaacctcagaattctctgcctgatatcgttatttggatgctgcagggtgacaagcgtgtggcctatcagcgcgtacccgcacaccaggtcttgttttcacgacggggagctaattattgtgggaaaaactgcggtaagttgcaaactatttttcttaagtacccaatggagaaagtgccgggcgctaggatgcctgtccagattagagttaaactgtggtttggacttagtgtggatgagaaggagtttaatcagtttgcagaggggaagttatccgtgttcgccgagacatatgagaacgagaccaagttagctctggtggggaattgggggactacaggcctgacttaccccaaattctctgatgtgaccggaaagataaagcttcctaaggattcctttagaccatccgcgggctggacctgggcgggcgattggtttgtctgccctgagaaaactctgctccatgacatggacgccggacacctgtcattcgtcgaggaagtttttgagaaccagacacgactccctggaggccagtggatctatatgtcggacaactacacggacgtcaacggcgagaaagtgctgccaaaggatgacatagaatgtccgctggggtggaagtgggaagatgaagagtggtcgaccgacctgaatagagccgtagatgagcaggggtgggagtacagcattaccatcccacccgaacggaagccgaagcattgggtgccagcagaaaaaatgtattatacacaccggcggcggagatgggttaggctgcgtcgcagggacctgtcacagatggaggctctgaaacgccaccgccaggctgaagctgaaggtgagggctgggaatatgctagcctgtttggctggaaattccatctggaataccgcaaaaccgatgcattccggagacggcgctggcgcagaaggatggagcccctagaaaagaccgggcctgccgctgtgttcgctctggagggggctctgggcggcgtgatggatgataagtcggaggactccatgtccgtgagtacactgtctttcggcgtcaataggcccacaattagctgtatctttgattatggtaatcgctaccaccttagatgctacatgtaccaggccagggatctggccgctatggacaaagacagtttctctgacccatatgctattgtttcatttttacatcagtctcagaaaaccgtggtggtgaaaaatacgctcaaccccacctgggatcaaaccctgatcttttacgaaatagagattttcggtgaacccgccactgtggcagagcaaccacccagcattgtggttgaactgtacgaccatgacacatacggcgccgacgagttcatgggccgttgtatctgccagccctcattggaacggatgcctagactcgcttggtttcccttgacccggggatctcagcctagtggggaactcctcgcctcgttcgaactcatccagagggaaaagcctgctatccaccatatccccggttttgaagttcaggagacgagccgaattctggacgagtcagaggacactgatttaccctacccccccccccagcgcgaagctaatatctacatggtgcctcagaacattaaacctgctctacagagaacagctatcgaaattctggcatggggactacgaaacatgaagtcctatcagctcgctaacatttcaagccctagcctcgtagtggaatgcggtggccagacagtgcagtcctgcgtgattagaaacctgaggaagaatcccaacttcgatatctgtactctctttatggaggtcatgctacccagggaagagctctattgccccccaattacagttaaggtgattgacaaccggcagtttgggagaaggccagtggttggacagtgcactattcgcagtctcgaatcatttctgtgcgacccctatagcgccgagtccccctctcctcagggaggcccagatgacgtgagcctcctgtcccccggcgaggatgtacttatagatattgatgacaaggaacctcttatccctattcaggaagaggagttcattgattggtggtccaaattcttcgcatccattggtgagcgagagaaatgcgggtcatatctagagaaggatttcgacactctgaaagtgtatgatacgcaattggaaaatgtggaagcttttgagggtctcagcgatttttgtaacacatttaaactgtataggggaaagacacaggaagagacggaggacccctcagtcatcggagagttcaaggggctctttaagatatatcccctgcccgaggaccctgcaatacctatgcccccaagacaatttcaccaactggctgcccaggggccccaggaatgcctggtgaggatatatatagtgcgcgccttcggactgcaaccgaaggatcctaatggcaaatgcgatccgtacattaaaatttcaataggtaagaagagcgtgtcagaccaggataactacataccatgtaccctcgaacccgtgttcggaaagatgttcgagctgacctgtaccctgcccctggagaaagatctcaaaatcaccttatacgactacgaccttttaagtaaggatgaaaaaattggcgaaaccgttgtagacctggaaaataggctgttgagtaagttcggggccaggtgcggcctaccgcagacttactgcgtcagcggcccgaatcagtggagagatcagctcagaccatcgcagctgcttcacttattctgtcagcaacaccgggtcaaggctcctgtctacagaacggatagagtaatgtttcaggacaaagagtactctatcgaggagatcgaggcgggccgtattcctaacccacaccttggccctgtggaggaaaggctggctctgcatgttctgcaacagcagggcctcgtgcctgagcatgtggaatccaggcctctgtatagccccttgcaaccagatattgagcaaggtaagctacagatgtgggtcgacctgtttccaaaggctcttggtaggccagggccgccatttaatataacacccagacgagccaggagatttttcctgagatgcattatttggaacaccagagacgtgatactcgacgatctttccttgactggggagaaaatgtcggacatctacgtcaaggggtggatgatcggttttgaggagcataagcagaaaacagatgtgcactaccggtctctggggggagaagggaatttcaattggcggtttatatttcccttcgattatctacctgccgagcaagtgtgtaccatcgccaagaaagacgctttttggaggttggataagaccgagagcaaaatacccgctcgagtcgtcttccagatttgggataacgacaaattctcctttgatgactttctggggtccctgcagctggacctgaatcggatgcccaaacctgcaaaaacagctaagaagtgcagtttggatcaactggacgatgcctttcacccggagtggtttgtttccctgtttgaacagaaaacggtcaaagggtggtggccctgtgtagcagaggagggagaaaaaaagatactggctggaaagctcgagatgaccctggagattgttgcagagtctgagcacgaggagcgccctgccgggcagggacgcgatgagcccaacatgaatcccaaactcgaggatccccgccgccccgatacaagcttcctctggttcacaagtccttacaagacaatgaagtttatcctctggcgccgatttaggtgggcaattatcctgttcatcattctgtttatcctgctgctgttcctcgctatctttatatatgcatttccaaactatgccgcaatgaagttggtcaaacctttctca

SEQ ID NO: 48090 - DNA, 6243 bp, Artificial Sequence
  derived and/or modified sequence
atgctatgttgtcttctggtccgtgcatcaaatttgccgagcgcaaaaaaagatcgtagaagcgatcccgtcgcgagtctgactttccgcggggtcaaaaagcgaaccaaagttattaaaaactcagtgaatccagtctggaatgaaggattcgagtgggacctcaagggaatcccgctcgatcaaggttcggagttacacgttgttgttaaagatcacgagacaatgggacgtaataggtttttgggtgaagctaaggttccccttagagaggtcttggccacgccatcgctttcagcgtcgtttaacgcaccactgcttgatacaaagaaacaaccgacgggagcttcactcgtgttacaagtgagttatactcccctaccgggagccgtgcctttgtttccacctcctacaccactagagccttctccaacgctcccagatttggatgttgttgctgatactggaggagaggaggacacagaagaccaaggactaactggcgacgaagcagaaccttttctcgaccaaagtggaggaccaggagctcctacaactccgagaaagcttccatcacgaccaccgccacattatccaggaatcaagagaaaacgttccgccccgacatcccgaaagctcttgagcgataaacctcaagactttcagatccgtgttcaagtgatcgaaggccgtcaattgccgggtgtgaacattaaaccagtggtaaaagtgactgctgctggccagacaaaacggaccagaattcataaggggaacagcccgcttttcaatgaaaccctgttctttaatttgtttgattcaccgggtgaacttttcgatgaacctattttcattaccgtcgttgattcccgttctctgcgaactgacgcgctactgggcgaattcagaatggacgtcggaacaatatatagagaaccacgacacgcctatcttcgtaaatggctcctcttgtctgatccagacgatttctcagctggagcccgcggttacctcaaaacctctctgtgtgttttgggacctggtgacgaggcgccgctcgaacgcaaagatccatcagaggacaaggaggatattgaatcaaacttgcttaggccaacaggagtggcattgcgtggagctcatttttgtctaaaagtgtttcgtgctgaagatctaccacagatggacgatgctgtcatggataacgtaaagcaaatcttcggatttgagtccaacaagaaaaaccttgttgatcccttcgtcgaagtgtcatttgcgggaaagatgctttgctcgaaaatcctagagaagactgctaatccgcaatggaatcagaatataacacttccggcgatgtttccgagcatgtgtgagaagatgcgtatcagaattattgattgggaccgactcacccataatgatattgttgcaacgacttatctcagcatgtcaaaaatatcagcaccaggcggagaaattgaagaagagccggcaggtgcagttaagccttccaaggcctccgatctcgatgattatctgggattcttgcctacttttggaccatgttacattaatttgtatggatccccgcgtgaatttacaggattccccgacccatatacagagttaaacactggaaaaggggagggagtggcttaccgggggcgtttactgctcagcctggaaaccaaattggttgaacactctgaacaaaaagtagaggacctaccggcagatgacatcttgagagtggaaaagtacctccgtagaagaaaatactccctttttgccgctttctattcagctactatgttgcaggatgtggatgatgcaattcaattcgaagtgtcaattggaaattatgggaataaatttgatatgacttgcttacccctagcttcgactacccaatactcgcgggctgtgtttgatggttgccactattattacctgccatggggaaatgttaaaccggtcgtggttctgtcctcctattgggaagatatttctcaccggatcgagacgcaaaatcaacttttaggaatcgcagataggctggaggcaggattggaacaggtacatctagcattgaaagcgcaatgttctaccgaggatgtagattctcttgttgcgcagctcacagatgagctgattgcaggttgcagccagccattgggagatattcatgagactccgagtgccacacatctcgaccaatacctgtaccaactccgaacccaccatctgagtcaaattacggaggccgcgttggctctaaaactgggtcattccgagcttccagctgcactggaacaagcagaagactggcttctacgattacgggcgttggcagaagaacctcaaaacagtttaccggatatcgttatatggatgcttcaaggagataaaagagttgcttatcaacgggtgccagctcatcaggtgcttttttcaagacgcggagctaattattgtgggaaaaattgcggcaagctccagactattttcttgaaatatccaatggagaaggttccaggagctagaatgccggtgcaaatacgcgttaaattatggtttggattgtccgttgatgaaaaagaattcaatcagttcgcggaaggtaaattgtctgttttcgctgaaacttatgaaaatgaaacaaaactggctcttgtgggtaactggggaactactggactcacctacccaaagttttcagatgttacgggaaaaatcaaacttccaaaagatagtttcagaccaagtgctggatggacatgggcaggagattggtttgtctgtccagaaaagacgctgctgcacgatatggatgcaggccatctatcctttgtggaagaagtgttcgagaatcagactcgattgcccggtggacaatggatttatatgtctgacaattatacagatgttaacggagagaaggttttgccaaaggatgatattgaatgtccattgggatggaaatgggaagatgaggaatggtccactgacttgaatcgagctgtagatgaacaaggttgggaatacagtattactatcccaccagagagaaagccgaaacactgggttccggcagaaaaaatgtattacactcaccgacgtcgtagatgggttcgcctccgtcggcgtgacttaagccaaatggaggctttaaaacgacatagacaggctgaagccgagggagaagggtgggagtacgcaagtctctttggatggaaatttcacttagaataccgaaaaactgacgcttttcgacgcaggagatggagacgtcgtatggagcctttggaaaaaacgggccctgctgctgttttcgcccttgaaggagccctgggtggtgtgatggatgataagtctgaagattctatgtctgttagtaccctctctttcggtgtaaatcgaccaacaatttcgtgtattttcgattatggaaaccggtaccaccttcgctgctatatgtatcaggcacgtgatttagctgcaatggataaagattcgttctccgacccatacgccattgtatctttccttcatcaatcacaaaagactgtggttgtgaaaaacactttaaatccaacttgggaccagacactaattttctacgagatcgaaattttcggggaaccagctacggtcgcagagcaaccaccatcaatcgttgttgagctttacgatcatgacacttatggagcagacgaattcatgggacgctgcatatgtcaaccatccctagagcgtatgcctcgtctcgcttggtttccactcactaggggctcacaaccaagtggagaattgctggctagcttcgaattgatacagagagaaaagccagccatccatcacattccaggattcgaggtgcaagagaccagccgtatcctggacgaatctgaagacactgatcttccttacccgccgccacaacgggaagccaacatctatatggttcctcaaaatattaagccagctcttcagcgaactgccattgaaattctagcttggggactgcgtaatatgaagagctatcaacttgcgaatatttcatcaccaagccttgttgtggaatgcggaggtcagacagtccaatcctgcgttattaggaatctaagaaaaaatccaaattttgacatctgcaccttgttcatggaggtgatgcttccaagagaggaactttattgtccacccattactgttaaagttatagataacaggcagtttggccgaagacctgtagttggacaatgtacaatcagaagtctagaatctttcttgtgcgatccgtatagtgcagaaagtccatcgccacagggcggacctgatgatgtttccctactttcacctggtgaagatgtgttgattgatatcgatgacaaagagcctctcataccaatccaagaagaagaattcatagactggtggtcaaagttttttgcttcaattggagaacgagaaaaatgcggatcctatttggaaaaggatttcgatactttaaaagtgtacgacactcaactagagaacgtcgaagccttcgaagggctctctgatttctgcaatacttttaagctctataggggaaagacccaagaagaaactgaagatccaagcgtcatcggagaatttaaggggttgtttaaaatatatccactcccggaggatcccgcaattcctatgccgccacggcaattccaccaactcgctgcacaaggaccacaagaatgcttagttcgtatttacattgtccgggcatttggacttcaaccaaaggatccaaatggtaaatgtgatccatatatcaaaattagcattggaaagaaatccgtttcggaccaagataactatatcccatgcaccctcgaacctgtgttcggaaaaatgtttgaacttacatgtacattgccactcgagaaggatctgaagattactctctatgattatgatctcctttctaaagatgagaaaattggagagactgtggttgatttggagaatcgtcttctttcgaaatttggagctcggtgtggattacctcaaacatattgcgtaagcggacctaatcaatggcgtgatcaacttcgaccttcacagctactccaccttttctgtcaacaacatagagtcaaggccccagtatatcgtactgatcgagtgatgtttcaagataaagaatattcgattgaggaaattgaggctggacgaattcccaacccacatcttgggcctgttgaagagcggttagcattacatgttctccagcagcaaggtcttgtgccagaacacgttgaatccagaccactgtactcaccccttcagccagatattgaacagggtaaacttcagatgtgggttgatctcttccctaaagcactcggccgaccgggacctccattcaatatcacgccacgtcgtgctaggcgatttttcttgcgttgtatcatttggaacactcgtgacgtgatcttagatgacttatcactaactggagaaaagatgagcgatatctacgtgaagggttggatgataggatttgaagagcataaacaaaaaaccgatgttcattaccgatcactaggaggggagggtaattttaattggcggtttatcttcccgttcgattatctcccagctgagcaggtttgtactattgctaaaaaagatgctttttggcgacttgataagaccgaatcaaaaataccagcacgagtagtttttcaaatttgggacaacgataagttcagctttgatgattttcttggatctttgcaacttgatcttaaccggatgcctaagcccgctaagaccgctaaaaaatgttcactggatcagcttgatgacgcattccatcctgaatggtttgtttcactattcgaacaaaaaacagttaaaggatggtggccgtgcgttgcagaagaaggagaaaagaaaatacttgcaggaaaattggaaatgacgctcgaaattgttgctgagtcagaacacgaggagcgacctgccggacaaggacgagatgaaccgaatatgaaccctaaacttgaagatccacgtagaccagacacctcgtttctctggtttacttcgccatataaaactatgaaattcatcttgtggcgtcgattcagatgggcaattatattattcattatcttgttcatcttgttattgtttttagcgatttttatttatgcatttccgaactatgcggccatgaaattggttaagccattttcg

SEQ ID NO: 48091 - DNA, 6243 bp, Artificial Sequence
  derived and/or modified sequence
atgctgtgctgcctgctcgtgcgggcgtctaatctgccgtcagcgaagaaagacaggcgctccgacccggtcgcctcgctcaccttccgaggcgtgaagaagaggaccaaagtgattaagaactcggtcaacccagtgtggaatgagggcttcgagtgggacctcaagggaatcccactggatcaaggatcggaacttcatgtggtcgtgaaagaccatgaaactatgggacgtaaccgcttcctcggcgaggctaaggtcccccttcgtgaagttcttgccactccgtcactctcggcctccttcaacgcgccactgctggacactaaaaagcagcctaccggggcatccctggtgttgcaggtgagctacactccgctgccgggcgcggtaccacttttcccacctccaactccgctggaaccgagcccaaccctccccgacctggatgtggtcgctgacactggcggagaggaggataccgaggaccagggactcaccggggatgaagcggagccttttcttgaccagtcgggaggacctggagcccctacgactccgcgcaaactcccgtcgcggccgcccccgcactacccgggtatcaaaaggaagcgctccgctccaacgtcgcgcaaactgctctcggacaaaccgcaggactttcaaattagggttcaggtcatcgagggtcggcagctgcccggagtgaacatcaaaccggtggtcaaggtcaccgctgctggacaaaccaagagaaccagaatccacaagggtaattcaccattgtttaacgagactttgttcttcaacttgtttgattccccgggcgaactgtttgatgaaccgatcttcatcaccgtcgtggactcacggtccctccggacggatgcgctcctcggagagttccggatggacgtgggcacgatctaccgcgagccccgccacgcatacctccgaaagtggctcctgctgtccgacccggatgactttagcgcaggagcccgcggttacttgaaaacgtcgctgtgcgtgcttggtccaggtgatgaggctccactggaacgcaaggacccctctgaggacaaagaggacatcgagagtaacctcctgcggcccaccggcgtggcacttcggggggcgcatttctgcctcaaagtctttagagccgaagatctgccacaaatggacgatgccgtcatggacaacgtgaaacagatcttcgggttcgaatcaaataagaaaaaccttgtggatcctttcgtggaagtgtcgtttgcgggcaaaatgctgtgtagcaagattcttgaaaaaacggccaatccacagtggaatcagaatatcactcttcctgcgatgttcccttcgatgtgcgagaagatgcgcattaggataatcgattgggaccggttgacccacaacgatattgtcgcaaccacctacctctccatgagtaaaatctcagctccagggggagagatcgaagaggaaccggccggagcagtgaaaccttcgaaggcctctgatctggacgactaccttgggttcctccccacgttcggcccctgctacatcaacctctatggaagcccacgagaatttactggttttccggacccttacaccgagctgaacaccggaaaaggagaaggtgtggcgtatcgcggtcgcctcctcctctctttggaaaccaaactggtggagcattccgagcagaaggtggaggacctgccggcggatgatatcctgcgcgtggagaagtacctgcgcagacggaagtattcgctgttcgcggccttctactcagcgactatgctgcaggatgtggatgacgccatccaattcgaagtgtccattggtaattacggcaataagttcgacatgacctgccttccgttggcctcgaccactcagtactcccgagcagttttcgacggttgtcactactattaccttccctggggcaacgtgaagccagtcgtcgtcctcagcagctattgggaggacatctcccatcggatcgagactcaaaaccagctgctgggcatcgcagaccgcctggaagcgggactggaacaagtccatctggcactcaaggctcagtgttcgaccgaggacgtggattcattggtcgcccagctgaccgacgaactcatcgccggctgctcccaacctttgggtgatatccatgagactcctagcgccactcatctcgatcagtacctttaccagctgaggacgcaccatttgagccaaatcacggaagccgccctcgccctgaaactgggccactccgagttgcccgccgcgctggagcaagcggaggactggctgctgagactccgggcactcgctgaagagccacaaaattccttgccagacatcgtgatctggatgctgcagggagacaaacgcgtggcgtaccagcgggtcccggctcaccaagtgctgttctcccgcaggggagcgaactactgtggtaagaactgtggcaagctccaaactatcttccttaagtaccctatggagaaggtgccaggagccaggatgcccgtgcaaatcagagtgaagctgtggttcggactgtcagtggatgaaaaagaattcaaccagttcgccgagggtaaactgtcagtgtttgcggagacgtatgagaatgaaaccaagctcgcgcttgtgggcaattgggggaccaccggattgacttacccgaagttttctgacgtcactggcaagatcaaactgccgaaggatagcttcaggccttcggcaggatggacctgggcgggagactggttcgtgtgccctgaaaagaccctgctgcacgacatggatgccggtcacctgagcttcgtggaagaggtgtttgaaaaccagacccggctgcctggtggacagtggatctacatgtccgataactacactgacgtgaacggagaaaaggttctgcctaaggatgatatcgagtgtccgctgggatggaagtgggaagatgaagaatggtcgaccgacctcaaccgcgctgtcgacgaacagggttgggaatactcgattaccattccgcctgaacggaagccgaagcactgggtgccggccgaaaagatgtactacactcaccgacggcgacgctgggtccggctgcggcgccgggatctgtcgcagatggaggcccttaaacgccacaggcaggccgaagcagagggagaaggatgggagtatgctagcctgttcggctggaagttccatctggaatacagaaagactgacgcattccgccggcgccgctggcggcggcggatggagccactggaaaagaccggcccggccgcggtctttgcgctggaaggagctctgggcggcgtgatggacgataagtcagaagatagcatgtccgtgtccactctttcgtttggggtgaatcgcccaaccatctcctgcatcttcgattacggcaatcggtaccacctgcggtgctacatgtaccaggcacgcgacctcgccgccatggataaagactcattttcagacccatacgcaatcgtgagctttctccatcaatcgcaaaagactgtcgttgtgaaaaacactctcaatccgacctgggaccagaccctgatcttctacgagatcgaaatcttcggagaaccagctaccgtcgcagaacaacccccgtctatcgtggtcgagctgtacgatcacgatacctacggagccgatgaattcatggggagatgcatatgccagccaagcctcgaacggatgccgaggctggcctggttccctctgacccggggaagccagccgtctggcgagctcctggcctcattcgagctgatccagcgggagaagccggcaatacatcacatcccaggatttgaagtgcaggagacttcaaggatcctggacgagagcgaagatactgacctcccatacccaccaccgcaacgggaggccaacatctatatggtgcctcagaacattaagccagctctccaacgaacggcaattgagatccttgcctgggggctcaggaacatgaagagctaccagctcgcaaacatttcaagcccctctctggtggtcgaatgtggtggccagactgtgcagtcgtgcgtcattagaaatctgcggaaaaacccgaactttgacatctgcaccctcttcatggaagtcatgctcccacgggaggaactctactgtccaccgatcactgtgaaggtcatcgataatagacaattcggccggcgccctgtggtcggccagtgcactatccggtcgcttgaatcgttcctgtgtgacccctattcagccgaatcaccgtcacctcaaggcggacccgatgacgtctctctgttgtcgcctggggaggacgtcctgatcgatatcgacgataaggagccgctcattcccatccaagaggaagaattcattgattggtggtcgaaattcttcgcatccatcggagagcgggagaaatgcggaagctacctggagaaagatttcgataccctgaaggtctacgatacgcagctggaaaacgtggaggcttttgaggggctgtccgacttttgcaacacgttcaagctgtaccggggcaagactcaggaggaaaccgaagatcccagcgtgatcggagaattcaagggcctgttcaagatctacccgttgcccgaggacccggcgattccaatgcctccacggcagttccatcagctggcggcccaaggtccgcaggagtgtctcgtcaggatctacatagtccgggcattcggattgcagcctaaggacccaaatggaaaatgtgacccgtacatcaagatctcgatcgggaagaaatcggtcagtgaccaggacaactacatcccgtgcactctcgaacctgtgttcggaaagatgttcgagttgacctgcaccctgccgctggagaaggacctcaagatcactctttacgactacgacctcctgtcgaaggatgagaagattggtgaaactgtggtggatctcgagaacagacttctctccaagttcggggcacgttgtgggctgccgcaaacctactgcgtgtccggacccaatcagtggcgggaccaactcagaccatcccaactcttgcatctgttctgtcagcagcatcgcgtgaaggcaccggtgtaccgcactgatcgggtgatgttccaagacaaggaatactctatcgaggaaatcgaagcagggagaatcccgaatccgcacctggggcctgtcgaggagcgcctggcgctgcacgtcctgcaacagcaaggcctggtcccggaacacgtcgaaagcaggcccctgtacagcccgcttcagccggatattgagcagggtaagctgcagatgtgggtcgatctgttcccgaaggcattgggtagaccgggaccaccattcaatatcaccccacggcgcgcccgcagatttttcctgcgatgcattatctggaacactagggacgtcatcctggacgacctttccctcactggagaaaagatgtcagatatctatgtgaaaggatggatgattggcttcgaagaacacaagcaaaaaacggatgtgcactaccgctctctcggaggagaaggcaatttcaactggagatttatcttcccttttgattacttgcccgcggaacaggtctgcactatcgctaaaaaggacgctttttggagactggataagactgagtccaaaatccccgcacgcgtggtgtttcagatatgggacaacgacaaattctcctttgatgattttctcgggagcctccaactggacttgaataggatgccgaagccagccaagaccgccaaaaagtgtagcctcgaccaattggacgacgcctttcacccggaatggttcgtgagcttgttcgagcaaaagaccgtcaagggatggtggccttgcgtggcggaggagggcgaaaagaagatcctggccggaaagttggagatgactctggaaatcgtcgccgaatcagaacacgaagaacgaccggcgggccaaggacgggatgagcctaacatgaatcctaaactggaggacccgcggcgcccggacacctcgttcctctggttcacttccccctacaaaaccatgaagttcatcctgtggcggcgcttcagatgggcgatcatcctcttcatcatcctgttcatcctgctgctcttcctcgccatcttcatctacgccttccctaactacgcggcaatgaagttggtgaaaccgttctcc

SEQ ID NO: 48092 - DNA, 6243 bp, Artificial Sequence
  derived and/or modified sequence
atgctctgttgtctactagttagggcctctaacctgcccagtgctaagaaggatcgtcgcagcgaccccgtcgcttccttgaccttccggggagttaagaagcgtaccaaggttatcaaaaattcagtaaatcctgtctggaacgagggcttcgagtgggatctaaagggaattccgctggaccaaggcagcgagctccacgtagtagtcaaggatcacgaaactatgggaagaaaccgtttccttggagaagccaaggtgccactgagggaggttcttgccacaccctcactgagtgcttcattcaacgctcccctgctggacaccaaaaagcagcccacaggagcctccttagtgctgcaggtgtcgtacacgcccctgcctggcgctgtgcccctgttcccccctcctactccactcgagccatcacctactctgcctgatctggatgtggtggctgatacggggggcgaggaggacaccgaggaccagggcctgaccggtgacgaggcagagccatttcttgatcagagtggaggcccaggtgcccctaccacccccagaaaattaccctcacggccaccaccacactacccggggattaaaagaaaaaggtcggccccaactagcagaaagctgttgtctgataagccgcaggattttcaaattcgggtccaggtgatcgagggcagacagctccccggggttaatatcaagccggtggtgaaagtgactgcagcaggtcagactaaacgcaccagaattcacaaaggaaattcccctttgttcaatgagacactgttctttaatttatttgacagccccggagagctattcgatgagcccattttcatcacagtcgtggacagccgctctctcaggacggatgctcttttaggggaatttcgcatggatgtcgggactatatatcgagaaccgcggcatgcctatctgagaaagtggctgctgttaagtgatcctgacgacttttctgccggggcgagaggctacctcaaaacatccctgtgcgttctcggcccgggcgatgaagctcccttggaaagaaaggacccgagcgaggacaaagaggacattgagtccaatcttctgcgacctacgggagttgccctgcgtggcgcacatttttgtctcaaagtgttcagggctgaggatttgcctcaaatggatgatgctgtgatggacaacgttaaacaaatattcggttttgagtctaacaagaaaaatcttgtggatcccttcgtagaagtcagctttgctggtaagatgttgtgttcgaagatcctcgaaaagacggccaacccccagtggaatcagaacatcacattgcccgccatgttcccgagcatgtgcgaaaagatgcggattcgtatcatagattgggataggcttacccacaatgacatagtggcgacaacttatctcagcatgtccaagatcagtgcacccgggggcgagattgaggaagagccagccggcgctgtgaaaccctctaaagcttctgacctggatgattacttgggcttcttgcctactttcggaccttgctatattaacctgtatgggtcccccagagagtttaccggtttccctgacccctacacagagctgaacactggaaagggggaaggtgtggcttaccggggccggctgctgctgtcacttgaaacgaaactggtagaacacagcgagcaaaaagtcgaagatttgcctgcagacgacatccttcgcgtcgaaaaatacttgcgtcgccgaaaatattctttgtttgccgcattttattccgccacaatgctccaggatgtggatgacgccatccagtttgaagtgtctatcggcaattacgggaacaagttcgatatgacctgcctgcccctcgcttccaccacccagtactctagggccgtattcgatgggtgtcattactactatctgccatggggaaacgttaagccggtggttgtactgagttcatactgggaggatattagccaccgcattgagacccagaaccaactgctgggcattgccgaccgacttgaggctggactcgaacaggtgcacctggcattgaaagctcagtgctccactgaagacgtcgacagcctggttgcccagttgacagatgaactcatcgccggctgcagccagcccctaggtgacatccatgagacaccttcggcaacgcacctggatcagtatctctatcaacttcgcacgcaccatttatcccaaatcacagaagcagctcttgctctcaagctgggacacagcgagctgcccgccgccctggaacaggctgaggattggttattgcggctgagggccctggctgaggagccccagaactccctgcctgacatcgtgatctggatgctacagggggacaagagggtggcatatcagcgcgtacccgctcaccaggtgctattcagtcggagaggcgcaaactactgcggaaagaattgtggcaagctccagacgatctttttgaagtacccaatggaaaaggtcccaggcgctcgaatgccggtgcagatccgcgttaagttgtggttcggcctctccgtcgatgaaaaggaatttaaccagtttgccgaaggaaagctctctgtgttcgccgagacgtacgaaaacgagactaagctcgcgctagtgggaaactggggaacaaccggattgacttacccaaagttctctgacgtgacaggtaagattaaacttcccaaagactccttccgtcctagcgcaggctggacatgggctggggattggttcgtgtgtccagagaagactctcctccatgacatggatgctggccacttgtccttcgtggaggaagtgtttgaaaatcagaccagactgccagggggccagtggatttatatgtccgacaattacaccgacgtgaacggcgagaaggttctgcccaaggacgacatagagtgtcctttgggatggaaatgggaggacgaggagtggtccacagacctcaatagggcggttgatgagcaaggctgggaatattctatcactattccgcctgagcggaaacccaagcattgggttcccgccgagaaaatgtactatacgcatcggcgtaggcgttgggtacgcttacggcggagagatttatcccagatggaggctctgaaacgccatcgccaggccgaagccgagggcgaaggatgggagtacgcgagtctgttcggctggaaattccacttagaatatcgtaaaacggacgcttttcgtcgtcgtaggtggcgacggaggatggaaccacttgagaagacaggtccagcagccgtattcgccctagaaggggcccttggaggggtgatggacgataaatccgaggattctatgagcgtgtcaaccctgagtttcggtgtgaaccgcccaacaatatcctgtatcttcgactacgggaatagataccatctacgttgttacatgtatcaggctcgcgatctggccgccatggacaaggacagctttagcgacccttacgctatcgttagcttcttgcaccagagccagaaaacagttgtggtgaaaaacacccttaatcccacctgggaccagactctcattttttatgagatagaaatatttggggagcctgcaactgtagccgaacagcctccttccatcgtagtcgaactgtatgaccacgatacctatggggcagatgaattcatggggcgatgtatttgtcagccctccctcgagaggatgccaaggctcgcttggtttcctctcactcgaggctctcagccaagcggcgagctcttggcctctttcgagctgatccagcgagagaagcccgcaatccaccatataccaggttttgaggttcaggaaacgtctagaatcctcgatgaaagtgaagacacagacctaccatatccgcccccgcagcgtgaggcaaatatctatatggtgcctcagaacatcaagccggcactgcagaggacggctatcgaaatcctggcctggggtctgcggaatatgaaaagttaccagttggccaatatatcttccccgtccctcgtggtagagtgcgggggtcagacagtgcaatcatgcgttatacggaatttgaggaaaaaccctaacttcgatatctgcactcttttcatggaggtcatgttgcctcgcgaagaactttattgcccacccattacagttaaggtgattgataatcgccaattcgggagacggcccgttgttggccagtgtacgatacgaagcctcgagagcttcctgtgcgatccatactctgcggagagcccttcccctcagggcggtccggatgatgtgtcacttctgtccccgggagaggacgtcttgatagacatcgatgacaaagagcctctcatcccaattcaggaagaggagttcattgattggtggagtaaatttttcgcgtcaatcggtgaacgcgaaaagtgcggaagttatctcgagaaggactttgacactctgaaagtgtatgatacccaactggaaaatgtggaggcatttgaaggtctgtctgatttttgtaatactttcaagctctatcggggcaagacccaggaggagaccgaagacccctccgtgattggagagttcaagggcttattcaagatttatcctctccccgaagatcctgcaatcccaatgccccccagacaattccatcagcttgccgcacagggaccgcaggaatgccttgtgcgcatctacatcgtgcgtgcttttggtttgcaacctaaggatcccaatggcaaatgtgatccctacatcaaaatatccattgggaagaagagtgtgagtgatcaagacaactacatcccatgcacactggagccagtcttcggtaaaatgttcgaacttacatgcacactgccactggagaaagatctgaaaatcaccttgtacgattacgatctgctgtctaaagatgagaagattggagagaccgtcgtcgatctcgaaaatcggctgcttagcaagtttggcgccaggtgtggcttaccgcaaacctattgtgtgtccggccctaaccagtggagagaccagctccgacccagccagctcctgcatctattctgtcaacagcatcgcgttaaagctcctgtgtacaggactgacagggtgatgttccaggataaagagtattccattgaagaaatcgaggccggccgcattccaaaccctcatctaggtccagttgaggaaagactggccctgcacgtactgcagcagcagggattagtccccgaacatgtggagagccgccccttgtatagtcctttgcagcccgatatcgagcaaggaaagttgcagatgtgggtggacttatttccaaaagccctcggaaggcctggacctcctttcaatataactccgagaagggcccggcggttcttccttcgttgtataatttggaacacccgcgacgtgattttagatgacctcagcctcacaggcgagaagatgtctgatatctatgttaagggatggatgattggtttcgaagaacacaagcagaagacagatgtccactaccgaagcctcgggggcgagggcaacttcaattggcggtttatctttccctttgattatcttcctgcggaacaggtgtgtactatcgcgaagaaggacgccttttggagactagataagactgagtccaaaattcccgctagagtggtgtttcagatttgggataacgacaaattctcgtttgacgattttctaggctcactgcagctggatcttaatcgcatgcctaaacccgccaaaactgctaagaagtgttctctggaccagcttgacgatgctttccacccggaatggtttgtgagtctgtttgaacaaaaaacggtgaagggctggtggccttgtgtggcggaggaaggcgaaaagaagattctcgctggtaaacttgaaatgaccctggagatcgtggcagaaagcgagcatgaagaaagacccgcagggcagggtagggacgaacctaacatgaaccctaagcttgaggatcctcggcgtccagacacctcattcctgtggttcacgtcaccgtacaagaccatgaaattcattctgtggcgaagattccgctgggctatcatcctgtttataattctgtttatactgcttctgtttcttgctatctttatttatgcctttccaaattacgccgctatgaagctggtgaagccattcagt

SEQ ID NO: 48093 - DNA, 6243 bp, Artificial Sequence
  derived and/or modified sequence
atgctctgttgccttctcgttagagcgtctaatctgcccagtgccaagaaggaccggcggtctgatccggtagcatcgttgacattcaggggtgtcaaaaagcgaactaaagtgattaagaacagtgttaatcctgtctggaatgagggattcgaatgggatctgaaagggatacctctcgatcaaggcagtgagctgcacgtcgtggtgaaggatcacgaaacgatgggacggaatcgctttttgggcgaagccaaggttcctctgagggaggtgctggccaccccaagcctcagcgcatccttcaatgcccctcttcttgacaccaagaaacagcccacaggcgccagcctggtgctccaggtgtcttatacgccgctgccaggtgccgttccactgttcccgccaccaacacctcttgagccatccccaactctccccgatctggacgtcgtggccgatactggtggggaggaggataccgaggatcaggggctgaccggtgatgaggctgagccttttctcgatcagagtggtggccccggcgcccccactacccctaggaaactgccctctcgaccacccccacactaccccgggatcaaacggaagaggtctgccccgacctcccgcaaattgttgagcgataaaccacaggattttcagatccgggtgcaggtcatagaagggcgccaactgcctggcgttaatattaagcctgttgtgaaggttaccgccgctggccaaaccaagcgcacccgaatccataaagggaacagcccactgttcaacgaaacgctgttcttcaaccttttcgatagccccggcgagctattcgacgaacccattttcattacagtcgtcgactcacgcagtctgaggactgacgcgcttctgggagaattccgtatggacgtcggcacaatataccgagaaccgaggcatgcttatcttcggaaatggttgctcctcagtgatcctgacgacttctcagcaggcgccagaggctaccttaaaactagcctctgtgtgctaggaccaggagatgaagctccgcttgagcggaaggatccttctgaggataaggaagacattgagtctaatctcctacggcctacgggggtcgccctgcgtggagcccacttctgcctcaaagtgttccgggcagaagacttgccgcagatggacgacgccgtaatggataatgttaagcagattttcggttttgagagtaacaagaagaatttggtcgacccatttgtcgaagtttcgttcgctgggaagatgttgtgctcaaagatcctcgagaagaccgcaaatcctcagtggaaccagaatattactctgcccgcaatgttcccaagcatgtgtgaaaagatgagaatccgaatcatcgactgggatcgtctaactcacaacgatatcgtcgcaactacctacctgtccatgtccaagatttcagctccaggtggggagatagaggaggagcctgccggagcagttaaaccctcgaaggcgagtgatctggacgactacctaggatttctgcctacgttcggaccatgttatattaacctctacggcagccctcgcgaatttactggttttcccgatccgtataccgaattgaacacagggaagggagaaggcgtggcttaccgcggacggctactgctgtcccttgaaactaagctagtggaacacagcgagcaaaaggtagaggacttgcccgccgatgacatactacgggtcgagaagtatctgaggcgtagaaaatatagcctctttgccgcgttctattcagctactatgctccaggatgtggacgacgctattcagtttgaggtgagcattggtaactatggtaacaaatttgacatgacctgtctcccactcgccagtacaacacagtattctagagctgtgttcgacgggtgccattattattacttgccctggggcaacgtgaagccagtggtggtgctttcctcttactgggaggatatcagtcatcgcatagagacccagaatcagctcctcgggatagccgaccgcctggaggcaggtttggaacaagttcatctggctctgaaggcacagtgcagcacagaggacgtcgacagtttggtcgcccagttgacagacgagcttatcgcagggtgtagtcagccgctgggagacatccacgagacgccttccgcgactcatttagatcagtatctataccaattgaggacacatcaccttagccaaattacagaggctgccctggccctcaaactcggacacagtgagctcccagccgctttggagcaggcggaagattggttgctgaggctgagagccctggcagaagagccgcaaaattccttgcccgacatagtgatttggatgctgcagggggacaaaagggtggcatatcagagggttcctgcccaccaggttctcttctccaggcgcggcgcaaactattgcggcaagaactgtggtaagctacagacgatctttctgaaataccccatggaaaaggttcccggagctaggatgcctgttcagatacgggtgaaactgtggttcggattgtcagtggacgagaaggagtttaatcagtttgcggagggcaagttgagcgtgtttgcggagacatacgaaaatgagactaagcttgctctggtaggaaactggggcacaactggtctcacgtacccaaaattctctgatgtgacaggtaagataaaactccctaaggacagctttcgaccaagcgcagggtggacgtgggccggcgattggttcgtatgtcccgaaaagacacttctgcatgacatggatgccggacatctgtccttcgtcgaggaggtgttcgaaaatcagacccgccttccaggtggccaatggatctatatgagtgacaattacacagatgtgaatggagaaaaggtgctgcccaaggacgacatcgaatgcccacttgggtggaagtgggaggatgaggagtggtccacagatcttaatagagcagtggatgagcagggctgggaatatagcatcaccataccccctgaacgaaaaccaaaacattgggtacctgccgaaaaaatgtattatacccaccggcgcaggaggtgggtgcgcctgcggaggagggacctatctcagatggaggcgctgaagagacaccgacaggctgaggcagagggcgaaggttgggaatacgccagcctgttcggatggaaattccatctggagtatcgcaaaacagatgcctttcgccgcaggcggtggcgaagacggatggagcccctggagaagaccgggcccgcagccgtctttgccctggagggggccctcggaggtgtgatggatgacaaatctgaggacagcatgagtgtcagcaccttgagctttggagtcaatagaccaactatctcatgtatcttcgactacggcaatagataccacctgaggtgctacatgtaccaggcaagggatctggcggcgatggacaaggatagttttagcgacccgtatgccattgtttcatttcttcatcagtcacagaaaaccgtggtagtcaaaaataccttgaacccaacatgggaccagactctcatcttttacgagatcgaaatttttggcgaacccgcgaccgtagcagagcagccccccagcattgtcgtggaactctacgaccacgacacgtacggggccgacgagtttatgggccgatgtatctgccagccatcattagaaaggatgcctaggcttgcttggtttcctttaactcggggctcccagccctctggcgaactcctggccagcttcgaactcatccagcgggagaagcctgcgatccaccacattcccggatttgaagtacaggagacgagcaggattctggatgagagcgaggatactgacctaccctacccaccaccgcaacgggaagccaacatctacatggtgccacagaatattaagccagctctgcagcgcacagcgattgagatccttgcttggggtctgcgaaatatgaaatcctaccaactggcaaacataagctccccttctttggtagttgagtgcggcggccagaccgttcagtcttgcgtcatccgaaatctccgtaagaatcccaacttcgatatttgcacactttttatggaggtgatgctacctcgggaggagctctattgtcctcctattacagtgaaggtcatcgacaataggcagtttggtagaaggccagtggtcggacagtgtacaatccggagcctggaatctttcctatgtgacccctactccgcggagtctccatcaccacagggaggtccagatgacgtttcgctgctgtcaccaggagaagacgtgctcattgacatcgacgataaagagcccctgattcctatccaggaagaagagttcatcgattggtggagtaagtttttcgcaagtattggcgaacgagagaaatgcggctcttatctcgaaaaggatttcgatacactgaaagtgtacgatactcaactcgagaacgtcgaagcatttgaggggctaagcgacttctgtaatacttttaagctgtacaggggcaagactcaagaggagaccgaggatccttcggtcataggtgagtttaaaggactttttaaaatttacccactgcctgaggaccccgccatccctatgccccccaggcaattccatcagctggccgctcaggggccgcaggaatgtctggtccgcatctatattgtcagagctttcggcctccagccaaaagatcctaatgggaagtgcgatccatacatcaagatttccatcgggaagaaatctgtgtctgatcaggacaactatatcccatgcacactggagccagtatttggcaagatgttcgagctgacctgtaccctgcctctggagaaagacctgaaaataacactctatgactatgacctgctgagcaaggatgaaaagatcggagagacggttgtagacctggagaatcggctgctctccaagttcggcgctaggtgcgggttaccacagacctattgcgtaagtggccccaaccagtggcgggaccagctgagaccatcccaattactgcatttgttctgtcagcagcacagggtcaaagctcctgtgtaccgcaccgatcgcgttatgttccaggacaaagagtattcaatcgaagaaatcgaggctggccgcattcctaatccccatcttggccctgtggaagagcggctcgccttgcatgtgctccagcagcaggggctggtgcccgaacatgtggaaagccggcccctctacagccccctccagcccgacatagagcaggggaagctgcaaatgtgggttgacctgttcccaaaagctctgggccgtcctggcccaccgtttaacattaccccccgacgcgctcgccggttcttcctccggtgtatcatctggaatacacgtgacgtgatcttggatgatttatccctgaccggagagaagatgtccgatatctatgtgaaagggtggatgatcggattcgaggaacataagcagaagactgacgtccattatcgaagtttagggggggaaggaaattttaattggcggttcatatttcccttcgactatttgccggctgaacaggtgtgtacaattgcaaagaaggacgctttttggcgtttggacaaaaccgaatcgaagattcccgcacgtgtagtctttcaaatctgggataatgataagttctccttcgacgatttccttggctcactgcagctggacctcaaccgcatgccaaagcccgccaaaactgccaaaaagtgttccctggatcagttggacgacgctttccaccctgaatggttcgtatccttattcgaacagaagactgttaaaggctggtggccttgtgttgccgaggagggcgagaaaaagattctggctgggaagttggaaatgacattggagattgtagctgaatcagagcacgaggagcgccccgcaggacagggtcgggacgaacccaacatgaatcccaaactggaggaccctaggcgccccgatacatcgttcctctggttcactagtccctacaagactatgaaatttattctgtggcggaggtttcggtgggcgatcatactgtttatcattttgttcattctcctgctatttctggctattttcatctacgcatttccaaattatgccgctatgaagctggtgaagcccttttcc

SEQ ID NO: 48094 - DNA, 6243 bp, Artificial Sequence
  derived and/or modified sequence
atgctctgctgcctcctggttcgggctagtaatctcccctccgctaagaaagaccgaaggagtgatccagttgccagtctcacctttcgaggcgtgaagaaacggacgaaggtgattaagaattccgtgaatcccgtgtggaatgagggatttgagtgggatctcaagggcattcccctggatcaaggaagtgaactccatgtcgtggtgaaggatcatgagaccatgggcagaaacaggttcttgggagaagccaaggtgccactgagggaagtgctggcaacaccctctctgagcgccagctttaatgcccctctccttgacactaagaagcagcccacaggcgcgtctctggtactccaggtgagttatactcctctccctggcgcagtccccttgttcccacccccaacccccctggagccctctcctacactgcctgacctggatgtagttgccgatactggaggcgaggaagacactgaggaccagggattgaccggggacgaggcggagccttttcttgaccagagcggcgggcccggggctcccacaacccccaggaagcttccctcaaggcctcccccccactaccccggcattaagcgaaagcggtctgccccaacttcaaggaagcttctcagtgacaagccacaggattttcagataagggtacaggtcatcgagggccggcagctgcctggcgtgaacatcaagcctgtcgtcaaggttaccgctgccggccagacaaagcgcactcgcattcataagggcaactctcccctgttcaacgagaccttgttcttcaaccttttcgattctcctggcgaactgttcgacgaaccgatattcataacagtggttgattcccggtccctccgaacagatgccctcctgggcgaatttaggatggacgtaggaactatttatcgggagcctcgccacgcctatcttcggaagtggctgctcctgtctgaccccgacgacttctccgccggggctcggggctacctgaagacatcactctgcgtgctcggccccggcgacgaagccccgctcgagcggaaggacccatcagaggacaaggaggatatagaaagtaaccttctcaggcctacaggggtggccctgaggggggcccatttctgtttgaaggtgtttagagctgaagatctgccgcagatggacgacgcggtgatggacaatgtgaaacaaatttttggtttcgaatcaaacaagaaaaatctggtggatcctttcgttgaggtcagttttgcgggcaagatgctgtgtagtaagatcctcgaaaagacagctaatccacagtggaatcaaaatattacgttgccagccatgttcccatccatgtgtgagaaaatgagaattcgcataattgattgggatcgcctcactcacaatgacattgttgctactacctatctgagcatgtccaagatctctgcaccaggaggggagatcgaagaggaacccgcgggcgccgtgaaaccatcaaaagcaagcgaccttgacgattatctgggctttttgcccactttcggaccttgttacatcaacttgtatgggtcccctcgggagttcaccggattccctgatccatacactgagttgaacactgggaaaggggaaggagtggcatataggggtcggctgctcctgtctctggaaacaaagctggtggaacactccgaacaaaaagtagaggacctccccgcagacgacattctgagagtggaaaagtacctcaggagaagaaagtacagcttgtttgccgccttctactcagctaccatgctgcaggacgttgacgatgctatccaattcgaggtgtcaataggaaactatggaaacaagtttgacatgacatgcctgccgcttgccagtacaactcaatactcccgagctgttttcgatggctgtcattactactatctcccctggggtaacgtaaagccagtggtagtccttagctcatactgggaggacatctctcacagaatcgagactcaaaaccagctcctggggatagccgacaggctggaggctgggttggagcaggtccacctggctctgaaggcacaatgtagcactgaagacgtggacagcttggtagcacaactgacggatgagctgattgccgggtgttctcagcccctgggcgacattcatgaaaccccctccgcaactcacttggaccaatacctgtatcagctccgcacgcatcacctttcccagatcaccgaggcagctctggctttgaaactgggccacagcgaattgcccgccgccctcgagcaggcagaggactggctgctgaggctgagagccctcgccgaggaacctcagaactcactccccgatatagtgatatggatgctccagggcgataaaagggtcgcttatcagagagtccccgctcaccaggtgctgttttccaggcgcggcgcaaactactgcgggaagaattgcggcaaactccagacaatcttcctcaaatatcctatggagaaggtgccgggagccaggatgccagtgcagattagggtgaagctttggttcggactgtccgtggacgagaaagagtttaatcagttcgcggaaggtaaactctccgtctttgccgaaacctacgagaatgagacaaagttggcactggttggtaactggggaactacaggcttgacctatcccaagttttcagacgtgacgggaaagatcaagctgccaaaagattcattcagacccagtgccggttggacatgggcaggtgactggtttgtatgcccggaaaagacgttgttgcacgatatggatgcgggtcaccttagctttgtggaggaagtctttgagaaccagacaagactgcctggcggccaatggatttatatgagcgacaactacacagacgtgaacggagaaaaagtactgcctaaggacgacatcgagtgtcccttgggctggaaatgggaagacgaggagtggtctactgatcttaacagggcagttgacgaacaagggtgggaatactctataaccatcccacccgagcggaagcctaagcactgggtgcctgccgagaagatgtattatacgcacaggagacgccgctgggtccgattgagacggagagacctgagtcagatggaggctctgaagcggcacaggcaggctgaggccgaaggtgagggatgggagtacgcgagtctgtttggatggaaatttcacctggagtacaggaagaccgacgcgtttcgaaggcgccgctggaggcgccggatggagcccttggaaaaaacaggacccgccgctgtcttcgcgctggaaggtgcgctgggaggagtgatggacgataagagtgaagactccatgtctgttagtaccctgagcttcggcgtaaacaggccaacaatttcctgcatcttcgactacggcaataggtatcatctgaggtgttacatgtaccaggcacgggatctggctgctatggacaaggactctttcagtgacccttacgcaatcgttagctttcttcatcagtctcagaagacagtcgtcgtgaaaaacacgctcaaccccacttgggatcaaacattgattttttatgaaattgagatctttggagagccagccactgtcgcagaacagcctccttctatcgtagtggaattgtatgaccatgacacctatggggccgacgaatttatgggccgctgcatctgtcagccatcactggagcggatgcctagattggcctggtttccgcttacacgcggttcccagccttccggcgagcttctggcctccttcgaactgatccaaagggagaagccggcaattcaccacatcccgggcttcgaagtgcaagaaacgtctaggattctggacgaaagcgaggatacagaccttccatatcccccccctcagcgagaggccaacatctacatggtgccccagaatataaagcctgcactccagcggactgcaatcgagattctcgcttgggggctgaggaatatgaaatcttaccagttggcaaatatctcttcccccagcttggtcgtcgaatgcggaggtcagaccgttcagagttgtgtaattagaaatcttaggaaaaacccgaacttcgacatctgcactctttttatggaggtgatgttgcctagagaagagttgtattgtccaccaataacggttaaagtaattgacaacagacagtttggtaggaggcccgtggtgggccagtgtactatacgcagtcttgaatctttcctctgtgacccctacagtgccgagagtccatctccacagggcggcccggatgacgtcagtttgctgtccccgggggaggatgtgctgatcgacattgatgataaggagccactgatacccattcaggaagaggagttcattgattggtggtctaaattcttcgcttctattggagagagagaaaaatgcggttcttacctggagaaagactttgatacattgaaggtctacgacacacagctcgagaacgttgaggcttttgaaggccttagtgacttctgcaacactttcaaactgtaccgggggaagacacaagaagaaaccgaagatcctagtgtcataggcgagtttaaaggcttgttcaagatctacccacttcctgaggacccggccatccctatgcctcctagacagtttcaccaactcgccgcccagggcccacaagagtgtctggttcggatttacatcgtcagggcctttggattgcagcccaaggaccccaatggtaagtgcgatccgtacattaaaatatctataggaaagaaatcagtgagcgatcaggacaactacataccctgcacgttggagccagtcttcgggaagatgttcgaactgacttgcaccctgccactggaaaaagaccttaaaatcactctctacgattacgacctgctctcaaaagacgagaagattggcgagaccgtggtcgatcttgaaaatcgccttctctccaagtttggcgctagatgcggtctgccgcaaacgtactgcgtgtccgggcccaatcagtggagagaccagctgagaccatcacagctgttgcacctgttttgccagcagcatcgcgtgaaagctcccgtataccgcaccgacagagtaatgttccaggataaagaatacagcatcgaggaaatcgaggcaggacggattcccaacccacatctgggtccagtagaggagagattggctcttcatgtcctgcagcagcagggactcgtgccggaacacgtggaatccaggccgctgtacagcccgttgcagcctgatatagaacaaggaaaattgcaaatgtgggtggacctgttccccaaagccttgggacggcccggacctcctttcaacatcacaccacggcgagctcggaggttttttctgcggtgcatcatctggaatacacgagatgtgatcctcgacgacctgagtttgactggcgaaaagatgagcgacatctatgtaaagggatggatgattggttttgaggaacacaagcagaagacagacgtgcactatagaagtcttggtggcgaaggaaacttcaattggcgattcatatttccattcgattacttgccagccgaacaggtatgtacaatagccaaaaaggatgcattctggcggctggataaaacagagagtaaaatccctgcacgggtcgtattccagatttgggacaacgacaaattcagttttgacgatttccttggcagtctgcagctcgatttgaaccgaatgcctaagcctgctaagacagcaaaaaagtgttctttggatcagttggatgatgcctttcaccccgagtggttcgtgagcctttttgagcagaagaccgtgaagggttggtggccttgtgtcgcagaagaaggcgagaagaagatcctcgctggcaaattggagatgactttggaaatcgtggccgagtcagagcacgaggagcgacccgccggtcaagggcgcgatgaacctaatatgaatccaaaactggaagaccccaggcgacctgatacaagcttcctgtggttcacttccccctacaagaccatgaaattcattctctggcgccgattccggtgggcaatcatcctgtttatcatcctgttcatcctgcttttgttcctggccatcttcatctacgccttcccgaactacgccgccatgaaactcgtgaagcccttttcc

SEQ ID NO: 48095 - DNA, 6243 bp, Artificial Sequence
  derived and/or modified sequence
atgttatgctgcctgctcgtgcgggcaagcaatctgccgtctgccaagaaggatcgccggtcggacccagttgccagcttgaccttccggggcgttaagaagcgaacgaaagtaataaagaacagtgtgaacccggtgtggaatgaaggattcgaatgggatcttaagggaattcccctggatcagggatcggagctccacgtggtggtgaaagatcacgagactatggggaggaaccgattcttaggcgaagccaaggtccccctacgcgaggtcctagcgactcccagcctctctgctagcttcaatgcgcctctcctcgataccaagaagcagccaactggtgccagccttgttttgcaggtgtcttatactccccttcccggtgcagtccctctgttccccccgcctacgccactggaaccttcccctaccctacctgatctggatgtcgtggctgataccggaggggaggaagacactgaagaccagggactgacaggagacgaggcagaaccttttctggaccagtccgggggacccggagcccctacgacccctaggaagctcccatcccggccccccccccactaccctggcatcaaacgaaaacggagcgcaccaacaagccgcaagctgctgtccgataaaccacaggacttccagattcgggttcaggtgatagagggtcgtcagcttcctggagtaaatatcaaacccgttgtcaaagtgaccgccgcggggcaaactaagagaacacgtatccacaagggcaattctcctttatttaatgaaacccttttctttaacctgttcgattccccaggggagctgtttgacgaaccgatctttattactgttgtcgatagccggtcactgcggacagacgcattactgggggagtttcgcatggacgtgggcaccatctaccgcgagccgcggcacgcctatctgcgaaaatggctcctcttgagtgatcctgacgacttcagcgccggtgctaggggttacttaaagacttctttgtgcgttctgggcccaggagatgaggctcccctggagcggaaggaccccagcgaagacaaggaagacattgagagtaacctcctgcgacctacaggggtcgcattgagaggtgctcacttttgcctgaaagtttttagagccgaggaccttccccagatggatgacgcggtgatggacaacgttaagcagatcttcggattcgagagtaataaaaagaacctcgtcgatccattcgttgaggtttcctttgccggcaagatgttatgctccaaaatattggaaaagaccgctaatccccagtggaaccagaacataaccctcccagctatgtttccctctatgtgcgaaaaaatgcgcatcaggattatagattgggaccggctgacgcacaatgacatcgttgccacaacttatctgtcaatgtccaaaatcagcgcccctggaggcgagatcgaagaggaacctgcgggcgcagtgaaaccatcaaaagcttccgacctagacgactacttagggttcctacctacatttggaccttgctacatcaacctgtacggctcgccacgagaattcacgggattcccagacccgtacacagaacttaatacgggcaagggagaaggagttgcttatcgaggccggctgctgctatctcttgaaaccaagcttgtggagcattcggaacagaaagttgaagacctgcctgcggacgatattctgagggtggagaaatacttgagacgccggaagtactctttgttcgccgcgttttattctgcgacaatgctgcaagacgttgacgatgccatccagtttgaagtttctatagggaactatggcaataaattcgatatgacttgtttgcccctcgcttcaactactcagtattctcgggctgtattcgatggttgccattactactacttgccatggggaaacgtgaaacctgtggtggtgttgtcaagctactgggaggatatctctcacagaattgagacccagaatcaactgctgggcatcgccgaccgactggaggcaggtctggagcaggtgcatttagctttgaaagcgcagtgctcaactgaagatgtggattcactggtggctcagttgacggatgaattaattgccgggtgcagccagccactcggagatattcatgagacaccaagcgccacccacttggaccaatacctgtatcagctgcgaacccatcacctcagccagatcaccgaggccgcacttgctttgaagctgggacacagcgaacttcccgcagcactggaacaggccgaggattggctgctgcggctccgagccctcgcagaagagccccagaattctctgccagacattgtgatctggatgttgcagggtgataaaagagtggcatatcagcgcgtgcccgctcaccaggtcctcttctccagaagaggtgcgaactactgtgggaagaattgtggtaaactccagaccatatttctgaagtaccctatggagaaagtgcctggggcccgtatgccagttcagatccgcgtcaagctctggttcgggctctccgtggatgaaaaggaattcaatcagttcgcagaggggaagttgtccgtcttcgccgagacctacgaaaacgaaactaagctcgcactggtggggaattggggcacaacaggcctgacctatcccaagttcagcgacgttactggtaagatcaaactcccgaaggattcttttcggcctagtgccggttggacatgggccggggactggttcgtttgccccgagaaaacattactgcatgatatggatgcgggccacttatcattcgtggaagaagtattcgagaaccagactcggctgcccggaggtcaatggatatatatgtccgacaattataccgacgtaaatggtgaaaaggtgttgcctaaggacgacatagagtgtcctctgggctggaagtgggaggatgaggagtggagcacagacctcaatagagccgtggacgaacaaggctgggagtactctatcaccataccacctgaaaggaaacccaagcattgggtgcctgcagagaagatgtactacactcatagacggcgtagatgggtgagacttcggagaagggatctatcacagatggaagcgctgaagaggcatcgacaggcagaagctgagggtgagggctgggagtatgcctccctattcggttggaagttccatctggagtaccggaagactgacgcttttcgaagacggcggtggcggcgccggatggaaccacttgaaaaaactgggccagccgctgtcttcgctttggagggagccctgggtggggttatggatgacaagtcagaagacagcatgagcgtctcaaccttgagtttcggggtgaataggccgactattagctgcatttttgactatggaaaccgataccatctgaggtgttacatgtatcaagctagagatttggcagccatggataaggattcttttagtgacccatatgcaatcgtgtcattcctgcaccaatcccaaaagaccgtggtggtgaaaaatacccttaatccaacctgggatcaaaccctgattttctacgagatcgaaatcttcggtgaacctgccaccgtggccgagcagcctccttcaattgttgtggagctgtatgatcacgacacttatggcgcagacgaatttatgggccggtgcatctgccagccatctcttgagcgtatgccacgtctggcgtggttccccctgactaggggatcccagcccagcggagagctgctggcctctttcgagctgatccaaagagagaaaccagcgatccaccacattcctggcttcgaggtccaagaaacttctcgaatcctggacgagagcgaggatacagacctgccatatccacccccacaaagagaggccaatatctatatggttccacagaatatcaagcctgctctacagaggaccgcgatcgaaattctcgcctggggactgcggaacatgaagtcttatcagctggccaatatcagcagtccaagtttggtggttgagtgtggcggccaaaccgtgcagagctgcgtgatccgaaacctcaggaagaaccccaactttgatatctgcacccttttcatggaggtgatgttaccaagggaggagctgtactgtcccccaatcacagtcaaggtcatcgacaaccgacagtttggaagaaggccggtcgtgggccagtgtactatcaggtcactggaaagcttcttgtgtgatccttacagcgcagagtcacctagccctcagggcggtcccgatgatgtttcactgctctctcccggggaagacgtcctaattgatattgatgacaaagagcccctcattcctatccaagaggaggagttcatcgattggtggagcaaattcttcgcctccattggtgagcgggaaaagtgcggtagctatctcgagaaggattttgacaccctgaaggtatacgatacacagttagagaacgttgaagcctttgagggtctctccgacttttgcaatacgttcaagctgtatcggggcaagacccaggaggaaaccgaggacccttcggtgataggggaatttaaaggtctatttaagatttacccgctgccagaggaccccgcaatccctatgccaccaagacagttccatcagctggcggcccagggacctcaggagtgcctggtgaggatatatattgtgcgggctttcggactgcagccgaaggatcctaatggtaagtgtgatccctatatcaagatctccattggaaaaaaatccgtcagtgaccaagataactatatcccgtgcaccctagagcccgtgtttggcaagatgttcgagctcacctgcacactgccgctggaaaaagaccttaaaattactttgtatgattacgacttgctgtctaaagatgaaaagataggagagaccgtggtggacctggaaaatcgccttctgtctaagttcggagcccgctgtggactcccacaaacatattgtgtgtccggccctaaccaatggagagaccagttgaggcccagtcaactcctgcacctgttttgtcagcagcaccgtgtcaaggctccggtgtatcggacagatagagttatgttccaggacaaagagtactccattgaagagattgaagccggcagaatcccaaatcctcacctgggcccggtagaagagcggcttgctttacatgtactgcagcagcagggactcgttccagaacacgtggagagcagacccctgtacagccctctgcaacccgacattgaacaggggaagctccagatgtgggtagatttatttccaaaagcactcggaaggccaggaccaccctttaacatcactccacgtcgggcccgccgtttcttcctgcgctgtatcatatggaacacgagagacgtgatcctagacgacctctccttaaccggagagaagatgtccgatatctacgttaaaggatggatgatcggcttcgaagaacacaagcagaagactgacgtgcactatcgctctctggggggcgaaggcaattttaactggcgcttcatctttcccttcgattacctaccggccgagcaggtgtgcacaattgcgaaaaaagacgctttttggagactggacaaaacggaaagcaagattcccgcgcgagtcgttttccagatctgggataacgacaaattcagcttcgatgatttccttgggtccctgcagctggatctgaatcgtatgccgaaaccggccaagacagctaagaaatgtagcctggatcaactggacgacgcctttcatccggaatggttcgtttcgttgttcgaacagaaaaccgtgaagggctggtggccctgtgtggcagaggaaggcgaaaagaaaatactggctgggaagctggaaatgacgctggagattgtggctgaatcagagcacgaggaacgacccgcaggccaaggtcgagacgagccaaacatgaacccaaaactcgaggaccctcggaggcccgacacaagcttcctgtggtttacaagcccctataaaaccatgaaatttatcctgtggcgccgattcagatgggccataatcctgttcatcattctcttcatcctgctactgtttttggccatcttcatctacgcgtttccaaactacgctgcgatgaagcttgtcaaaccctttagc

SEQ ID NO: 48096 - DNA, 6243 bp, Artificial Sequence
  derived and/or modified sequence
atgctctgctgcctgctggtgcgggcctcaaatctcccttctgcaaagaaggatcggcggtcagaccctgtggcctccctcaccttccgcggtgtcaagaagcgcaccaaggtgatcaaaaactcagtgaaccccgtttggaatgaaggctttgagtgggacctgaaaggcatcccgctggatcagggctcggaattgcacgtggtggtcaaggaccacgagacgatgggacggaacagatttctgggcgaagcgaaagtgccactgcgcgaggtgctcgccactccatccctgtcagcatccttcaacgcgcctctgctggacactaagaagcagccgactggagcttcgctggtgctccaggtgtcctacacgccattgcctggagcagtcccactctttcccccgcctacccctctggaaccatcgccaaccctgccggatctggatgttgtggccgataccggtggagaggaagataccgaggaccagggcctgaccggagatgaagccgagccgttcctcgatcagtccggcgggccaggcgccccgactactccgcgcaagctccctagccggcctccgccgcactacccgggaataaagcgcaagagatcagccccgacctcccgcaagctcctctcggacaaaccgcaggacttccaaatccgcgtgcaggtgatagaaggtcgacaactcccaggagtgaatatcaagccagtagtgaaggtcacggctgccggacaaaccaaacgcactagaatccacaagggtaactccccgctcttcaacgaaaccctgtttttcaatctgtttgacagcccgggggaattgttcgacgagccgattttcataactgtcgtcgactcgcggtccctgcgcactgacgccctgctcggagaatttcggatggatgtaggaaccatctaccgggaaccgcgccacgcctacctccggaaatggctcctgctgtccgatcctgatgacttctccgcgggagccagagggtatcttaagacctctctctgcgtgctgggacccggcgacgaggcgccactggaaaggaaagatccatcggaagataaggaagatatcgaatcaaatctgcttcggccgaccggcgtggcgctcagaggagcccacttctgcctgaaggtgtttagggccgaggacctcccacagatggacgacgccgtcatggacaatgtgaaacagatttttgggttcgagtctaacaagaagaatctggtggatcctttcgtggaagtgagcttcgccggaaagatgctgtgctcgaagattctggaaaagacggccaacccgcagtggaaccagaacatcaccctgccggcaatgttcccttcgatgtgtgagaagatgcgcatccgcatcattgattgggaccggctgactcataacgacatcgtggcgaccacgtacctgtccatgtcgaagatctcagctccgggaggagaaatcgaggaggagccggcaggagctgtcaagccttcaaaagcctcggacctcgatgattacttgggttttctgccgacttttgggccttgttacatcaatctgtacgggagcccgcgggaatttaccgggttccccgacccgtacaccgaactcaatactgggaagggggagggagtcgcgtacaggggtcgcctgctgctgtcacttgagactaagctggtggagcattcggagcagaaggtcgaagatcttccggcagatgacatcttgcgtgtcgagaagtacctgagacggcgcaagtactcgctgttcgcagccttttactcggccactatgctgcaggacgtcgacgacgcgatccagttcgaagtgtcaatcggaaactacggaaacaagttcgacatgacctgcctcccactcgcatccaccacccagtactcccgcgccgtgttcgacggatgccattactactatctgccctggggaaatgtcaagccggtggtggtgctgtcatcatactgggaggatatctcacatcggatcgaaacccagaaccagctgctgggaatcgccgatcgcttggaagccggcctggagcaagtgcacctggcgctgaaagctcagtgttcaactgaagatgtggacagcttggtcgcgcagctcaccgatgaacttatagcagggtgttcgcagccgctgggagacatccacgagactccatcggccactcatctggaccaatatctctatcagcttcgcacccaccatctctcccagattaccgaagccgcgctcgcgctgaaactgggacactcggagctgcccgcagcgctcgagcaagccgaggattggctgttgcgcctgagggccctcgccgaagaaccacaaaattcgctgccggatatcgtcatctggatgctgcaaggtgataagcgtgtcgcgtaccagcgggtcccagcccatcaggtgctgttttcaagacgaggggcaaattactgtggcaagaactgcggaaaattgcagaccatcttcctgaagtacccgatggaaaaggtccccggcgcacggatgccggtgcagatccgggtcaagctgtggttcggcctgtccgtggacgagaaggaattcaatcagttcgctgaagggaaactgtcagtctttgcggaaacttacgaaaatgagacgaaactggcgctggttggcaactggggtactaccggactcacgtaccctaagttctcagacgttactggaaaaatcaaactgcccaaggactccttccggccctcggccggttggacttgggcaggggactggtttgtctgcccagagaaaaccctgttgcatgatatggatgcaggacacttgtcgttcgtggaagaagtctttgagaaccagaccaggcttccgggcggacagtggatctacatgtctgacaactacaccgacgtgaatggcgagaaggtcctgcccaaggatgacattgaatgcccgctcggctggaaatgggaggacgaagaatggtcaactgacctgaaccgggctgtcgacgagcagggatgggaatatagtattaccattccaccggaacgcaaaccgaaacactgggtgccagccgagaagatgtactacactcatcggcggcgccggtgggtgcgcctcagacggagggacctgagccagatggaagcacttaagcggcatcggcaggcggaggccgagggagagggttgggaatacgcgtcgctgttcggatggaagttccacctggaataccgcaagactgacgcgttcagacgccgccggtggcgcagacggatggaacccctcgaaaagaccggccccgctgccgtctttgccttggagggtgccctgggaggagtgatggatgacaaatcggaggactcgatgtccgtctctaccctgtcgttcggcgtgaacagaccaaccatctcatgcatctttgactacggtaaccggtaccaccttcggtgctacatgtaccaggcacgcgatctcgccgcgatggataaggatagcttcagcgatccgtacgcaatcgtgtccttcttgcatcagtcacagaaaactgtcgtggtcaagaacactctgaatccaacgtgggaccagactctgatcttttacgagatcgaaatctttggtgaacccgccactgtggcggaacaaccaccaagcatcgtcgtcgaactctatgaccacgacacctacggtgcggatgagtttatgggcagatgtatctgccaaccgtcgctcgaacgaatgccgagattggcctggttcccgctgacccggggatcacaaccgtcgggcgaattgctcgcctcgttcgaattgatccaacgggaaaagccagcgattcaccacatcccgggattcgaggtgcaagaaacttcgagaatcctcgatgaatccgaagataccgacctcccgtaccctccaccgcagcgggaggctaacatctatatggttccgcagaacatcaaaccagcgctccaaaggactgccatcgaaatcctggcttggggcctccggaatatgaagagctaccaactcgcaaacatctcctcgccttctctcgtggtggagtgcggaggccagaccgtgcaatcgtgcgtgatcaggaacctgcggaaaaatcctaacttcgacatctgcaccctgttcatggaagtcatgcttcctagggaggagctctactgccccccgatcacggtgaaggtgatcgacaacaggcaattcgggcggcggccggtggtgggtcaatgcacgatcagatccctggagtccttcctgtgcgacccatactccgccgagtccccgtccccacaaggcggccctgacgacgtgtcactgctgtcccccggggaggatgtgctgattgacatcgatgacaaagagccactgatcccgatccaggaagaagaattcatagattggtggtccaaattcttcgcgagcatcggagaaagagagaagtgcggatcgtatctggaaaaagactttgacaccctgaaggtgtacgatacccagctggagaacgtggaagcattcgagggcctgtcggatttctgcaatacctttaagctgtaccgcggaaagactcaagaggaaaccgaagatccgtccgtcatcggagaattcaaggggcttttcaagatttacccactccctgaggacccagccatcccgatgccaccaaggcagttccatcaactggccgcgcaaggaccgcaggagtgtctggtgagaatctacatcgtgagggccttcggactgcagccaaaggacccaaacggaaaatgtgacccctacattaagatctcaattggcaagaagagtgtttcagaccaggacaactacatcccatgcactctggagccggtgttcggcaagatgttcgaactgacttgcaccctgcccctggaaaaagatttgaagatcaccttgtacgactatgatctgctgtcaaaggatgagaaaatcggagagactgtggtggaccttgagaacagactcctgtcgaagtttggagcgagatgcggcctgccgcagacgtactgcgtgagcggaccaaaccagtggcgcgatcaactcagaccatcgcaactgcttcatctcttttgtcaacagcacagagtgaaggcgcccgtgtaccgcaccgatcgggtgatgtttcaggacaaggagtactcaatagaggaaatcgaagccgggagaattcctaacccccacctcggaccggttgaagaacggcttgcgcttcatgtgctgcaacagcaaggactcgtgccggaacacgtggagtcacgtccgctgtacagcccgctgcaaccagatatcgaacaaggcaagctgcaaatgtgggtggacctctttccaaaggcgctgggtcgcccaggcccacctttcaacatcactccgcggagggcgagaagattctttctcaggtgcatcatctggaatacccgggatgtcatcctcgacgatctttcactgacgggagagaaaatgtccgacatctacgtcaaaggatggatgattgggtttgaggagcacaaacaaaaaactgacgtgcactacagatcgttgggaggagaaggtaatttcaactggagattcatctttccattcgactacctgcctgcggaacaggtgtgcaccatcgcaaaaaaggatgcgttctggagactcgacaagactgaaagcaaaatcccggcacgcgtcgtgttccagatttgggacaatgacaagttctccttcgatgacttccttggttcgctgcaactggaccttaaccggatgccgaagccagccaagactgctaagaaatgctcgttggaccagcttgatgatgcattccatcctgaatggttcgtctccctcttcgaacagaaaacggtcaaggggtggtggccttgtgtcgccgaagaaggagaaaagaagatcctcgcgggaaagctcgagatgactctggaaatagtcgccgaatcggaacatgaggagcgacccgccggtcagggccgggatgagcctaacatgaacccgaaactggaagatccgcgtcgcccggacacctccttcctctggttcacttccccgtacaagactatgaagttcatcctgtggcggcggtttcggtgggcgattatcctcttcattatcctgttcatcctccttctcttcctcgccatcttcatctacgccttcccgaactacgccgccatgaaactggtgaagcctttctct

SEQ ID NO: 48097 - DNA, 6243 bp, Artificial Sequence
  derived and/or modified sequence
atgctgtgctgcctactggtgcgcgctagtaatctgcccagcgcaaagaaagaccgacggagtgacccagtggccagcctgacattccgtggggtgaagaagagaaccaaagttataaagaacagcgtcaaccccgtgtggaatgagggtttcgagtgggatctcaaagggatcccgctagaccaagggtccgaacttcacgtggtggtgaaagaccatgaaactatgggcagaaaccggttcctgggagaagcaaaggtcccacttcgcgaggtgctggccaccccatccctctcagcatcttttaatgcccctctgttggacaccaaaaaacagccaaccggggcatctctggtcctgcaagtgtcttacactccactccccggcgcagtgcccctcttccctccacctacccccctcgaacccagccccacgctaccagacttggacgtagtggccgacaccgggggcgaggaagacaccgaggatcagggcttgaccggcgacgaagccgagccctttctagatcagagcggaggccccggagccccaactacgcccaggaaactcccgtcacggccgcccccccactatccaggcatcaaaagaaagcggagtgcccccaccagccgcaagctgttgtccgataagccccaggatttccagattagggtgcaggtcattgaaggcaggcaactcccaggagtgaacatcaaaccagtggttaaggtgacagcagccgggcagaccaaaaggacgagaatacataagggaaattcaccgctctttaatgaaacactcttctttaacctgttcgacagtccgggggaattgttcgacgagcccatctttatcaccgtcgtcgatagcaggtcacttcgaactgatgcgctgttaggagaatttcggatggacgtgggcacgatctatagagagccccgccatgcatatctcaggaagtggcttctcctctctgaccccgacgattttagtgcaggtgcacgggggtacctaaaaacctctttgtgcgttctgggccctggagacgaagcccccctggagcgcaaggaccctagtgaggacaaggaggacattgaatccaatctcttgagacccactggtgtcgccctacgcggggcacacttctgcctaaaggtctttagagcggaagatctgccccagatggatgacgcagtcatggacaatgtcaaacagatcttcgggtttgaatccaataagaaaaatttagtggatccctttgtggaagtctccttcgctgggaagatgctctgtagcaagattctagagaagacagccaatccacagtggaaccaaaatattaccttgccggcaatgttcccttccatgtgcgaaaaaatgcggattcgaataatcgactgggacagactgacccataacgatatcgtcgcgaccacttacctgtctatgtccaaaatatctgcccctggcggcgagatcgaggaggagccggccggcgcggtgaagcctagtaaggctagtgatttagatgactacttgggctttctgcccacgttcgggccctgctacatcaatctttacggttctcctagggagttcacgggatttccagacccgtacacagaactgaacaccgggaaaggggaaggcgtggcctatcgagggagattgctgttgtctctggagaccaaattagtggaacatagcgagcaaaaggtcgaagatttaccagcagatgacatcctgagggtagagaaatacctgagacgaagaaaatattcactgttcgcagcgttctactcggcaacaatgctacaggacgtcgatgatgcaattcagtttgaggttagcattggaaattacggtaataagttcgacatgacatgcctgcccctggcctcaacgacacagtatagcagggccgtatttgatggctgtcactactactatctgccatgggggaatgttaagcccgtggtggtgctgtctagttattgggaagatataagtcatcggatagagacacagaatcagctcctggggatcgccgatcgactggaagccggcctggaacaagtccacctcgcgttaaaggctcagtgctcaactgaggacgtggactccctggttgcacagctgactgatgagttgatagccggctgcagccagcccttaggcgatatccacgaaactccatctgctacccacctggaccagtatctgtatcagctgaggactcatcacctgtcccagatcacggaggcagccttagctctaaagttgggtcattctgaactcccggccgccctggaacaggccgaggattggctgctaagactgcgcgctctagctgaagagcctcagaactcgctgcccgatattgtcatctggatgctgcagggggataaaagggttgcataccagcgcgtgcctgcccaccaggtgctgtttagtagacgtggagctaattactgtggaaaaaactgcgggaagctgcagaccatcttcctgaaataccctatggaaaaagtcccgggtgcacgcatgcccgtgcagatccgcgtaaagctttggttcgggctgagtgttgatgagaaggagtttaaccagttcgcagaggggaagctgagcgtctttgccgagacatatgagaacgaaacaaaactggccttggtcggaaattggggaaccaccggcctaacatatcctaaattctccgacgtgacgggaaagatcaagctgcctaaagactcctttcggccctctgccggctggacatgggccggcgactggtttgtttgcccagaaaagaccctgctgcacgatatggacgcaggccacctttcctttgtggaagaggtctttgaaaatcaaactagactgcccggcgggcagtggatttacatgagtgataactacacagacgtcaacggcgagaaggtactaccaaaagatgatattgagtgtcccttgggatggaagtgggaggatgaagaatggtcaaccgacctgaaccgggcggttgatgagcaaggctgggaatatagtattaccatccccccggaacggaagcctaagcactgggtacccgctgagaagatgtactacacacacaggcgacgccgatgggtgaggctgaggaggagggatctctcccaaatggaggctctcaaacggcacaggcaggccgaggccgagggagagggctgggagtatgcaagcctgttcggctggaaattccacctggaataccgtaaaacagacgcattcaggagaaggcgctggaggcgtcgcatggaacctttagagaagacagggcccgcagccgtgtttgcactggagggagccctgggcggagtcatggatgataaatcagaggattctatgagtgtctcaaccctgtcatttggcgtaaaccgccccactatcagctgcatcttcgactatggtaaccgttaccatctgcgatgttacatgtaccaggctagagatctcgctgcaatggataaagatagcttctccgacccctacgcaatcgtgagttttctgcaccaatcccagaagacggtggtcgtgaagaatacactcaacccaacctgggaccaaactctcatattttacgaaatcgagattttcggagagcccgcgacagttgccgagcagccgccatccatcgtagtggagttgtatgaccatgacacctatggagccgatgagttcatgggccggtgcatctgccaaccatcattagaacgaatgccacgactggcttggttccccctcactcggggttcacagccttccggcgagctgctcgcctcttttgagctaatccagcgggagaaaccagccatccaccatattccgggattcgaagtgcaggaaaccagtcgaatcctggacgagtccgaagataccgatctgccttaccccccccctcagagagaggctaacatctatatggtgccgcagaacataaaaccagcgctacagcgtaccgcaattgagatactggcctggggtctgagaaatatgaagtcctatcaattggccaacatcagttccccaagtctggtggtggagtgtggggggcagacagttcaatcctgtgttattcggaacctgcgtaaaaacccaaatttcgatatatgtacactcttcatggaggtcatgctgcctcgagaggaactttattgtcccccaatcacggtcaaagtgattgataatcgccagtttggacgcagacccgtggtgggccagtgcacaatccggtcactagaatcattcctgtgcgacccttattccgcagaatcaccctcaccacaagggggtcctgacgacgtttctctgctctcccctggcgaagacgtgctgattgacattgacgacaaggaaccattgattcctattcaggaggaggaatttattgattggtggtccaagttcttcgcgtccatcggcgagagagagaagtgtgggagttatctggagaaagactttgataccctaaaggtgtacgatacacagcttgagaacgtggaagctttcgagggactgagtgatttctgtaatacattcaaattgtatcgaggcaaaacccaggaagagacagaggatcctagtgtgattggggaattcaaaggcctgttcaagatctaccctctacctgaggatcctgctattcccatgccccctcgccagtttcatcagctggccgcccagggtcctcaggagtgtctcgtccggatctacattgtacgggcattcgggctgcagccaaaggacccgaatgggaaatgcgacccctatatcaagattagtatcgggaaaaaaagcgtgtccgaccaggacaactatatcccatgcaccttggaaccagtgttcggcaaaatgttcgaactgacctgcacactcccccttgaaaaagatcttaaaatcacactttatgactacgacctgctctctaaggacgagaagataggcgagaccgtagtcgatctggaaaaccggcttttatctaagtttggtgctaggtgtggtttaccccagacctactgcgtttccgggccaaatcagtggcgcgatcaactcagaccctcccaactcctccacctgttctgccagcagcaccgagtgaaagcccccgtctacagaactgaccgcgtcatgttccaggataaggaatacagcatcgaggagatcgaagctggaagaatccctaacccccacctcggtcccgtggaggagcgcctcgctcttcacgtgctacagcagcagggcctggtgcccgaacacgtggagagcagaccactatactcaccactacaacccgatatagagcagggcaagttgcagatgtgggtggacttgttccccaaggctctggggaggcctggtcccccatttaatataacgcctcgtagagctagacggttcttccttcgttgtatcatctggaacaccagggacgtgatcctggatgatcttagcctgaccggggagaagatgagcgatatctatgtaaagggctggatgatcggattcgaagagcacaaacagaagaccgatgttcattaccgctctcttggtggggagggaaacttcaactggcgttttatttttccgttcgattatcttcccgcagaacaggtgtgtactattgccaaaaaagacgccttctggaggctcgataaaaccgaaagcaaaatccctgcccgggtggtgttccagatctgggacaacgataagtttagtttcgacgattttttgggcagcttgcagctggatctgaacagaatgcccaagccagcaaaaaccgcaaaaaaatgtagccttgaccagctggacgacgcattccatccagagtggtttgtgtcgctgttcgagcagaagaccgtgaagggatggtggccttgcgttgccgaggaaggtgaaaaaaagatactggccggaaaactggagatgacactggagatagtggctgaaagtgagcacgaagagcggcctgctggacagggacgggatgaacccaatatgaatccaaagttggaagatcctaggagaccggacactagtttcctgtggtttacgtcgccttacaagaccatgaagttcatcctgtggaggagattcaggtgggctattattctattcataattcttttcatcctcctgcttttcctggccattttcatttatgcctttccaaactacgcagcgatgaagctggtgaagcctttctcc

SEQ ID NO: 48098 - DNA, 6243 bp, Artificial Sequence
  derived and/or modified sequence
atgctgtgctgcctgctggtccgggcttcaaacttgccatccgcgaaaaaggaccggagatccgaccccgtggcgagcctgactttccggggggtgaagaaacggaccaaggtgatcaagaactccgtgaatccggtgtggaacgaaggattcgagtgggacctcaaaggaattccgctcgatcaaggctcagagctgcacgtggtggtcaaggaccatgaaaccatgggacgcaaccggtttctgggagaagccaaggtgcctctgagggaagtacttgcgaccccctccctgtcggcctctttcaacgccccgctcctggataccaagaagcaaccaacgggggcatcgctggttctgcaggtgtcatacacccccctgccgggggctgtcccgctctttccgcccccgaccccacttgaaccctcgccgacgcttccggacctggatgtggtggctgacactggaggtgaggaggacaccgaagatcagggcctgaccggagatgaggcagaaccctttttggaccagtccggtggaccgggcgctccgaccaccccgcggaagctgccgtcgaggccaccaccccactacccaggtatcaaaaggaagagatcggcacctacgtcacgcaaactcctgtccgataagccgcaagattttcagatccgcgtgcaggtcatcgagggacgacagctgccgggcgtgaacatcaagccagtggtgaaggtcaccgccgcagggcagaccaaacgcactcggatccacaagggaaatagccccctgttcaatgaaaccctgttcttcaatctcttcgattcacctggagaactgttcgacgaacccatcttcatcactgtcgttgattcccgttccctgcgcactgacgcactgctcggagaatttcgcatggatgtgggaaccatctacagagagccgaggcacgcatacctccgcaaatggcttctgctttcggacccagatgatttctccgcaggagcccgtggatacctgaaaacttcgctgtgcgtgctgggccctggagatgaagccccattggaacggaaagatccttcagaggacaaggaggacatcgaatccaacctcctcaggcctactggagtggcgctgagaggagctcacttttgtctcaaggttttcagagcggaagatctcccacaaatggacgacgccgtgatggataacgttaaacaaatcttcggattcgaatcaaacaaaaagaacctggtggacccgttcgtggaggtgtcgttcgcgggaaagatgctctgctctaaaatcttggagaaaaccgccaatccgcagtggaatcagaacatcactctgcctgccatgtttccttctatgtgcgaaaagatgagaatcagaatcatcgactgggatcgcctgactcacaacgatattgtggcgaccacctacctgtcaatgagcaagatttcggcgcctggaggcgaaatcgaggaggaaccagccggcgctgtcaagccgtcaaaggcctcagatctcgacgattacctgggcttcttgcctactttcggcccgtgctacatcaacctgtacggatctccgcgggaattcaccggctttccagacccgtacactgagctgaataccggcaaaggagagggggtcgcttaccgcggccggctgctcctctcgctcgaaactaaactggtcgagcatagcgagcaaaaggtcgaggacctgccagccgatgacatcctccgggtcgaaaagtacctgcggcggcggaagtactccctgtttgcggctttctactccgcgaccatgctgcaggacgtggacgatgctatccagtttgaagtatcgatcgggaattacggcaacaaattcgacatgacttgtttgcccctggcctccactactcaatatagccgagccgtgttcgacggttgccactactactacctgccttggggtaatgtcaaacctgtggtggtcctgtcgagctactgggaagatatctcacataggattgagactcaaaatcagctgctgggaatcgcggatcgcctggaggccgggctggaacaagtccatctggccttgaaggcccaatgctcgaccgaggacgtggactccctcgtcgcgcagcttactgacgaactcatcgctggatgctcccaaccgctgggtgatattcatgagacgccgagcgccacgcatctcgaccagtacctttaccagctccggactcaccatctttctcaaatcaccgaagctgccctcgccctcaagctcggacactctgaactccctgccgcactggaacaggcggaggactggctgcttcgcctccgcgcacttgcggaagagccgcagaatagcctcccagacatcgtgatctggatgctgcagggcgacaagcgcgtggcctaccagcgcgtcccagctcatcaggtgctgttctccagaaggggcgcgaactactgtggcaagaattgtggcaagctgcaaaccattttcctgaagtaccccatggaaaaggtccctggcgcgagaatgccggtgcagatcagggtgaaactttggttcggactgagcgtggatgagaaggaattcaatcaattcgcggagggaaaactgtccgtgtttgcggaaacctacgagaacgaaaccaagttggccctcgtagggaactggggaactactggcctcacctacccgaagttctccgatgtgaccggcaaaatcaaacttcccaaggactcattccgccccagtgcaggatggacttgggccggcgactggttcgtgtgccccgaaaagaccctgctgcacgacatggacgccggacatctgagctttgtcgaagaggtatttgaaaaccagacccgcctgccaggcggacagtggatatacatgtcagataactacactgacgtcaatggagaaaaggtgctgcctaaggatgacattgagtgcccgctcggatggaaatgggaagatgaggagtggtccactgacctcaatagggccgtggacgaacaaggttgggagtacagcatcaccatcccgccagagagaaagccgaaacactgggtcccagcggaaaagatgtactatacccaccgtcggcgccgctgggtgaggctcaggcgcagggatctcagccaaatggaggcactgaagcgccatagacaagccgaggccgagggtgaggggtgggaatacgcatcgctttttggttggaagttccacctggaataccgtaaaaccgacgcttttcgtcgcaggagatggcggagacgcatggaaccgctggaaaaaacgggcccagccgctgtctttgccctcgagggggccttgggaggcgtcatggatgataaatccgaggactccatgtccgtcagtacgctctccttcggcgttaaccgtccgactatctcgtgcattttcgactatggcaaccgctatcacttgcggtgctacatgtaccaggctcgcgatctcgccgcaatggacaaggactccttttcggacccgtacgccatcgtgtccttcctccatcaaagccaaaagacggtcgtggtgaaaaacaccctcaacccaacctgggaccagaccctcatcttctacgaaatcgaaatcttcggagaaccggcaacggttgctgaacagccaccctcgatcgtcgtggaactgtacgatcacgacacttacggagccgacgaattcatgggacgatgcatctgccagccttcgctggagcgcatgcctaggctcgcctggttcccgctgactagaggctcgcagccctcaggagagctcctggcttcttttgagctgatccagcgggaaaagcctgcaatccaccacatcccaggcttcgaggtccaagaaacctcccggatcctcgatgaaagcgaagatactgacctgccataccctccgccgcaacgggaggccaatatctacatggtcccgcaaaacatcaagcccgcgctgcaacgaactgcaatcgaaattcttgcttggggactgagaaacatgaagagctaccagctggcaaacatcagcagcccgtccctggttgtcgaatgcggaggccagactgtgcagtcgtgcgtcatccgcaacctgcgcaagaacccgaatttcgatatctgcaccttgtttatggaagttatgctgcctcgggaggaactttactgtccaccgatcactgtgaaggttattgataacagacagttcggacggcggcctgtcgtgggacagtgtaccatccgcagcctggaatcattcctgtgcgacccttacagcgccgaatccccttccccgcaaggaggaccggatgatgtgagcctcctttcacccggagaggacgtgctgatcgacatcgacgacaaggaaccactcataccgatccaggaagaagaattcattgactggtggtccaaattcttcgcatcgatcggagaacgggagaagtgcggatcatacctcgagaaggacttcgataccctgaaggtttacgatacccagctggagaatgtcgaggctttcgaaggcttgtcagacttctgtaacactttcaaactttatcgggggaaaacccaggaggagactgaagatccgtcagtgattggggaattcaagggactcttcaagatatatccgctgccagaagatccggccatccctatgccgccgagacagttccaccaactggccgcacagggaccccaagaatgcctggtgcgtatctatatcgtgcgcgcctttggacttcaacccaaagatccaaacggaaagtgtgacccttacattaagatcagcataggaaagaagtcggtgtcggaccaagacaactacatcccgtgcaccctggagccagtgtttgggaagatgttcgagcttacctgcactttgccccttgaaaaggatttgaaaatcaccctctatgactatgacctgctgtccaaggatgagaagataggcgaaaccgtcgttgacttggagaatcggctgctcagcaagtttggtgcacgctgcggactcccacagacttactgcgtgtccggaccaaaccagtggcgcgaccagctccgccctagccagcttctgcacttgttttgccagcaacaccgcgtcaaggctccggtctaccggactgatcgagtgatgttccaggataaagaatactcgatcgaggaaatcgaagcaggccgcattcctaacccgcacctggggccggtcgaggaacgcctggctctgcatgtgctccaacagcagggactggtccccgaacacgtggagtcccggccattgtactcgccgctgcagccggatatcgaacagggcaagttgcaaatgtgggtggacctgtttccgaaagccttgggacgaccaggtccgcccttcaacatcacccctagacgggctcggcggttcttcctcagatgtatcatttggaacactcgggacgtgattctggatgatttgtcactgacgggagagaaaatgtcagatatctacgtgaagggatggatgatcgggttcgaagagcataagcaaaaaaccgacgtgcattacagatcgctgggtggagagggtaatttcaactggagatttatcttcccgttcgattaccttcctgctgagcaggtgtgtaccatcgctaaaaaggacgccttttggcggctggacaagactgagtctaagataccagcccgggtggtgttccagatctgggacaatgacaagttttcgttcgacgactttctgggttcccttcaactcgacctgaatagaatgccaaagccagcaaaaacggccaagaaatgcagccttgatcagctcgacgacgctttccaccctgagtggttcgtgtctctgtttgagcagaaaactgtgaagggttggtggccgtgtgtggctgaagaaggcgagaagaagatcttggccgggaagctggagatgactctggaaatcgtggcagagtccgagcatgaggagcggcccgcggggcagggacgggacgaacccaacatgaaccctaaattggaagatccgcggcggcctgacacttcgttcttgtggttcacttcgccgtacaagaccatgaagtttatactctggagaaggttcagatgggccatcatcctcttcatcatcctgttcatcctgctccttttcttggcgattttcatctacgccttcccgaattacgccgcgatgaagttggtgaaaccgttttcc

SEQ ID NO: 48099 - DNA, 6243 bp, Artificial Sequence
  derived and/or modified sequence
atgctttgctgcctgcttgtgcgggccagcaatcttcctagcgctaaaaaggataggaggtcggacccagtcgcgtcgcttacttttaggggtgtgaagaagaggactaaagtcataaagaactcggtgaatcctgtgtggaatgaagggttcgaatgggatctgaagggtattcctctggatcaaggttccgaacttcatgtggtcgtgaaggaccatgaaactatgggaagaaaccgcttcctcggtgaagcaaaggtgcctctcagagaagtgttggcgaccccttcactgtcggcctcttttaacgcgcctctgctggacaccaagaagcagccaaccggagcatcactggtcctccaggtgtcgtatactcctttgccgggagcggtgccattgtttccgccccctacccctctcgagccctcgcccactcttcctgatctcgatgtggtcgcagacaccggcggagaggaggatactgaggatcagggcctgactggagacgaagccgagccttttttggatcaatcgggcggaccgggcgcacctaccaccccacgaaagctgccatcgcgccctccaccccattacccaggaatcaagaggaaaagatcggcgcctacgtcgcgtaagttgctctcggataagccacaggacttccagattagagtgcaggtgattgagggacgccaactcccgggtgtgaacataaagcctgtggtcaaagtgacggccgcagggcaaaccaaaagaactcggattcataaagggaacagcccacttttcaacgaaacgttgtttttcaacctttttgatagcccaggagaactttttgacgaaccaattttcatcactgtcgtagacagcagaagccttcgcaccgatgcccttcttggggaatttagaatggatgtcggtaccatataccgcgagccacgacatgcgtacctgagaaagtggcttcttctctcggatccagatgacttttcggcaggcgcaagagggtacctcaagacgtccctttgtgtgctgggtcctggtgacgaggcaccgctggagaggaaagatccctccgaagataaagaggatattgagtccaatctgcttcgtccaacgggggtggcacttcgaggcgcacacttctgtctgaaggtctttcgcgcagaggatctgcctcagatggatgacgcggtgatggataacgtcaagcagatttttggattcgaaagcaataagaagaaccttgtggatccgtttgtggaagtgagcttcgctggaaaaatgctttgtagcaaaattctcgagaaaactgccaatccccagtggaaccaaaacattactcttccagcaatgttcccttccatgtgcgaaaagatgcgtattcgcatcatagactgggaccggcttacgcacaatgacatagtcgcaactacttatctttcgatgtcgaaaatctcggcaccaggtggggaaatagaagaagaaccagcaggtgccgttaagccctccaaggcgtctgaccttgacgattaccttggatttctccctacttttggaccttgctatatcaatttgtacggctcgcctcgtgagtttaccggattcccagatccgtacacggagttgaatactggcaaaggagaaggggtcgcatatcgggggcggttgcttcttagccttgagactaaactggtggaacactccgaacaaaaggtggaggacctccctgcagatgatatcctgagagtggagaagtacctccgcaggagaaagtactcactcttcgcagccttttactcagcaaccatgctgcaggacgtcgatgatgcgatccagtttgaagtgagcattggtaactatggtaataagttcgacatgacgtgtctccccctggcaagcaccacccaatactcgagagccgtgtttgacggttgccattactactacctcccatggggaaatgtcaagccagttgtggtgctgtccagctactgggaagatatctctcatagaattgaaactcagaaccaactgttgggtatcgctgaccggctcgaagcaggactggagcaggtccatctggcccttaaggcgcagtgttcgactgaagatgtggatagcctcgtggcacagttgaccgatgaactgattgcaggttgttcgcaaccactgggcgacattcatgagactccttcagcgacccacctggatcaatacttgtaccaactgagaacccaccatctgtcccaaattactgaggcagcattggcactgaaattgggacactccgaacttccagcagctctggagcaggctgaagattggcttcttcggctgagagcactggcagaagagcctcaaaactccctgcctgacatcgtcatttggatgcttcaaggagataagagggtggcttaccagcgggttcctgcgcaccaagtgcttttttcgcgccggggagcaaattactgtggtaagaactgtggtaaactgcaaaccatattcctgaagtaccccatggagaaggtccctggtgcaagaatgcctgtgcagatccgagtgaagctctggtttggactgtcggtggatgagaaggagtttaatcaattcgccgagggtaagctctccgtgtttgccgaaacttacgaaaatgaaaccaaacttgcgctggtcggaaattgggggaccacggggcttacttatcctaagttttccgatgtgactgggaagattaagctgccaaaggactctttccgaccttctgcaggctggacctgggctggggattggtttgtgtgtccagagaaaacgcttctgcacgacatggacgccggccatctttcctttgttgaggaggtgtttgagaatcagaccaggcttcctggaggccagtggatttacatgtcagataactacaccgatgtgaacggtgaaaaggtgcttcctaaggacgacattgagtgccccctcggatggaagtgggaagatgaagaatggtctacggatcttaacagagcagtggacgaacagggatgggaatactcaattaccatcccacctgaacgtaaaccaaagcactgggtgccagctgaaaagatgtactacacccatagacgacgacggtgggtccggttgcgccgtagggacctgtcgcaaatggaggcactgaagcggcatagacaagctgaagctgagggtgaagggtgggaatatgcttcgctcttcggttggaaattccacctggaatacagaaagactgacgcattccgccgccgtagatggcgccgacggatggaaccgcttgaaaaaacgggtcctgcggcggtgtttgccctggagggcgcactgggtggagtcatggatgataagagtgaggactctatgtccgtgtcgaccctctcgtttggcgtgaacaggcctactatctcgtgtatctttgactacggtaatagataccatcttcgctgttatatgtaccaagccagagatctggctgctatggataaggattcgttctcagacccctacgccatcgtgtcgtttcttcaccaatcccaaaagactgtagtcgttaagaacactctgaaccctacttgggaccaaactctgattttctacgagatagagatctttggtgaacctgcaacggtggcagaacaacccccttccatcgtggtggaactttacgatcatgatacctacggagcggacgagtttatgggccgctgtatctgtcaaccctcgctggaacggatgcctcgtctggcatggtttcctctcacccggggtagccagccgtcaggagagttgctggcatcatttgaacttattcaaagagagaaacccgccattcatcatatccctggatttgaggtccaggagacttcgcggattctggacgagtccgaggataccgacttgccatacccacccccacaacgcgaagcaaacatttacatggtgcctcaaaacataaaaccggcactgcaacggactgcaattgagattctggcatgggggctcagaaatatgaaatcataccagctcgcaaatatcagctccccttctctcgtcgtggaatgtggagggcaaaccgtgcagtcatgcgtgatccgcaatcttaggaaaaacccaaactttgacatctgtactcttttcatggaagtgatgctgcctcgagaagaactttactgtccacccattactgtgaaggtgattgataaccgacaattcggacgccgcccagtcgtgggtcagtgcaccatcaggagccttgagtccttcctctgtgacccgtactccgcagagagcccaagcccccaaggtggaccagatgatgtcagcctgttgtccccgggagaagatgtgctgattgatatcgatgataaggagcctcttatcccaattcaagaggaagagtttattgattggtggtcgaagttctttgcaagcatcggggagagagaaaagtgtggatcctacctggagaaggatttcgatacccttaaggtttatgatactcaacttgaaaatgtggaggcatttgagggcttgtccgatttttgcaacacctttaagctctaccgagggaaaacgcaagaagaaactgaagatccttcagtgatcggtgagtttaagggactgtttaagatatacccccttcctgaagatcctgccattcccatgccacccagacaattccatcaacttgccgctcagggaccacaggaatgccttgtcagaatttacattgtgagagcgttcggactccagcccaaagatcctaatggaaagtgcgatccatacatcaaaatctcgattgggaagaagtcggtgagcgaccaggacaactacattccatgcaccctggaacctgtctttgggaagatgttcgagcttacctgcacgctgcccctggaaaaggatctcaagattactctgtacgattacgatctcctttcgaaagacgagaagatcggagaaaccgtagtcgatctggagaatcggcttctctccaagtttggagcccgatgtggtctgccacagacttactgtgtgagcggaccaaaccagtggcgcgaccaattgcgaccgtcacaactcttgcacctgttctgtcaacaacatagggtcaaggcacctgtgtaccggactgaccgtgtgatgtttcaggacaaagaatacagcattgaagagatcgaggcgggccgtattccaaacccgcatcttggccctgtcgaagaaaggctggccttgcatgtccttcagcagcagggccttgtgcctgaacacgtggaaagcaggcctttgtactcgccactgcaacctgatattgagcaggggaaactccagatgtgggtggacctttttccgaaagcgctgggtcgaccaggacctccttttaacatcacccctagacgtgcaaggcgctttttcctccgttgcatcatttggaacactcgcgatgtgatcctcgatgacctgagcctgaccggtgaaaagatgtcggacatctacgtgaaaggttggatgatcgggtttgaagaacacaagcaaaaaaccgatgtgcattaccgttcgttgggtggcgaaggcaatttcaattggcggttcatctttccatttgactacctgccagcagaacaagtgtgtactatagcaaaaaaggatgcgttttggcgtctggacaagaccgaatccaagatccccgcacgcgtggtgtttcaaatctgggataacgacaagttcagcttcgatgattttcttggcagcctccaacttgatctgaaccggatgcccaagcctgccaagactgcaaaaaagtgcagccttgatcagctggatgacgcatttcatcctgagtggtttgtcagccttttcgaacaaaagaccgtcaagggttggtggccttgtgtggcagaagaaggtgaaaagaagatcctggctggaaaattggaaatgaccctggagatcgttgccgaatccgaacacgaagagcgtccggcaggacagggtagagacgagcctaacatgaaccctaagctcgaagatccgcgtcgccctgacacgtcctttctctggtttacctctccctacaagaccatgaaattcattttgtggaggcgcttcaggtgggcgatcattctgttcattatcctgtttatcctgcttctgttcctcgcgatctttatctacgccttccctaattacgcagcgatgaagctggtgaagcctttcagc

SEQ ID NO: 48100 - DNA, 6243 bp, Artificial Sequence
  derived and/or modified sequence
atgttatgctgcctgttagtacgtgcgagcaatttaccgtctgcgaaaaaagaccgtaggagcgatccggtagcctctttaacgtttagaggagtcaagaagcgcaccaaagtgatcaaaaattcggttaatcctgtgtggaacgagggctttgaatgggatcttaagggaatccccttagaccaaggatctgagcttcatgtggtagttaaggatcatgaaactatggggagaaaccgctttttaggtgaggcaaaagtgccgttacgcgaggtattggcgactccgtctctatctgcaagctttaacgcgcctctacttgacactaaaaaacagccgacgggagcttctctagtacttcaggtgtcttatacaccactgcccggagctgtacctttgtttccgcctccgactccactcgaaccgagccccactcttccggatttagacgtagttgcggacaccggtggtgaggaagatactgaggaccaaggacttacaggggatgaagctgagccttttttggatcagagcggcgggccgggcgctccgactacccctcgaaaactgccttcccgtccgccgccgcactatcccggcattaaaagaaaacgctccgccccaacttcacggaaacttctgtctgataagccgcaagatttccaaattcgtgtacaagttatagaaggcagacagcttcccggtgttaatattaaaccagtcgttaaggtaacagccgctggccagacgaagcgtacgcggatccacaagggtaatagcccactgtttaatgaaacgctctttttcaatctgttcgattctcccggagaactctttgatgaaccgatttttattacagtggtggattcgcgatctttaaggaccgacgcactgctcggcgaatttagaatggatgtcggcaccatttacagagaaccgcggcatgcctaccttcgaaagtggctgctgctcagtgatcctgatgatttctcagctggcgcgagaggctacttaaagacttcgctttgcgtgctcggcccgggtgacgaagctcctcttgaaagaaaggacccgtcagaggataaggaggatatcgagagcaaccttttgcgcccaacaggtgtagccttacgtggggcccatttttgccttaaagttttcagagctgaggatttgcctcaaatggacgacgccgttatggataacgtcaaacaaatttttggctttgaatctaacaagaagaacctcgtagacccatttgtagaggtctcttttgcgggtaagatgctgtgctccaaaatattagagaaaactgccaatccccagtggaatcagaacatcacactccctgcgatgtttcctagtatgtgtgaaaagatgcggatacgtattatcgattgggacagacttacacataacgatattgtcgctactacttacctctcaatgagcaagatttcagcgcccgggggtgaaatcgaagaggaaccggctggcgcggtgaaaccatcaaaagcatcggatcttgatgactacctgggctttcttccgacatttggtccttgctatattaatctgtacggtagccctagagagtttacgggatttcctgatccatatacagaactcaataccggcaaaggggaaggcgttgcctatagaggccgtctcttgctgtcattggaaactaaactggtcgaacacagcgaacagaaagtcgaagacttgccggctgacgatatcttacgcgttgagaaatatcttcggagaaggaaatacagcttattcgcggctttttactcggctacaatgttacaagacgtcgatgatgccatacagttcgaagttagcattggtaattatgggaataaattcgacatgacttgtctgccgttggcctccacaacccagtattcacgggcggtatttgatggttgtcattattactatttgccttggggcaacgttaaaccggtagtcgtcctttcttcatattgggaggatatttcacaccgcattgagacacaaaatcagctcctgggcatcgccgatcggttagaagccggcttggaacaggttcatctggcacttaaagcccaatgtagtacagaagacgtagactcactggtggcacagttaacggacgaactcattgctggttgcagtcagccgctaggtgacatccacgaaacaccatctgcaacacatcttgatcaatatttgtaccaattacgcactcatcacctcagccagattacagaagcagctttagctctgaagctggggcactcagaattgccggcagccctggaacaagctgaggattggttattgcgcttgcgagctcttgccgaagaaccgcaaaattcccttccagatatcgtcatttggatgttacaaggggataaacgggttgcttatcaacgtgtcccggcgcatcaggtcctgttctcacgtagaggtgccaattattgtggtaaaaactgcggaaaattacagacaatatttcttaagtatccgatggaaaaggttcccggagccaggatgcctgtacagatccgggtaaagctgtggtttggcctgtcagtggatgaaaaagaattcaaccaatttgcagagggaaaactttcagtatttgcagaaacttacgaaaacgagaccaaacttgctcttgttggcaattggggtacaaccggtttgacatatcctaaatttagcgatgtaactgggaaaataaagttaccaaaagactcctttcgtccatcagccggctggacatgggcaggtgattggtttgtgtgccctgagaaaacccttttgcatgacatggatgcaggtcatctttcttttgtggaagaggtcttcgaaaaccagactagacttccggggggtcagtggatctatatgagtgacaactatacagatgttaatggagaaaaggtcttgcctaaagatgatattgaatgtccattaggttggaaatgggaagacgaagaatggagcacagacttaaatagagctgtggatgagcaaggctgggagtatagcataactattccgccggaaaggaagccgaaacactgggtgccggcagagaaaatgtattatacccataggagacgtcgctgggtacggttacgtagacgagacctgagccagatggaggctcttaaaagacatcgccaggcggaagcagaaggagaaggctgggaatatgcttccttgtttggctggaagtttcatctggagtatcgcaaaaccgatgcatttcgaaggcgcagatggcgccgcagaatggaaccgctggaaaaaacaggcccagcagctgtcttcgcgcttgaaggggcactgggaggggttatggacgataaatcagaagattcaatgagcgtcagcacattatcttttggcgttaatcgtccgaccattagctgtattttcgattacggaaatagatatcatctacgctgttacatgtatcaagcgcgggacttggccgccatggacaaggattcattttccgacccttatgcgattgtgtcgtttcttcaccaatctcaaaaaacggtagtggtcaaaaacaccttgaacccgacatgggatcagacgctgattttttacgaaattgaaatatttggagaaccagctacggtggcagaacaacctccatccattgtcgtggaattgtatgatcatgatacatatggcgccgatgagtttatgggaagatgcatttgccaaccttcattagagcgcatgcctagattggcttggtttccacttactagaggttcacaaccgtctggggagttattggcaagctttgaattaattcaacgagaaaagcctgccattcatcatatacctggattcgaagtacaagagacaagccgaattctggacgaaagtgaggatacggacttaccgtatccgcccccacagcgagaagcaaatatatatatggttcctcagaacataaagccagctcttcaacgcacggccatagaaatcctggcttggggattacgcaacatgaaatcttatcagctggcgaatattagcagtccatcattggtggttgagtgcggcgggcaaacagttcaatcgtgcgtcatcagaaacttgcgcaaaaaccctaattttgatatttgtacgctgtttatggaagtgatgcttccaagagaagaactctattgtcctcctatcaccgtcaaagtaattgataataggcaatttggtcgccgcccggtagtggggcagtgtacaatccgttcgttggaatcttttttatgtgatccgtattcggcagaatcaccatcaccgcaaggcggccctgatgatgtatcacttctgagcccgggtgaggacgtacttattgatattgatgataaggaacctctgattccaatccaggaagaagaattcatcgattggtggtctaaatttttcgcgtccatcggagagcgcgagaagtgcgggtcttatctagaaaaggattttgatacgctaaaagtgtacgatactcaactcgagaatgttgaagcatttgaaggtcttagcgatttttgcaatacgttcaagttatacagagggaaaacacaggaagaaacagaagatccgtccgtaattggcgaattcaaaggactgtttaagatctacccgctccctgaagatcctgctattcctatgccgcccagacaatttcatcagcttgctgcccaaggaccgcaggaatgccttgttcgtatctatattgttcgtgctttcggactccaacctaaagatccgaacggtaaatgcgatccatatattaagatttcgatcggcaagaaatccgtttcagatcaagataattatatcccttgtactttagaacccgtttttggcaaaatgtttgagctgacttgcactcttccgcttgagaaagacctgaaaattacactctatgattacgatctactgtcaaaggatgaaaaaatcggagaaacagtggtggatttagagaatcgcttgctctcgaaatttggagcacggtgcggactgcctcaaacgtactgcgtgtctgggccaaaccaatggagagatcagcttagaccgtctcagttattgcacctgttttgtcagcaacatagagtgaaggcgcctgtttatcggacagatcgcgttatgtttcaagataaagaatactcgattgaggaaatcgaggcgggtcggatccccaatccgcacttgggaccggttgaagaacgtttagctctccacgtgttacagcaacagggtcttgtcccggaacacgttgaatcacgccccctgtacagcccgctgcagcctgatatagagcagggcaaattgcagatgtgggtcgatctgtttccgaaagccttggggagaccgggacctccgtttaatattacaccgcggcgtgcccgacgcttttttctccggtgcattatctggaacacacgggatgtcattcttgatgatttgagcctaacaggagaaaagatgtcagatatttatgtcaaaggatggatgattggctttgaagagcataagcagaagacagatgtgcattaccgttcattaggcggcgaagggaactttaattggagattcatattcccctttgattatcttcctgctgagcaggtctgtacaatcgccaaaaaagatgccttttggcgcctagataaaacagaatctaagatccctgctcgcgttgtctttcagatttgggataacgataagtttagctttgatgactttttaggttctctccaacttgacctaaatagaatgcctaaaccggcgaaaaccgcaaaaaaatgcagtcttgaccagcttgacgatgcttttcatccagaatggttcgtgtccctctttgaacaaaaaacagtcaaaggctggtggccttgcgtagccgaagaaggagaaaagaaaattctcgccggaaaactagaaatgacgctggaaatagtcgcagaatccgagcatgaagagcgtccggcaggacaaggacgggatgaacctaacatgaatccaaaactggaggatccacgccgtccggacacaagttttctgtggtttacgagcccttacaagactatgaaatttatcctttggcgcagatttagatgggccattatcctgtttattatattatttatcttacttctgtttctggccatttttatctatgcttttccgaactacgcggctatgaaactggtgaagccgttttct

SEQ ID NO: 48101 - DNA, 6243 bp, Artificial Sequence
  derived and/or modified sequence
atgctttgctgcctcctagtcagagccagcaaccttccctccgccaaaaaagaccgccgttccgaccctgtggcctcgctgacctttcgcggagtgaaaaagcgcacaaaagtgatcaagaactccgttaaccccgtatggaatgaaggcttcgaatgggatctgaaggggatccctttggaccagggctctgaacttcacgtggtggtcaaagaccacgagacgatgggccggaataggtttctgggtgaggccaaagtgcccctgcgcgaggtgctggcaaccccgtccctatctgccagctttaatgcaccgctgcttgacacaaagaaacagcccactggtgcaagtctggtgctgcaggtctcttacacccccctccccggtgcagttcccctcttcccaccacctacgcccctcgagcctagcccaacacttcctgaccttgatgtggtggctgatacaggtggtgaggaggataccgaggatcagggcctaacgggggatgaggctgagccctttctagaccagtctggagggcccggcgcacctaccacacccagaaaattgccatcacgcccgcctccccactaccccgggatcaagcgcaaacggtctgctccgaccagccggaagcttctcagcgataagccccaggatttccagattagagtacaggttattgaaggcagacaactccccggagtcaatattaaacctgtggttaaggtgacagcagcgggccagaccaagcggacccgcattcacaaagggaactcgcccctcttcaatgagactctcttcttcaacttgttcgattcaccaggtgaactcttcgacgaacctatttttataaccgtggtcgattccagatcactccgcactgatgcattactgggcgagttcaggatggatgtgggaacaatttaccgcgaaccacgacacgcatatctgaggaaatggctgctgctgagtgacccagacgacttctcagctggcgctcggggctatctgaagacaagcctctgtgtcctagggcctggggacgaggcgcccctagagaggaaggatccctcagaggacaaggaagacatcgagagtaacctgctgcggcccaccggagttgcacttcggggtgcccacttctgtctgaaggtgttccgggcagaggatctgccccagatggatgacgccgtgatggacaatgttaaacagatttttggatttgaaagcaacaaaaagaatcttgttgatcccttcgtagaagtctctttcgcaggcaaaatgctgtgcagtaagattctcgagaagacagcaaatccgcaatggaaccagaacatcaccctgccagctatgttcccatccatgtgcgagaaaatgcgaatccgaattatcgattgggaccgcctgacgcataatgacatagtagctactacatatctgagcatgtcaaaaatttccgcccccggcggcgaaatcgaagaagagccagccggggcagtgaaaccctccaaagcctccgatttggatgattatctgggcttcctccccacattcggcccttgttacattaacctgtatggctcgccacgggagttcactggtttccccgatccatacacggagctgaataccggaaaaggagagggcgttgcgtacagaggccggctgctgctctccctcgaaactaaactcgtcgaacactcggaacagaaggtggaagatctcccagccgatgatatcttacgtgtggagaaatacctccgcaggcgaaaatattccctgtttgccgctttctacagcgctaccatgctgcaagacgtagacgatgctatccagtttgaagtgagcattgggaattacgggaacaagttcgatatgacatgtctgcctcttgcttctacaacacagtattcaagggctgtgtttgacggctgtcattactattatctgccctggggcaacgttaagccagtggtcgtgttgagctcatattgggaagacatcagtcaccgcatagaaacacagaaccagctgctggggattgctgacaggttagaggccggactagaacaggtgcatctggctttgaaagcccagtgttctacggaggatgtggacagcttggttgctcagctgacagacgaattgattgctggatgctcacagcccctgggtgatattcacgagaccccctcagccacacatttggaccagtacctgtatcagctgcgtactcatcacctgtctcagatcacggaagccgcactcgccctgaaactaggccatagtgagttgcccgccgccctggagcaggctgaggattggcttctgaggctccgcgctctggccgaggagccacagaattccctgcccgacatcgtgatatggatgctacagggtgataaaagagtggcctatcagagggtacctgcacatcaggtcctgttctcccggcgtggggccaattactgtgggaagaattgtggcaagctccagacaattttcctcaagtacccaatggaaaaagtgccaggagcaaggatgcccgtgcagatccgggtcaagctgtggtttggattaagcgtcgacgaaaaagaatttaatcaatttgctgagggcaagctgtcagttttcgccgaaacctatgagaacgagactaagctggcactggtgggcaactggggcacaaccgggctgacatatcccaagtttagcgatgtgactggcaagattaagctgcctaaggattccttccgtccttccgccggatggacctgggccggcgactggttcgtgtgccctgaaaagactttgctgcatgatatggacgcaggtcacttgagcttcgtggaagaggtctttgaaaaccagacacggttgcccggcggccagtggatttacatgagtgataattacaccgatgtcaatggcgagaaagtgttgcccaaggacgacatagaatgtccccttggttggaagtgggaagacgaggagtggtctacagaccttaatcgcgccgtggatgagcagggctgggagtattcaattaccatccctccagaacgcaagcctaagcactgggtccccgccgagaagatgtattacactcaccgtaggagacgctgggtccgcctgaggaggcgcgatctctctcagatggaagccctgaagcggcatcgacaagccgaagccgaaggggagggatgggagtacgcgagcctattcggttggaagttccacttggaatataggaagactgacgctttccgtcggcgccggtggagacgaaggatggagcccttagagaaaaccggaccagccgctgttttcgctctcgagggagccctgggtggagtaatggacgataaaagcgaggactccatgagtgtgtctacactgtccttcggcgttaacaggcctaccatttcatgtatctttgattacggaaataggtaccacttgagatgctacatgtatcaagcccgggatctcgcagccatggacaaggacagcttctcagacccgtatgccatcgtttctttcttacatcagtcccagaagacggtggtcgtgaagaatacactgaatccaacatgggatcagactttaattttttatgagattgaaatatttggagagcctgccactgtcgcagagcagcctccgtccatcgtggtggagttgtacgatcacgatacctacggtgcggacgaatttatgggcagatgcatttgccagccaagcttagaaaggatgcccaggctggcatggttccctttgacgcgggggtctcaaccatcaggcgagttgctggcttcgttcgaattgatccagagggagaagcccgctattcaccatattcccgggtttgaggtccaggaaacgtctcggatcctggatgaaagcgaggacacggatctgccttaccctcctccacaacgggaggccaacatctacatggtgcctcagaacatcaaaccagccctgcagaggactgccattgagattctggcatgggggttaaggaatatgaaatcataccagcttgccaatatttcgtctccctctctcgttgtcgagtgtgggggccagacagtgcagtcttgtgtgattcggaatctgcggaaaaacccaaactttgatatctgtactctgttcatggaagtgatgctcccacgcgaggagctctattgccctccaatcacagtgaaagtcatcgacaaccgccaattcggtaggcgtcctgtggtgggacagtgtaccattagatccttagagtcatttctgtgcgatccgtacagcgcagaatccccgagcccccagggcgggccggacgatgtcagcttattatcgcccggagaggatgtgttaatcgacattgacgacaaggaacccctaattcctattcaggaagaagaatttatcgactggtggagcaagttcttcgcgtcgatcggggaacgcgagaaatgcggcagctacctggagaaagactttgataccctgaaggtgtacgatacccagctcgaaaacgtggaggcctttgaaggccttagcgatttctgcaatacattcaaactgtatcgtggaaaaacccaggaagaaacagaggatccttccgttatcggcgagttcaagggtttattcaaaatttatccacttcccgaagaccctgctatccctatgcctcctcgtcaattccatcaattggcagcccaagggccacaggagtgcctggtccggatttatatcgtcagggcctttggcttgcagcccaaggatcccaacggtaaatgcgatccgtacatcaagatatccattggcaaaaaaagcgtttcagaccaagacaattatatcccttgtaccttggaacccgtcttcgggaaaatgtttgaattaacttgcacattgcccctggagaaggacctgaaaatcaccctgtacgactatgacctgctttctaaggatgagaaaataggagagaccgtcgtggacctcgagaatcgcttactctcaaaattcggcgcccgctgcggactgccgcagacgtactgtgtttccggtcccaaccagtggcgtgatcagctgcggccctcgcagctactacacctgttctgccagcaacaccgcgttaaggcgccagtatacaggacggatcgcgtgatgtttcaggacaaggaatactctatcgaggaaatagaagcaggccgaatcccaaatcctcacctggggcctgtggaagaaagacttgctttacacgttcttcagcagcagggtttagtcccagaacatgtggaatctaggcccttatatagcccactgcaacccgacattgagcagggcaagctccaaatgtgggtcgatctctttcctaaggcgctgggacggcctggacctccgttcaacatcacaccaaggagggctcggagatttttcttacgctgtatcatctggaacacgcgggatgtgatcttggacgacctgtctctcaccggagaaaaaatgagcgacatctacgtgaagggttggatgatcggttttgaagaacacaagcagaagacggatgtacattacaggtccctcggtggagaaggcaactttaactggagatttatatttcctttcgattacttaccagctgaacaggtgtgtacaatcgccaaaaaggatgccttctggcgtttggataaaacagaaagcaagattcctgccagagtagtgtttcaaatatgggacaacgataagttttccttcgacgacttcttgggcagcctgcagctggacctgaacaggatgcccaaacccgccaaaaccgccaagaagtgttctcttgaccagctggatgatgcgtttcacccagagtggtttgtgagtcttttcgagcagaagaccgtgaaaggttggtggccgtgcgtggctgaagaaggggagaaaaagattctggccggcaagctagaaatgactctggaaattgtagccgaaagtgaacatgaggagagaccggccggacaggggcgcgacgaacctaacatgaaccctaaactggaggaccctcgcagacctgacacttccttcctatggtttacatccccctataaaacgatgaaatttatcctgtggcggcgcttcagatgggccattatcttattcattatcttgttcatcctcctgctgttcctcgctatattcatttacgctttcccaaactacgctgcaatgaagcttgtcaagccattctcc

SEQ ID NO: 48102 - DNA, 6243 bp, Artificial Sequence
  derived and/or modified sequence
atgctgtgttgtctgcttgttcgtgcctccaacctcccatcagcaaagaaagaccgaaggtcagaccctgtagccagcctgacattcagaggggtgaaaaagaggaccaaagtcataaagaacagcgtcaaccctgtttggaatgaaggcttcgagtgggacctgaaaggcattccgctcgatcaggggagtgaacttcatgtagtggtgaaggatcacgagacaatgggacgaaatcggtttctcggggaagctaaagttccactgcgtgaagtactcgctaccccctcactctcagcatcatttaatgccccactcctggacactaagaaacaacctacaggcgcctccctggttcttcaggtcagctacacccccctgcctggggctgtcccattgtttcccccccctacacccttagagccaagcccaacactgcccgaccttgatgtggtggccgatacggggggtgaggaagatacggaggatcagggtttaaccggcgatgaggctgagccgttcctagatcagagcggggggccgggggctcccactacaccccgcaagctgccaagtaggcctccgccacattaccctggcatcaaacgaaagagatccgccccaacatcaagaaagttgctatcagataagccccaggatttccagattcgagtgcaggtcatcgaaggaaggcaattgccaggcgtgaacattaagcctgtggtcaaggtaaccgccgcaggacaaactaagcggacccgtattcataaggggaactctccgttgtttaacgagacactcttctttaatctttttgattcccctggagaactcttcgatgagccaattttcatcactgtggtcgacagccgcagtctgcggactgacgccctgcttggtgaattcaggatggacgttggcaccatttacagggagccaagacatgcctacctgcgtaagtggctcctgctttccgatccggatgacttctctgcaggcgccaggggctatctcaagaccagtctctgcgtgcttggcccaggggatgaggcaccactggagcgaaaagacccaagtgaggacaaggaggatattgagtctaatctgttgcgcccgactggagttgcactaagaggagctcatttttgtctgaaagtcttccgcgccgaagatctgccgcaaatggatgacgccgtgatggacaacgtgaagcagatctttggctttgaaagcaataagaagaacttagttgaccctttcgtggaagtgtcctttgccggtaagatgctctgctctaaaatactcgagaaaaccgcaaatccccagtggaatcaaaatatcaccctacccgccatgtttccatccatgtgcgagaagatgaggattagaattattgattgggaccgattgacacataatgacatcgttgcaactacgtacctgagtatgagtaagatttctgctcccggaggggaaattgaagaggagcctgcaggcgctgtgaagccttccaaagcttcagacttggacgactatctgggcttcctccctaccttcggtccttgttatatcaatctgtatggaagcccccgcgaatttacaggctttcctgatccttacacggagctgaatacaggaaagggtgaaggtgtggcctaccggggcagactgctgctgtcacttgagactaaactggttgagcactccgagcagaaagtagaagatttgcctgccgatgacatactgcgcgttgagaaatatttacgccgcaggaagtacagcctctttgcagccttctactccgcgacaatgctgcaagacgtggacgacgcaatccagttcgaagtctcaatcgggaactacggaaataagtttgacatgacatgcctgcctctggcgtctacaacccaatactcacgcgcggtgtttgacgggtgtcattactattatttgccatggggcaacgttaaacctgtggtggtgctctctagctactgggaagacatttcccacagaattgagactcagaatcagctattgggcatcgccgatagactggaagcagggctggagcaggttcacctggccctgaaagcacagtgcagtacggaagacgtcgactcgttggtcgcccagctgactgacgaactcatcgcagggtgtagccagccactgggcgatatccatgagacccctagcgccacgcaccttgatcagtacctctatcagcttaggacccatcatttgtcccagataacagaggctgcactcgccctgaagctggggcatagcgaactgcccgcagctctggagcaggcagaagattggctgttgaggctgcgtgctctcgctgaggagcctcagaatagcctcccagatattgtgatctggatgctccagggggacaaaagggtggcttatcaaagagtccccgctcaccaggtgctgttctcacggagaggcgccaactactgtgggaaaaactgtggtaagctgcagacaatcttcctaaagtacccaatggagaaggttcctggcgccaggatgcccgtccagataagggtgaagctttggttcggcctgtccgtagatgaaaaggagttcaaccagttcgccgagggaaaattgagtgtgttcgcagaaacatacgagaatgagactaagctcgctctcgtcggcaattgggggactacaggcctgacctatccaaaattctccgatgttactggaaaaattaaactgcctaaagatagcttcaggccatccgcagggtggacatgggctggcgattggttcgtatgtcccgagaagaccctcctgcacgatatggacgccggccatctatctttcgtggaggaagttttcgaaaatcaaaccagattacccggcgggcagtggatttacatgtccgataactatacagatgttaacggcgagaaggtcctgccaaaggatgacatagagtgtccccttgggtggaaatgggaagacgaggaatggagcacagatctgaatcgcgcagtggatgagcagggctgggaatactccattaccataccgccagaaagaaagccaaagcactgggttcccgcagagaaaatgtactatacccatcggcgaagaagatgggtgcgcctgaggaggcgagacctgtcccagatggaggcccttaagcgccatagacaggccgaagccgagggtgagggatgggaatacgcatctctttttggatggaaattccacttggagtaccgtaaaaccgacgccttccgtagacgcagatggaggcgcaggatggaacccctggagaaaacagggcccgccgccgtgtttgcgctggagggcgcactgggtggggtgatggatgataagtcagaagatagcatgagcgtgagtacgctcagtttcggcgtgaacaggccaacgattagctgcatatttgactacggaaatagataccatctgcgctgctatatgtatcaggcccgcgacctggccgctatggataaagacagcttttccgacccctacgcgatcgtgtcattccttcatcagtctcagaaaaccgtagttgtgaaaaatacccttaatcctacatgggaccagactttgatcttctacgagatcgagatattcggagagccagccactgtggccgagcagccaccttctattgttgtcgaactctacgaccacgatacttacggtgcggacgaatttatgggaagatgtatatgtcaaccttccctcgagaggatgcctcgcctagcctggtttcccctcacacggggaagccagccatctggtgagctgctagccagcttcgagctgattcaacgcgaaaaacccgcaatccatcacatcccgggtttcgaggtgcaggagacctcaagaatacttgacgagagtgaagataccgacctgccttatcctcctccgcagagggaggctaacatctacatggtcccccagaatatcaaaccggccctacaacgcactgcaattgagatcctcgcttggggtctacgcaacatgaagtcgtaccagctcgccaatatctccagccctagcctagttgtagagtgtgggggacagacagttcaaagttgtgtgatcagaaatttgcgcaagaatcccaatttcgatatatgtactctctttatggaagtgatgctacctagagaggaactgtactgtccgccaatcaccgtgaaggtaatagataatagacagttcggtcggaggccagtcgtgggtcaatgcactattagatccttagagtcttttctctgcgatccctactctgcagagtcaccttcgccgcaaggtggaccagatgacgtctcgctgttgtccccaggcgaagatgtgcttatagacatcgatgacaaagaacccttgatacctattcaggaggaggagtttatagactggtggagcaagttttttgcaagcatcggagagcgagagaagtgcggcagttatttggagaaggatttcgatactctcaaggtgtacgacacccagttggaaaatgtagaagcattcgaagggcttagcgacttttgcaacacctttaagctctatagaggcaagacccaagaggagaccgaagatccgtcagttatcggtgagtttaaaggactgttcaagatttatcccctgcccgaggacccggctatccccatgccacctcggcagtttcatcagttggcggctcaaggccctcaggagtgtctagtgagaatttatatcgtgagggctttcggactgcagcccaaggatcctaatggcaaatgtgacccttacatcaagatcagcattggaaaaaaatcagtgtctgatcaggacaactacattccatgcactctagaaccggttttcgggaagatgttcgagctgacttgtaccctccctttggagaaggatctgaaaattaccctgtatgactacgatctgctctcgaaagatgagaaaataggggaaaccgtcgtggatctcgaaaacaggttactcagtaagttcggagcccgctgcgggctccctcagacttactgcgtgagcggcccgaaccagtggcgtgatcagctcagacccagccaacttctccatcttttctgccagcaacacagagtgaaagcacctgtgtaccggacagatcgtgtgatgtttcaagacaaggagtactcaattgaggaaatcgaagccgggcgcatcccaaacccacacctgggacctgtcgaagagagattagctttgcatgtgctgcagcaacagggtctggtgcccgagcacgttgagagccgacccttgtacagtcctctccaaccagatatcgaacagggcaaattgcaaatgtgggttgacctctttccgaaggcgctgggtcgaccaggaccccctttcaacattacccccaggcgggcaagaaggttcttcctgcgctgcatcatttggaatacgcgcgacgtaatcttggacgacctgtcactcaccggagaaaaaatgtccgacatctacgtaaaagggtggatgattggttttgaagagcataagcagaagacagacgtacactaccgttcactgggtggggagggaaactttaattggaggtttatattccccttcgactatctcccggctgagcaggtttgtaccatcgcgaagaaagacgccttctggagactggacaaaacggaaagcaaaatccccgctcgcgtggtgttccaaatctgggataacgacaagttctcctttgatgacttcttgggcagtctccagctggatttaaatagaatgcccaagcctgctaaaacggctaaaaagtgcagtctcgatcagctcgacgacgcttttcaccctgaatggttcgtgtcgctcttcgagcagaaaactgttaaggggtggtggccttgcgtggcagaggagggcgagaaaaaaattcttgcgggcaagctggagatgacgctggagattgtcgcggaatcagagcacgaggagcgtcctgccgggcaaggccgtgatgagcccaatatgaacccgaagctggaggatccccgtagaccggacacgagctttctgtggtttacatccccatacaaaaccatgaaatttatactttggaggaggttccgctgggctatcatcctgttcattatactttttatcctgcttctgttcctcgccatctttatctacgcttttcctaactatgctgcgatgaagctggttaaaccattctct

SEQ ID NO: 48103 - DNA, 6243 bp, Artificial Sequence
  derived and/or modified sequence
atgctgtgctgtctcctcgtgcgcgcgtcgaatctgccgagcgcgaagaaagatcggaggtcggatccggtggcaagtctgaccttccggggggtcaaaaagcggactaaggtgatcaagaattcggtcaaccctgtgtggaacgaaggtttcgaatgggacctcaaggggattcccctggaccaaggatcggaattgcacgtcgtggtcaaagatcacgagacgatgggccggaatcggtttctgggagaagccaaggtcccgctgcgggaagtgctggccaccccttccctgagcgcctcttttaacgcccctctgcttgacaccaagaagcaaccgactggtgcctcgctggtgcttcaggtcagctacaccccattgcctggagcagtgccgctgttcccaccgccaactccgctggagccttcgcctactctgcccgacctggacgtggtcgcggacactggaggagaagaagataccgaagatcaaggcctgactggcgatgaagccgaaccgttccttgatcaatcgggcggaccgggagcacctaccactcctcggaagctcccgtcgcgcccgccgccgcactatccagggatcaagcgcaaaagatccgcgccaacctccagaaagctgctgtcggataaaccccaagacttccaaatccgcgttcaggtgattgaaggacgccagctgccaggtgttaacatcaaaccagtggtgaaagtgaccgcggccggacagaccaagcgcacccggatccataagggcaattcgcccctcttcaatgaaactcttttcttcaatttgttcgactcgccgggagagctcttcgacgagcccatctttatcactgtggtggactcgcgttccctgcgcaccgatgctctgctcggagagttccgcatggacgtgggcaccatctaccgtgagccccgccacgcatacctccggaaatggctcctcttgtccgacccagatgacttctccgctggcgctcgaggatacctgaaaacttccttgtgcgtgctgggacccggagacgaagcaccactcgagcggaaggacccttcagaagataaggaggatatcgagtccaacctgttgcggcccactggcgtggcgctccgcggggcgcatttctgtctgaaagtgttccgggctgaggatttgccccagatggatgatgccgtgatggataacgtgaagcagattttcggattcgagtcgaataagaaaaaccttgttgatccgttcgtggaagtctcgttcgccgggaaaatgctgtgctcaaagatcttggaaaagactgccaatccccagtggaaccaaaacataactttgccggcgatgtttccctccatgtgtgagaagatgcgcatcagaatcatcgactgggacaggcttacccacaacgacatcgtcgccaccacctatctgagcatgagcaaaatctcagctccgggcggagagatcgaggaagagcccgcgggggcggtgaaaccgtcgaaggcttccgacctcgacgattacctcggcttcctgccgactttcggaccatgttacattaacctgtacgggtccccacgggaattcactggattcccggatccgtacactgaactcaacactggaaagggtgagggagttgcttaccgagggcgccttctgttgtcgttggagacgaagctcgtggaacactccgaacaaaaggtcgaggacctccctgctgatgatattctccgggtggaaaagtacctcaggcgccggaagtatagccttttcgccgcgttctactcagcaactatgctgcaggatgtggatgacgcgatccagttcgaagtctccatcggaaattacggcaataagttcgatatgacttgccttccgctggcttccaccacgcagtacagccgcgcagtgttcgatggctgccattactactaccttccctggggaaatgtgaagcccgtggtcgtcctttcgtcgtactgggaggacatttcccaccgcatcgaaactcagaatcaactgctcgggatcgccgaccgcctggaagccggcctggagcaggtccatctcgccctcaaagcccaatgtagcactgaagatgtcgattcgctggtggcccagctgactgacgagcttatcgccggttgcagccagccgctcggagatatccacgaaactccctcggcgacccacttggaccagtacctgtaccaactgcgcactcatcacctgtcgcagatcaccgaggcagccctggccctcaaactgggccattccgaacttccagcggctcttgaacaagccgaggactggctgcttcgcctgcgggcgcttgccgaagaaccacagaacagcctgccggacatagtgatctggatgctgcagggagacaagcgggtggcgtaccagcgggtccccgcccaccaagtgctgttttcgagacgcggcgcaaactactgcggaaagaattgcggcaagttgcaaaccattttcctgaaatacccgatggaaaaggtcccaggagcacggatgccggtgcagatccgggtcaagctgtggtttggcctgtcggtggacgagaaggaattcaaccagtttgccgaggggaagctctcagtgttcgccgaaacctacgaaaatgagactaagctggcgctcgttggtaactggggtaccactggccttacgtacccaaagttctcagatgtgactggaaagatcaagctcccgaaagactcctttcgcccttcggcaggatggacttgggccggagactggttcgtgtgcccggaaaagactcttctccacgacatggacgctggtcacctgtccttcgtcgaagaagtgttcgaaaaccagaccaggctgccaggaggccagtggatctacatgagcgacaattacactgacgtcaacggagaaaaagtgcttcctaaagacgatatcgagtgtccgctgggatggaagtgggaggacgaggagtggagcactgacctcaacagggccgtggacgaacagggttgggaatactccattacgatcccaccagagcgcaaacccaagcattgggtccccgcagaaaagatgtactacactcatcggcgccggagatgggtgcgtctccgccgcagggatctgagccaaatggaggccctgaagcgccacagacaggcagaagctgagggcgagggatgggagtatgcgtcactgttcgggtggaagttccatctggaatatagaaaaactgatgcgttccggcggcgccggtggcgccggagaatggaaccactggaaaaaaccggaccggcagccgtgttcgcgctggagggagctctcggaggggtgatggatgacaagtccgaggactccatgtcagtctcaaccctcagcttcggtgtgaaccgcccaactatttcttgtatcttcgattacggcaacagataccatctgaggtgctacatgtaccaggcccgcgacctcgccgctatggacaaggattcattctcggatccttacgcgatcgtgtcgttcttgcatcagagccaaaagaccgtggtggtgaagaatactctgaacccaacctgggatcaaactctgatcttctacgaaatcgagatcttcggggagccggcgaccgtggccgagcagccacctagcatcgtcgtggagctgtacgaccacgacacctacggagccgatgagtttatgggccgctgcatctgccagccaagcctggaaagaatgccgaggctcgcgtggttcccactgactagaggaagccagccatcgggggagctcctcgcgtcgttcgagttgatccagagggagaagccggcgatccatcacatcccgggcttcgaagtgcaggagacttcgcgcatcctggatgaatccgaagatactgatcttccataccccccgccccaacgggaagccaacatctacatggtgccgcaaaacatcaaaccggctctccagcgaactgccatcgagatcctcgcgtgggggctgcgcaatatgaagtcataccagctggctaacatctcgtccccgtccctggtggtggagtgcggcgggcaaactgtgcaatcgtgcgtgatccgcaatctgcggaagaacccgaattttgatatatgcacgcttttcatggaggtcatgctgccacgcgaagaactctactgcccgcccatcactgtgaaagtgatcgacaaccgccagttcgggagacgcccggtcgtgggacaatgcaccatccgcagcctcgaatctttcctgtgtgacccgtacagcgcagagagcccatcgccacagggaggaccggacgacgtgtcgcttctgagcccaggcgaagatgtgctcattgacattgatgataaggagcccctgatcccgatccaagaagaggagttcattgactggtggtcaaagttttttgcgtccattggagagcgggagaagtgtggatcatacctcgaaaaagacttcgacactctcaaggtgtacgatacccagctcgaaaatgtggaggcttttgaaggactcagcgatttctgcaacacttttaagttgtatagaggaaagacgcaagaagaaaccgaggacccatcggtcattggagaattcaaaggcctgtttaagatatacccgcttccggaggatcctgccatcccgatgccgccaagacagttccatcaactggccgcacaaggaccacaggagtgcctcgtccggatctacatcgtgcgcgccttcggcctccagccgaaggaccccaatggcaagtgcgatccgtacatcaagatctccataggcaagaagtccgttagcgaccaggataactacatcccgtgcacccttgaaccggtctttggaaagatgtttgagctgacctgcaccctgcctctggagaaggacttgaagattaccctgtatgactacgacctgctgagcaaggacgaaaagatcggagaaaccgtggtggacctggagaaccgcctgctttcaaagttcggcgccagatgtgggctcccacaaacttactgtgtgagcggacctaatcagtggagagatcaactgaggccgtcgcagttgctgcaccttttctgccagcagcatagagtgaaagcgcccgtctacagaactgaccgtgttatgtttcaagataaagaatatagtatcgaggaaattgaagccggacgaatcccgaatcctcatctggggccggtcgaagaaagactcgccctgcacgtgctgcagcagcaaggactcgtgccagaacatgtggagtcccgccctctgtactcgccactgcaaccggacatcgaacaaggcaaacttcaaatgtgggttgacctgttcccgaaggccctggggcgcccgggaccgccattcaacatcactccgagacgggcgcggcggttcttcttgagatgcattatctggaacacccgcgacgtcatcctggacgatctgtcgctgaccggagaaaagatgtccgatatctacgtgaagggttggatgatcggattcgaggagcataaacagaaaactgatgtccactataggtccttgggaggtgaggggaactttaactggcggttcatcttccccttcgactacctcccagcggagcaggtctgcactatcgccaagaaggacgccttttggagactggacaaaaccgaatcgaaaatcccggctcgggtggtctttcagatctgggataacgataagttctcctttgacgacttccttggatcactgcaactggacctcaatcggatgccaaaacctgctaagaccgccaagaagtgttcactcgaccagctggacgatgccttccatcccgagtggtttgtgagcctgttcgaacaaaaaaccgtgaagggatggtggccgtgcgtggccgaggagggcgagaagaagatcctggcaggcaagctggagatgaccctggaaatcgtggcagagtccgaacacgaagaacgcccggcagggcaaggacgcgatgagccgaacatgaacccgaagctggaagatccgcggcgaccagacacctcgttcctgtggttcacgtccccgtacaagactatgaaattcatcctgtggcggcgctttagatgggccatcatcctgttcatcattctgttcatcctgctcttgttcctggcgatctttatctacgcgttcccgaactacgccgcgatgaagctcgtaaaaccgttcagc

SEQ ID NO: 48104 - DNA, 6243 bp, Artificial Sequence
  derived and/or modified sequence
atgttgtgctgcctgctggtgagagcctcgaatcttccatcagccaagaaagatcggagatccgacccagtggcctcgttgacctttcgcggcgtgaagaagagaactaaggtcatcaagaatagcgtgaacccggtctggaacgaaggctttgagtgggacctcaaaggaatcccgctcgaccaaggatctgagttgcatgtggtggtgaaggaccacgaaactatgggacggaaccgcttcctgggagaagcgaaagtcccactccgcgaagtgcttgccactccctccctctcggcgtccttcaatgcgccattgttggacacgaagaagcagcctactggcgcgtcgctcgtgctccaagtgtcctatactccactgccgggagccgtgcccctttttccgccaccgactccactcgagccctcgccaaccttgcccgacctggacgtggtggcggataccggcggagaagaagacaccgaagaccagggtcttaccggcgatgaagcagaaccgttcctcgaccagagtggcggccctggggctcctaccaccccccgcaagctcccttcacgccctcctccgcattacccagggatcaaaagaaagagatcggctcccacctcccggaagctcctgtccgataaaccgcaggatttccagattcgcgtgcaggtcatcgagggaagacagctcccgggagtcaacatcaaaccagttgtgaaagtgaccgctgccgggcagactaagagaacgcggatccacaagggaaactccccgctcttcaacgagacgctgttcttcaacctcttcgacagcccgggggagctgttcgatgagccgatcttcatcactgtggtggattcacgctccctcagaaccgacgcactcctgggcgagtttagaatggacgttgggaccatctacagagagccccggcacgcatacctccggaagtggcttctgctgtcagatccggatgatttctcggccggagctcgcgggtacctcaagacttcgctgtgcgtactgggtccaggagatgaggcgccccttgagcgcaaggacccgtcagaagataaggaagatattgagtctaacctgcttagaccaacgggggtcgcactgcggggagcccatttctgcctgaaggtgttcagagcggaagatctgccgcagatggacgacgctgtgatggacaacgtgaaacagatttttggcttcgagtcaaataagaagaacctggtggacccattcgtggaggtttcgttcgctggaaagatgctttgtagcaagatcctggaaaagaccgctaacccacagtggaaccagaacatcaccctgccggccatgtttccatccatgtgcgagaaaatgcgcatccgcatcatcgactgggatcgcctcacgcacaatgacatcgtggctactacgtacctctcaatgtccaagatctcagcaccgggaggcgagatcgaagaggaaccggccggagccgtcaagccgagcaaggcctcggatctggatgactacctcgggttccttcctaccttcggaccgtgctacatcaacctctatggttcaccgagagaatttaccggcttcccggacccgtacaccgaactgaatactggaaagggagaaggcgttgcttacagagggcgactcctgctgagcctggaaaccaagctggtcgagcactccgaacagaaggtcgaggacctgccggcagatgacatcctgagagtggagaagtacctgaggaggcgcaagtactccctgtttgcggccttctactctgcgactatgcttcaagatgtcgatgatgccattcaattcgaagtgtcaatcggaaattacgggaataagttcgacatgacctgccttccgttggcaagcactactcagtactcgagggcggtcttcgatggatgccactactactacctgccgtggggcaacgtgaagcctgtggtggttctttcttcatactgggaagacatctcgcaccggatcgaaacccaaaaccagctcctcggaattgcggacaggctggaggctggactcgagcaggtgcaccttgccttgaaggcacaatgctcgactgaggacgtggactcactcgtggctcagctgaccgacgaactcatcgctggatgctcgcaacctctgggggacatccatgagactccctcggcgacccatctggaccagtacttgtatcaactccgcacccaccatctgtcgcagatcaccgaagcggcgctggcactcaagctggggcactcggaactgccagccgcattggaacaagccgaagactggctgctgcgactccgggccctcgcagaagaacctcagaattcgttgcctgacatagtgatctggatgctccagggtgataaacgcgtcgcgtaccagcgcgtgccggctcatcaggtgctgttctccagacgcggcgcgaactactgcggcaagaattgcggcaaacttcagactatctttcttaagtaccccatggaaaaagtgccgggtgcccggatgccggtgcagatccgggttaagctgtggttcggactgtcggtggacgaaaaagaattcaatcaatttgcagagggcaaacttagtgtgttcgccgagacttacgagaatgaaaccaaacttgcacttgtcggaaactgggggactacgggcctgacctacccgaaattctcggacgtgactggaaaaatcaagctgcctaaagacagcttccggccgtcagcgggatggacttgggcgggagactggtttgtatgcccggagaagaccctcctccacgacatggatgcaggccacctgtcgttcgtggaggaagtctttgaaaatcagactcggctccctggtggtcaatggatatacatgtcagacaactacaccgacgtcaatggagaaaaagtgctcccgaaggacgatatcgagtgtcctctcggatggaaatgggaagacgaagagtggagcaccgacctgaacagagcagtcgacgaacagggatgggaatacagcatcactatcccaccggaaagaaagccgaagcactgggtccctgctgaaaagatgtactacactcaccggcgccggagatgggtgcggttgcggcgtcgggatctgagccaaatggaggcactcaagcgccaccgccaagcagaggccgaaggcgagggatgggagtacgcaagcctttttggatggaagttccacctggagtacaggaagactgatgctttccgcagacggcggtggagacggcgtatggagccgctcgagaagactggtccggcggccgtgttcgcgctggagggtgctctgggtggagtgatggacgacaagtcagaggatagcatgtcagtgtccaccctcagcttcggggttaatagaccaaccatcagctgcatcttcgactacggcaaccgctaccatcttcggtgctacatgtaccaggctcgggacctcgctgctatggataaagactcattttccgatccgtacgcaatcgtgtccttcctgcaccagtcccagaagacggtggtcgtcaaaaacaccctgaatccgacctgggatcaaaccctcattttctacgagatcgaaatcttcggggagcccgccaccgtggccgaacagccgccgtcaatcgtggtggaactgtatgatcatgatacctacggagccgacgagttcatggggcgttgcatctgtcaaccatcgctggagcgcatgccgcggctggcctggttcccgctgacccgtggaagccagccttcgggtgagctccttgcctcgttcgagctcatccaaagagaaaaaccggccatccatcacatcccgggattcgaagtgcaagaaacttcgcggatacttgacgagtccgaagacacggacctgccctacccgccgccgcagcgcgaagcgaacatctacatggtgccgcaaaatatcaagcccgcgcttcagcgcaccgcaatcgagattctggcctggggcttgcgcaatatgaagtcatatcagctggccaacatctcttcgccatcactcgtagtggagtgcgggggacaaactgtgcagagctgtgtgatccgcaacctgagaaaaaacccaaattttgatatctgcactctctttatggaagtcatgcttcccagagaagaactctactgcccgccgatcaccgtcaaggtgatcgataataggcagttcgggcgccgccccgtggtcggacagtgtacgatcaggagcctggagtcctttctgtgcgacccttactcggccgaaagcccgtcacctcagggaggaccggacgatgtgtcgctgctgtcaccgggagaggatgtgctcatcgacatagacgataaggaacccctgatccccattcaggaagaagagttcatcgattggtggtccaaattcttcgcctccatcggagaacgggaaaaatgcggaagctacctggagaaggatttcgacaccctgaaggtgtacgatacccagctcgagaacgtggaggcttttgagggactctccgacttctgcaacactttcaagttgtacagaggcaagacgcaagaggaaactgaggatccgagcgtgattggagagttcaagggcctcttcaaaatctacccgctgcccgaagatccggcgatccctatgccccctcgccagttccaccaactcgccgctcagggaccgcaggaatgtcttgtgcgcatctacatcgtgagggcattcggtctgcagccgaaggacccgaacggaaagtgtgacccgtacatcaaaatttcaatcggaaagaagtcagtgtcagaccaggataactacatcccttgcactctcgaaccagtgtttggcaagatgttcgaactgacctgtaccctgccgctcgaaaaagacctgaagattactttgtacgattacgatttgctttctaaggacgagaagatcggggaaacggtcgtcgatttggaaaatagactcttgagcaaattcggcgctcgctgcggacttccacagacgtactgcgtgtcgggacctaaccagtggcgggaccaacttcgcccctcgcagctgcttcatctgttttgccaacagcacagggtcaaggcacctgtctacagaactgaccgcgtgatgttccaggacaaggaatactccatcgaagaaatcgaggcaggcagaattccaaatccgcacctgggacctgtcgaagaacggctcgctctccacgtgctccagcaacagggactcgtgcctgagcacgtggaatcaaggccgctctacagcccactgcagccggatatcgaacagggaaagctgcagatgtgggtggacctgtttccaaaggcgttgggacggcccggacctcccttcaacatcactccgcggcgcgccaggcgcttctttctccggtgcattatctggaatacccgcgacgtgatccttgacgacctgagcttgaccggcgagaaaatgtccgatatctacgtcaagggatggatgattgggttcgaggagcataagcaaaagactgacgtgcattacaggtccctgggaggagaaggtaacttcaattggagattcattttcccatttgattacctgccggccgagcaggtgtgcaccatcgctaaaaaagacgcgttttggcgtctggataagactgaatcgaagattcccgcgcgcgtcgtgttccagatctgggacaatgacaaattctcgttcgacgactttctgggatcgctgcagctggacctcaacagaatgccaaaaccagccaaaaccgctaagaagtgctcgttggaccagctcgacgacgccttccatcctgaatggtttgtttcgcttttcgagcagaagactgtgaagggatggtggccatgcgtggccgaggaaggtgagaaaaagatcctcgcaggcaagctggaaatgaccctggaaattgtggccgaaagcgaacatgaggaaagacccgccggtcagggtagagacgaaccaaacatgaaccctaaactggaggatccgaggcggcctgataccagcttcctgtggtttacctcaccttataagaccatgaagttcatcctgtggcgtaggttccgctgggcgatcatcttgtttatcatccttttcattctgctgctcttccttgcgatctttatctacgcattcccgaactacgcggcaatgaagctggtgaaaccgttctcc

SEQ ID NO: 48105 - DNA, 6243 bp, Artificial Sequence
  derived and/or modified sequence
atgctttgctgccttcttgtgagagcatccaaccttccatccgcgaagaaggatagacggtcagatcctgtcgcatccctcacttttcgtggagtgaagaaaagaaccaaagtgatcaagaactcggttaacccagtgtggaatgaggggttcgagtgggatcttaagggcattccgctggatcagggttcagagctgcatgttgtggttaaggatcacgagactatgggtcgaaaccgatttcttggtgaagcaaaggtgccacttcgggaagtgcttgcgaccccgtcgctgtccgctagcttcaacgcaccacttcttgacaccaagaagcaacctactggcgcaagccttgtcttgcaggtgtcctacactccactgcccggcgcagtcccactgttcccacctcccacccctcttgaaccttcccctacccttcctgatcttgacgtcgtggcagacactggtggtgaggaggatacggaagatcaagggctcaccggcgacgaagctgaaccttttcttgatcaatcggggggacccggtgcacctaccactcctaggaaactgccgtcacgtccaccgccacactacccaggtattaagcggaagcgatcagctccaacctccagaaagctgctctctgataagccacaggatttccagattcgggtgcaagtgatagaaggacgacaactcccaggagtgaatatcaagcctgtggtgaaagtgaccgcggcaggacagactaagcggaccagaattcataagggaaactcgccgctcttcaacgagactctgttctttaacctgtttgattcccccggagagctgttcgatgagcctattttcattactgtggtcgattcgcgatcccttagaaccgacgcccttcttggagagtttagaatggacgtcggtaccatctaccgggagcctcggcatgcctacctccgaaaatggctcctcctttccgatcccgatgacttcagcgcaggggcccggggctacctcaaaaccagcctgtgcgtcctgggtcctggtgacgaggcacccctggagcgcaaggacccctccgaagataaagaagatatcgaatcgaatctcctgcgcccgaccggagtggcccttcgcggagcccacttctgccttaaggtgtttagggcagaggatctgccacagatggatgacgcagtcatggataacgtgaagcagatttttggtttcgaaagcaacaagaaaaatctcgtggacccttttgtggaagtgtcctttgcaggtaagatgctgtgttctaaaatcctcgaaaagaccgccaacccacaatggaaccagaacattaccctccccgcgatgtttccaagcatgtgtgagaaaatgcggataagaatcatcgattgggataggctgacccacaatgatattgtcgcaaccacttacctctcgatgagcaagatttccgcccccggaggggaaatcgaagaagaaccagcaggggccgtgaagccatcgaaagcatccgatcttgacgactatctcggtttccttcccacctttggtccctgctacataaacctttacggatcgcctagagaatttaccggtttcccagatccttacaccgaattgaacactgggaaaggcgaaggtgtggcctaccggggacggttgctcttgtctctggaaaccaaacttgtggagcactcagaacaaaaggtggaggaccttccagcggatgatattctgagagtcgagaaatatcttagacgcagaaagtactccctttttgccgcgttttacagcgccaccatgctccaggatgtggacgatgcaattcaattcgaagtgtcgatcggcaactacggtaataagtttgatatgacttgtctgcctttggcatccaccacccaatacagcagggcggtctttgatggatgtcactattactacctgccttggggaaacgtgaagcccgtggtggtgctgagctcgtactgggaagatatctcgcatcggattgaaacccagaaccaactcctgggtatagcagatagactggaagcaggactggagcaagtgcacctcgcgctgaaagcgcaatgctccactgaggatgtcgattccctggtcgcgcagctgactgatgagcttattgccggatgttcgcagccgctgggggacattcatgagactccatcggccactcacttggaccagtacctctaccaacttcggactcatcatctttcccagataaccgaagcggcacttgcacttaagctcggacattctgaacttcctgctgcccttgagcaagctgaagattggttgctgagacttcgggcactcgcagaagagcctcagaattcgctgccagacatagtgatttggatgctgcagggagataagcgggttgcctaccaacgcgtgcctgcccatcaggttcttttttcccgtcgcggggcaaattactgcggtaagaattgtggtaagttgcaaacgatttttctgaagtaccccatggagaaggtgcctggtgccagaatgccagtgcagatacgtgtgaagctgtggttcggtctgtccgtggatgagaaagagtttaatcaatttgcagaaggaaagctgtccgtctttgcggaaacttacgaaaatgaaacgaaacttgccctggttggaaactggggaaccactggacttacctaccctaaattctcggacgttaccggaaagatcaaactgcctaaggattcatttagacccagcgcaggatggacgtgggcaggggattggttcgtgtgcccggaaaagactcttcttcacgatatggatgcaggccatctgagcttcgtggaagaggtctttgagaatcagactagactgccaggaggacaatggatctacatgagcgacaattacacggatgtgaacggggaaaaagtgctgcccaaggatgatattgaatgcccacttggatggaaatgggaagatgaggagtggtccaccgacctgaatcgtgccgtggatgaacagggatgggaatattccatcaccattccacctgagcggaagccaaagcattgggtgcctgctgaaaagatgtactacactcatagacgcaggagatgggtgagactgcggagaagagatctctcacagatggaggcgctcaagagacatagacaggcagaagccgagggcgaaggctgggaatacgcctcactgttcggttggaagtttcatttggaataccgcaagactgatgcatttcggaggagaagatggcgacgaagaatggaacctcttgaaaaaactggtcccgcagcagtctttgccctcgagggggcccttggtggtgtgatggacgataaatcggaggattcaatgtcggtgtccaccctttcattcggcgtcaatcgtcctaccatctcgtgcatttttgactacggcaaccgataccatctcagatgttacatgtaccaggcccgagatctggcggccatggataaagactcctttagcgacccttacgcaatcgtgtcctttctgcatcaatcccaaaagacggttgttgtgaagaacactcttaaccctacctgggatcaaacccttatcttctacgagatcgagatcttcggcgaacctgcaaccgtggcggaacaaccaccaagcattgtcgtggaactttacgatcatgacacgtacggtgccgatgagtttatgggaaggtgtatctgtcagccaagccttgaacgtatgcctcgcttggcttggtttcctttgacgaggggttcacaacctagcggggaacttttggcgagctttgaacttattcaacgggagaaacctgccattcaccatattcctggttttgaagtccaagagacttcgcgaattctggacgaatcggaggacaccgatctgccatatcctccaccacagcgtgaggcaaatatctacatggtgccccaaaacatcaagccagcactgcagagaacggctatcgaaatcctggcatggggattgagaaacatgaagtcataccaactcgcaaatatcagctcgccttcgctggtggtcgaatgtgggggtcaaaccgtgcagtcgtgcgtgattagaaatctgagaaagaacccaaacttcgatatttgtacccttttcatggaagtcatgctccctcgggaagagttgtactgccccccgattactgtcaaggtcattgacaacagacagttcggaagaaggccagtggtgggacaatgcactatcaggagccttgaatcatttctctgcgacccttactcggcagagagccctagcccccagggtggaccagatgatgtgagccttctttcacctggagaagatgtgcttattgatatagacgataaagaaccactcattccaatacaggaagaggagtttattgattggtggagcaagttttttgcctccattggcgaacgagaaaagtgtggaagctatcttgagaaggattttgataccttgaaggtctacgatacccagctcgaaaatgtcgaagcgtttgagggactgtcggatttttgcaacacgttcaaactctaccgcggtaagactcaagaggagacggaagatccatcggtgataggggaattcaaaggactgtttaagatctacccgctgccggaagatccagcaatccctatgccgcctcggcaatttcatcaacttgctgcacaagggcctcaagaatgcctggtccgtatttacatcgtgagagcatttggccttcaacctaaagaccccaatggcaagtgtgatccttacattaagatctcgattggtaagaagtcagttagcgatcaggacaactacattccatgtacgctggaaccggtctttgggaaaatgttcgaactgacctgcacgctgccacttgaaaaggatttgaagattacgctctacgactatgatctccttagtaaagatgaaaagattggcgaaaccgtcgtggacctggaaaaccggcttctttcgaaattcggagcaaggtgtggactcccgcaaacctactgcgtgagcgggccaaaccaatggcgggaccaacttaggccttcccagctgctgcaccttttctgtcagcagcatagagtgaaagcgcctgtgtacagaaccgatagagtcatgtttcaagataaggaatatagtattgaggagatcgaagctggtcgtatacctaatcctcatcttggcccagtggaagaacgtctggcccttcacgtgctgcagcagcaagggctggtgcctgagcacgtcgaatcaagacctctgtacagccctttgcagcctgacatagagcaaggtaaattgcaaatgtgggtggacctgtttcccaaagcgcttggacgcccgggaccaccttttaacattacccccagaagagcccggcgcttttttcttaggtgtatcatatggaacactcgtgatgtgattctcgacgacctgtcgctgaccggagagaagatgtcagacatttacgtgaagggatggatgataggattcgaagagcataagcaaaagaccgatgtgcactacaggagcctgggtggagaaggcaactttaactggcgtttcatctttccctttgattaccttccagccgaacaggtgtgtactattgctaagaaggacgcattctggagacttgacaagaccgaatcaaagattccagcaagggtggtgtttcagatctgggataatgacaagttctcgttcgatgactttcttggatcacttcaacttgaccttaatcgcatgcctaagcctgcaaaaactgcaaagaaatgttcgctggatcagctggacgacgcattccacccggagtggtttgtgtccctgtttgagcagaaaactgtgaaaggatggtggccttgcgtggccgaggagggagaaaagaaaattctcgcggggaaactcgaaatgaccctggaaattgtcgcagaatccgagcacgaagagaggccagcaggacagggaagagatgaacctaacatgaacccaaaacttgaggaccctagacgtccagatacttcctttctctggtttacgagcccatacaaaaccatgaagtttattctttggaggagattccgttgggccatcatcctctttatcattctgttcatattgctcctgttcctcgccatcttcatttatgccttcccaaattacgcagcgatgaaacttgtcaagccattctcg

SEQ ID NO: 48106 - DNA, 6243 bp, Artificial Sequence
  derived and/or modified sequence
atgctgtgctgcctgctggtgcgcgccagcaacctgcccagcgccaagaaggaccgccgcagcgaccccgtggccagcctgaccttccgcggcgtgaagaagcgcaccaaggtgatcaagaacagcgtgaaccccgtgtggaacgagggcttcgagtgggacctgaagggcatccccctggaccagggcagcgagctgcacgtggtggtgaaggaccacgagaccatgggccgcaaccgcttcctgggcgaggccaaggtgcccctgcgcgaggtgctggccacccccagcctgagcgccagcttcaacgcccccctgctggacaccaagaagcagcccaccggcgccagcctggtgctgcaggtgagctacacccccctgcccggcgccgtgcccctgttccccccccccacccccctggagcccagccccaccctgcccgacctggacgtggtggccgacaccggcggcgaggaggacaccgaggaccagggcctgaccggcgacgaggccgagcccttcctggaccagagcggcggccccggcgcccccaccaccccccgcaagctgcccagccgcccccccccccactaccccggcatcaagcgcaagcgcagcgcccccaccagccgcaagctgctgagcgacaagccccaggacttccagatccgcgtgcaggtgatcgagggccgccagctgcccggcgtgaacatcaagcccgtggtgaaggtgaccgccgccggccagaccaagcgcacccgcatccacaagggcaacagccccctgttcaacgagaccctgttcttcaacctgttcgacagccccggcgagctgttcgacgagcccatcttcatcaccgtggtggacagccgcagcctgcgcaccgacgccctgctgggcgagttccgcatggacgtgggcaccatctaccgcgagccccgccacgcctacctgcgcaagtggctgctgctgagcgaccccgacgacttcagcgccggcgcccgcggctacctgaagaccagcctgtgcgtgctgggccccggcgacgaggcccccctggagcgcaaggaccccagcgaggacaaggaggacatcgagagcaacctgctgcgccccaccggcgtggccctgcgcggcgcccacttctgcctgaaggtgttccgcgccgaggacctgccccagatggacgacgccgtgatggacaacgtgaagcagatcttcggcttcgagagcaacaagaagaacctggtggaccccttcgtggaggtgagcttcgccggcaagatgctgtgcagcaagatcctggagaagaccgccaacccccagtggaaccagaacatcaccctgcccgccatgttccccagcatgtgcgagaagatgcgcatccgcatcatcgactgggaccgcctgacccacaacgacatcgtggccaccacctacctgagcatgagcaagatcagcgcccccggcggcgagatcgaggaggagcccgccggcgccgtgaagcccagcaaggccagcgacctggacgactacctgggcttcctgcccaccttcggcccctgctacatcaacctgtacggcagcccccgcgagttcaccggcttccccgacccctacaccgagctgaacaccggcaagggcgagggcgtggcctaccgcggccgcctgctgctgagcctggagaccaagctggtggagcacagcgagcagaaggtggaggacctgcccgccgacgacatcctgcgcgtggagaagtacctgcgccgccgcaagtacagcctgttcgccgccttctacagcgccaccatgctgcaggacgtggacgacgccatccagttcgaggtgagcatcggcaactacggcaacaagttcgacatgacctgcctgcccctggccagcaccacccagtacagccgcgccgtgttcgacggctgccactactactacctgccctggggcaacgtgaagcccgtggtggtgctgagcagctactgggaggacatcagccaccgcatcgagacccagaaccagctgctgggcatcgccgaccgcctggaggccggcctggagcaggtgcacctggccctgaaggcccagtgcagcaccgaggacgtggacagcctggtggcccagctgaccgacgagctgatcgccggctgcagccagcccctgggcgacatccacgagacccccagcgccacccacctggaccagtacctgtaccagctgcgcacccaccacctgagccagatcaccgaggccgccctggccctgaagctgggccacagcgagctgcccgccgccctggagcaggccgaggactggctgctgcgcctgcgcgccctggccgaggagccccagaacagcctgcccgacatcgtgatctggatgctgcagggcgacaagcgcgtggcctaccagcgcgtgcccgcccaccaggtgctgttcagccgccgcggcgccaactactgcggcaagaactgcggcaagctgcagaccatcttcctgaagtaccccatggagaaggtgcccggcgcccgcatgcccgtgcagatccgcgtgaagctgtggttcggcctgagcgtggacgagaaggagttcaaccagttcgccgagggcaagctgagcgtgttcgccgagacctacgagaacgagaccaagctggccctggtgggcaactggggcaccaccggcctgacctaccccaagttcagcgacgtgaccggcaagatcaagctgcccaaggacagcttccgccccagcgccggctggacctgggccggcgactggttcgtgtgccccgagaagaccctgctgcacgacatggacgccggccacctgagcttcgtggaggaggtgttcgagaaccagacccgcctgcccggcggccagtggatctacatgagcgacaactacaccgacgtgaacggcgagaaggtgctgcccaaggacgacatcgagtgccccctgggctggaagtgggaggacgaggagtggagcaccgacctgaaccgcgccgtggacgagcagggctgggagtacagcatcaccatcccccccgagcgcaagcccaagcactgggtgcccgccgagaagatgtactacacccaccgccgccgccgctgggtgcgcctgcgccgccgcgacctgagccagatggaggccctgaagcgccaccgccaggccgaggccgagggcgagggctgggagtacgccagcctgttcggctggaagttccacctggagtaccgcaagaccgacgccttccgccgccgccgctggcgccgccgcatggagcccctggagaagaccggccccgccgccgtgttcgccctggagggcgccctgggcggcgtgatggacgacaagagcgaggacagcatgagcgtgagcaccctgagcttcggcgtgaaccgccccaccatcagctgcatcttcgactacggcaaccgctaccacctgcgctgctacatgtaccaggcccgcgacctggccgccatggacaaggacagcttcagcgacccctacgccatcgtgagcttcctgcaccagagccagaagaccgtggtggtgaagaacaccctgaaccccacctgggaccagaccctgatcttctacgagatcgagatcttcggcgagcccgccaccgtggccgagcagccccccagcatcgtggtggagctgtacgaccacgacacctacggcgccgacgagttcatgggccgctgcatctgccagcccagcctggagcgcatgccccgcctggcctggttccccctgacccgcggcagccagcccagcggcgagctgctggccagcttcgagctgatccagcgcgagaagcccgccatccaccacatccccggcttcgaggtgcaggagaccagccgcatcctggacgagagcgaggacaccgacctgccctacccccccccccagcgcgaggccaacatctacatggtgccccagaacatcaagcccgccctgcagcgcaccgccatcgagatcctggcctggggcctgcgcaacatgaagagctaccagctggccaacatcagcagccccagcctggtggtggagtgcggcggccagaccgtgcagagctgcgtgatccgcaacctgcgcaagaaccccaacttcgacatctgcaccctgttcatggaggtgatgctgccccgcgaggagctgtactgcccccccatcaccgtgaaggtgatcgacaaccgccagttcggccgccgccccgtggtgggccagtgcaccatccgcagcctggagagcttcctgtgcgacccctacagcgccgagagccccagcccccagggcggccccgacgacgtgagcctgctgagccccggcgaggacgtgctgatcgacatcgacgacaaggagcccctgatccccatccaggaggaggagttcatcgactggtggagcaagttcttcgccagcatcggcgagcgcgagaagtgcggcagctacctggagaaggacttcgacaccctgaaggtgtacgacacccagctggagaacgtggaggccttcgagggcctgagcgacttctgcaacaccttcaagctgtaccgcggcaagacccaggaggagaccgaggaccccagcgtgatcggcgagttcaagggcctgttcaagatctaccccctgcccgaggaccccgccatccccatgcccccccgccagttccaccagctggccgcccagggcccccaggagtgcctggtgcgcatctacatcgtgcgcgccttcggcctgcagcccaaggaccccaacggcaagtgcgacccctacatcaagatcagcatcggcaagaagagcgtgagcgaccaggacaactacatcccctgcaccctggagcccgtgttcggcaagatgttcgagctgacctgcaccctgcccctggagaaggacctgaagatcaccctgtacgactacgacctgctgagcaaggacgagaagatcggcgagaccgtggtggacctggagaaccgcctgctgagcaagttcggcgcccgctgcggcctgccccagacctactgcgtgagcggccccaaccagtggcgcgaccagctgcgccccagccagctgctgcacctgttctgccagcagcaccgcgtgaaggcccccgtgtaccgcaccgaccgcgtgatgttccaggacaaggagtacagcatcgaggagatcgaggccggccgcatccccaacccccacctgggccccgtggaggagcgcctggccctgcacgtgctgcagcagcagggcctggtgcccgagcacgtggagagccgccccctgtacagccccctgcagcccgacatcgagcagggcaagctgcagatgtgggtggacctgttccccaaggccctgggccgccccggcccccccttcaacatcaccccccgccgcgcccgccgcttcttcctgcgctgcatcatctggaacacccgcgacgtgatcctggacgacctgagcctgaccggcgagaagatgagcgacatctacgtgaagggctggatgatcggcttcgaggagcacaagcagaagaccgacgtgcactaccgcagcctgggcggcgagggcaacttcaactggcgcttcatcttccccttcgactacctgcccgccgagcaggtgtgcaccatcgccaagaaggacgccttctggcgcctggacaagaccgagagcaagatccccgcccgcgtggtgttccagatctgggacaacgacaagttcagcttcgacgacttcctgggcagcctgcagctggacctgaaccgcatgcccaagcccgccaagaccgccaagaagtgcagcctggaccagctggacgacgccttccaccccgagtggttcgtgagcctgttcgagcagaagaccgtgaagggctggtggccctgcgtggccgaggagggcgagaagaagatcctggccggcaagctggagatgaccctggagatcgtggccgagagcgagcacgaggagcgccccgccggccagggccgcgacgagcccaacatgaaccccaagctggaggacccccgccgccccgacaccagcttcctgtggttcaccagcccctacaagaccatgaagttcatcctgtggcgccgcttccgctgggccatcatcctgttcatcatcctgttcatcctgctgctgttcctggccatcttcatctacgccttccccaactacgccgccatgaagctggtgaagcccttcagc

SEQ ID NO: 48107 - DNA, 6389 bp, Artificial Sequence
  derived and/or modified sequence
gggaaataagagagaaaagaagagtaagaagaaatataagagccaccatgctgtgctgtctcttggtacgggcttcgaatcttccatcagccaagaaggacaggcggtccgaccctgtagcatcgcttacgttcaggggagtcaagaagagaacaaaggtcattaaaaactcagtaaaccccgtgtggaacgaggggttcgagtgggatttgaaggggatccctctcgatcagggttcagagttgcacgtagtagtgaaagaccatgaaacgatggggcgaaaccgcttcttgggggaagcgaaggtccccctcagagaggtcttggctacgccgtcgttgtcggccagctttaacgccccgttgctggatacgaagaaacagccgacgggagcctcactcgtgttgcaagtatcgtatactccgcttcccggggcggtccccctttttcctcccccgacaccgcttgagcctagccccactctgcccgatctggatgtggtcgcggacactggtggagaagaggacacagaggaccaggggttgactggggacgaggcagagcccttcctcgatcagtcgggcgggcctggtgctcccactacaccgcggaaactccctagccggcctcccccgcactatccagggattaagagaaaaaggagcgcaccgacaagccgcaaactcttgtccgacaaaccgcaggacttccaaatcagggtgcaggtcattgagggacgccagctccccggagtgaatatcaagcccgtagtaaaagtgaccgcggcaggtcaaacaaaaaggacacggattcataaaggaaattccccgctcttcaacgagacattgttctttaatctctttgattcaccgggagagctcttcgacgaacctatctttatcactgtggtcgattcccgctcacttcggaccgacgcgctccttggagagtttaggatggatgtagggacaatctatcgagaaccgaggcatgcttatcttagaaagtggctgctgttgtcggatcccgatgacttctccgccggagcacgggggtatctcaagacgagcctctgcgtcttgggaccgggggatgaagcgcccctcgagcgcaaggatccgtccgaggacaaagaggacatcgagagcaacttgttgcggccgactggcgtggccctgagaggagcccatttctgtctcaaggtctttagggccgaggatctcccacaaatggatgacgccgtaatggataacgtgaagcagattttcggttttgaatccaataagaagaatcttgtcgatccgtttgtcgaggtctcgtttgccggaaagatgctttgcagcaagatccttgaaaagacagcaaacccccagtggaatcaaaacatcacgctgccagctatgtttccgtccatgtgtgagaagatgagaattcgcatcatcgactgggatcggcttacgcacaacgacatcgtcgccaccacctatctgtcgatgtcgaagatctcagcaccagggggtgaaattgaggaagagcctgccggtgcagtgaaaccgtcaaaggcgtcggatttggatgactatctgggttttcttcccacatttggaccttgctacatcaacctttacggctcgcctcgggaattcaccggattccccgacccctatacggaactgaatacagggaagggtgagggggtggcatacagaggtaggcttctgttgtcgctcgagacaaagcttgtagagcactcggagcagaaggtcgaggacctgccggcagacgatattctgcgagtggagaaatatttgcggcggcggaagtattcgctctttgcggcattctacagcgctactatgctgcaagatgtcgacgacgcgatccagttcgaagtatcgatcggaaattatggtaataagttcgatatgacgtgtcttccactcgcttcaaccacgcagtattcgagagcggtgttcgatggatgccactactactatctgccttggggaaatgtcaaacccgtcgtggtcctctcgtcctattgggaagatatttcacaccgcatcgagacgcagaaccagctgctgggaatcgccgataggttggaagccgggttggagcaggtgcatctcgcgctcaaggcgcagtgcagcactgaggacgtcgactcgctggtagctcaacttacagacgagctgattgcggggtgtagccagcccctgggtgatatccacgagacaccctcggcgactcacctcgaccagtatttgtaccagctccgcacccaccacctgtcgcaaattacagaggctgccctggcgctgaagctgggacactccgaactgcccgcagcgttggagcaggcggaagattggctccttaggttgagggcgctcgccgaggagcctcagaatagcctccctgatattgtcatctggatgttgcagggggataaacgagtggcctaccagagggtcccggcgcatcaagtccttttttcaagacggggagccaactactgtgggaaaaactgcggaaagctgcaaaccatttttctcaagtaccccatggagaaggtgcccggtgcacgcatgcccgtccagatccgcgtcaaactgtggtttgggctctcggtcgacgagaaggagtttaatcaatttgcagagggcaaactctcggtgtttgcggagacttatgagaacgaaacgaagttggcattggtggggaattggggaactacgggacttacgtacccgaagtttagcgatgtgacagggaagattaaacttcccaaagactcctttagaccgtcagcagggtggacatgggcgggtgactggttcgtgtgccccgagaaaaccttgttgcatgacatggacgctggtcatctctcattcgtagaggaagtgttcgaaaaccaaaccagattgccgggtggacaatggatctatatgtcagataactacacagatgtcaatggggaaaaagtgcttcccaaagatgacattgagtgccctttggggtggaagtgggaggacgaagagtggagcacggacctcaatagggcggtagacgaacaggggtgggaatattcaattacgatcccacccgagaggaagccaaagcactgggtgcctgccgagaagatgtattacacgcaccgaaggagaaggtgggtcagattgcgacggcgcgacttgagccagatggaggcgcttaaaagacaccgacaggcggaagccgaaggagaaggttgggagtacgcctcactcttcggatggaaatttcatctggagtatagaaagacagatgcctttagacgcaggcggtggaggagaaggatggagcctttggagaaaactggtcccgctgccgtctttgcgctggaaggcgcacttggcggggtcatggacgataagtccgaggactccatgagcgtctccaccctgtccttcggcgtcaataggccaacgatctcgtgtatcttcgattatgggaatcggtaccatctccgatgctacatgtaccaggctcgcgatcttgcggcaatggacaaagacagcttttcggatccttacgcgatcgtctcgtttttgcatcagtcgcagaaaaccgtcgtagtgaagaatactctcaacccgacgtgggaccagacattgatcttttacgagatcgagatctttggggagcctgcgacggtggccgagcagccgccctcgatcgtagtcgaattgtatgaccatgatacatatggagcagatgagtttatggggcggtgcatctgtcagccctcactggagagaatgccgagactcgcatggtttccgttgaccagaggatcgcaacccagcggtgaactcctcgcctcgtttgaattgattcagagagagaagcctgcgatccatcatatccccggcttcgaggtccaagaaacgtcgcgcattttggacgaaagcgaagataccgatctcccgtacccacccccgcaacgagaggcaaacatctacatggtaccgcagaacatcaagccagcccttcaacgcacggccatcgaaatcctcgcatgggggttgcgaaatatgaagtcgtatcagttggccaacatttcctcgccttcgctcgtggtcgaatgtggcgggcaaacggtccaatcgtgcgtgatccgcaacctccgcaagaatcccaatttcgatatctgcacactcttcatggaagtcatgttgccgcgcgaggagctgtactgtccgccgattaccgtcaaagtgatcgacaaccgccagttcggccgccgcccggtggtaggacagtgcacaatccgctcgctggagagctttttgtgcgacccctatagcgcggagtccccctcgccgcagggcggtcctgatgacgtctcattgcttagccccggagaggacgtgctgatcgacattgacgataaggagccgctcatcccaatccaagaagaagagttcatcgattggtggtcaaaatttttcgcatccattggtgagagggagaagtgcgggtcctatcttgaaaaagacttcgacactctcaaagtatacgacactcagctggagaacgtcgaggcctttgaaggactctcggacttctgtaatacattcaaactctacagaggaaaaacgcaggaagagacagaggacccctcggtcattggcgagtttaagggtctcttcaagatctacccgcttccagaggatcctgccatcccgatgccacctcgccagttccaccagctcgccgcgcaagggccccaggagtgccttgtccgaatctacatcgtaagagcgttcggacttcagcccaaggatcccaatggaaaatgtgacccgtatatcaagatttcgatcggcaaaaagtcggtatcagatcaggacaactatattccgtgcacacttgagcccgtattcggaaagatgttcgagctcacgtgcacgctgccgctcgaaaaggacctcaagatcacactttatgattatgaccttctctcgaaggatgaaaagattggcgaaacggtcgtggaccttgaaaatagactccttagcaagttcggagcaaggtgcggactgccccagacgtattgcgtgtcggggcccaaccagtggcgggatcagcttcggccatcacagctgctgcacctcttttgccagcagcatagggtgaaagccccagtgtatcggacagatagagtcatgtttcaggataaagagtactcaatcgaggagattgaagcaggtagaatccccaacccgcacctcggacccgtggaagaacggctcgcgttgcacgtccttcagcagcagggtttggtacccgaacacgtagagtcgcgcccattgtactcgcccttgcaaccagatattgaacagggaaagttgcagatgtgggtagacctcttccccaaagcgctcggtagacccggaccaccttttaacattaccccacgcagggcgagacgattctttttgcggtgtattatctggaacacccgcgatgtcatcctcgatgacctctcgctcaccggagaaaagatgtcggatatctacgtaaagggatggatgatcggatttgaggaacacaagcagaaaacagacgtgcattaccgatcactcgggggagaaggaaactttaactggcgctttatctttcccttcgactatcttcccgccgaacaagtctgtacaattgcgaaaaaggacgcattctggcgattggataaaacggaatccaaaattcccgcacgcgtagtatttcagatctgggacaatgataagttctcatttgacgactttctggggtccctgcagttggatctgaacaggatgccgaagcctgccaagacggccaaaaagtgttcactcgatcaactggacgacgccttccacccggagtggtttgtatcgctttttgagcagaaaacagtcaaaggttggtggccttgtgtggcggaagagggggaaaagaaaattctcgcgggcaagctcgagatgacgcttgagatcgtcgccgagtccgagcacgaggagagaccagctggacaaggccgggatgagcccaacatgaatccgaagctggaggacccgcgacgccctgataccagcttcctctggtttacgtcgccctataagactatgaaattcatcctctggaggagattcagatgggcgatcatcttgttcatcatccttttcatcttgcttctgtttttggcgatctttatctacgccttcccgaactacgcagccatgaagcttgtcaagcccttttcatgaagcgctgccttctgcggggcttgccttctggccatgcccttcttctctcccttgcacctgtacctcttggtctttgaataaagcctgagtaggaag

SEQ ID NO: 48108 - DNA, 6246 bp, Artificial Sequence
  derived and/or modified sequence
atgctgtgctgcctgctggtgagagccagcaacctgcccagcgccaagaaggacagaagaagcgaccccgtggccagcctgaccttcagaggcgtgaagaagagaaccaaggtgatcaagaacagcgtgaaccccgtgtggaacgagggcttcgagtgggacctgaagggcatccccctggaccagggcagcgagctgcacgtggtggtgaaggaccacgagaccatgggcagaaacagattcctgggcgaggccaaggtgcccctgagagaggtgctggccacccccagcctgagcgccagcttcaacgcccccctgctggacaccaagaagcagcccaccggcgccagcctggtgctgcaggtgagctacacccccctgcccggcgccgtgcccctgttccccccccccacccccctggagcccagccccaccctgcccgacctggacgtggtggccgacaccggcggcgaggaggacaccgaggaccagggcctgaccggcgacgaggccgagcccttcctggaccagagcggcggccccggcgcccccaccacccccagaaagctgcccagcagaccccccccccactaccccggcatcaagagaaagagaagcgcccccaccagcagaaagctgctgagcgacaagccccaggacttccagatcagagtgcaggtgatcgagggcagacagctgcccggcgtgaacatcaagcccgtggtgaaggtgaccgccgccggccagaccaagagaaccagaatccacaagggcaacagccccctgttcaacgagaccctgttcttcaacctgttcgacagccccggcgagctgttcgacgagcccatcttcatcaccgtggtggacagcagaagcctgagaaccgacgccctgctgggcgagttcagaatggacgtgggcaccatctacagagagcccagacacgcctacctgagaaagtggctgctgctgagcgaccccgacgacttcagcgccggcgccagaggctacctgaagaccagcctgtgcgtgctgggccccggcgacgaggcccccctggagagaaaggaccccagcgaggacaaggaggacatcgagagcaacctgctgagacccaccggcgtggccctgagaggcgcccacttctgcctgaaggtgttcagagccgaggacctgccccagatggacgacgccgtgatggacaacgtgaagcagatcttcggcttcgagagcaacaagaagaacctggtggaccccttcgtggaggtgagcttcgccggcaagatgctgtgcagcaagatcctggagaagaccgccaacccccagtggaaccagaacatcaccctgcccgccatgttccccagcatgtgcgagaagatgagaatcagaatcatcgactgggacagactgacccacaacgacatcgtggccaccacctacctgagcatgagcaagatcagcgcccccggcggcgagatcgaggaggagcccgccggcgccgtgaagcccagcaaggccagcgacctggacgactacctgggcttcctgcccaccttcggcccctgctacatcaacctgtacggcagccccagagagttcaccggcttccccgacccctacaccgagctgaacaccggcaagggcgagggcgtggcctacagaggcagactgctgctgagcctggagaccaagctggtggagcacagcgagcagaaggtggaggacctgcccgccgacgacatcctgagagtggagaagtacctgagaagaagaaagtacagcctgttcgccgccttctacagcgccaccatgctgcaggacgtggacgacgccatccagttcgaggtgagcatcggcaactacggcaacaagttcgacatgacctgcctgcccctggccagcaccacccagtacagcagagccgtgttcgacggctgccactactactacctgccctggggcaacgtgaagcccgtggtggtgctgagcagctactgggaggacatcagccacagaatcgagacccagaaccagctgctgggcatcgccgacagactggaggccggcctggagcaggtgcacctggccctgaaggcccagtgcagcaccgaggacgtggacagcctggtggcccagctgaccgacgagctgatcgccggctgcagccagcccctgggcgacatccacgagacccccagcgccacccacctggaccagtacctgtaccagctgagaacccaccacctgagccagatcaccgaggccgccctggccctgaagctgggccacagcgagctgcccgccgccctggagcaggccgaggactggctgctgagactgagagccctggccgaggagccccagaacagcctgcccgacatcgtgatctggatgctgcagggcgacaagagagtggcctaccagagagtgcccgcccaccaggtgctgttcagcagaagaggcgccaactactgcggcaagaactgcggcaagctgcagaccatcttcctgaagtaccccatggagaaggtgcccggcgccagaatgcccgtgcagatcagagtgaagctgtggttcggcctgagcgtggacgagaaggagttcaaccagttcgccgagggcaagctgagcgtgttcgccgagacctacgagaacgagaccaagctggccctggtgggcaactggggcaccaccggcctgacctaccccaagttcagcgacgtgaccggcaagatcaagctgcccaaggacagcttcagacccagcgccggctggacctgggccggcgactggttcgtgtgccccgagaagaccctgctgcacgacatggacgccggccacctgagcttcgtggaggaggtgttcgagaaccagaccagactgcccggcggccagtggatctacatgagcgacaactacaccgacgtgaacggcgagaaggtgctgcccaaggacgacatcgagtgccccctgggctggaagtgggaggacgaggagtggagcaccgacctgaacagagccgtggacgagcagggctgggagtacagcatcaccatcccccccgagagaaagcccaagcactgggtgcccgccgagaagatgtactacacccacagaagaagaagatgggtgagactgagaagaagagacctgagccagatggaggccctgaagagacacagacaggccgaggccgagggcgagggctgggagtacgccagcctgttcggctggaagttccacctggagtacagaaagaccgacgccttcagaagaagaagatggagaagaagaatggagcccctggagaagaccggccccgccgccgtgttcgccctggagggcgccctgggcggcgtgatggacgacaagagcgaggacagcatgagcgtgagcaccctgagcttcggcgtgaacagacccaccatcagctgcatcttcgactacggcaacagataccacctgagatgctacatgtaccaggccagagacctggccgccatggacaaggacagcttcagcgacccctacgccatcgtgagcttcctgcaccagagccagaagaccgtggtggtgaagaacaccctgaaccccacctgggaccagaccctgatcttctacgagatcgagatcttcggcgagcccgccaccgtggccgagcagccccccagcatcgtggtggagctgtacgaccacgacacctacggcgccgacgagttcatgggcagatgcatctgccagcccagcctggagagaatgcccagactggcctggttccccctgaccagaggcagccagcccagcggcgagctgctggccagcttcgagctgatccagagagagaagcccgccatccaccacatccccggcttcgaggtgcaggagaccagcagaatcctggacgagagcgaggacaccgacctgccctacccccccccccagagagaggccaacatctacatggtgccccagaacatcaagcccgccctgcagagaaccgccatcgagatcctggcctggggcctgagaaacatgaagagctaccagctggccaacatcagcagccccagcctggtggtggagtgcggcggccagaccgtgcagagctgcgtgatcagaaacctgagaaagaaccccaacttcgacatctgcaccctgttcatggaggtgatgctgcccagagaggagctgtactgcccccccatcaccgtgaaggtgatcgacaacagacagttcggcagaagacccgtggtgggccagtgcaccatcagaagcctggagagcttcctgtgcgacccctacagcgccgagagccccagcccccagggcggccccgacgacgtgagcctgctgagccccggcgaggacgtgctgatcgacatcgacgacaaggagcccctgatccccatccaggaggaggagttcatcgactggtggagcaagttcttcgccagcatcggcgagagagagaagtgcggcagctacctggagaaggacttcgacaccctgaaggtgtacgacacccagctggagaacgtggaggccttcgagggcctgagcgacttctgcaacaccttcaagctgtacagaggcaagacccaggaggagaccgaggaccccagcgtgatcggcgagttcaagggcctgttcaagatctaccccctgcccgaggaccccgccatccccatgccccccagacagttccaccagctggccgcccagggcccccaggagtgcctggtgagaatctacatcgtgagagccttcggcctgcagcccaaggaccccaacggcaagtgcgacccctacatcaagatcagcatcggcaagaagagcgtgagcgaccaggacaactacatcccctgcaccctggagcccgtgttcggcaagatgttcgagctgacctgcaccctgcccctggagaaggacctgaagatcaccctgtacgactacgacctgctgagcaaggacgagaagatcggcgagaccgtggtggacctggagaacagactgctgagcaagttcggcgccagatgcggcctgccccagacctactgcgtgagcggccccaaccagtggagagaccagctgagacccagccagctgctgcacctgttctgccagcagcacagagtgaaggcccccgtgtacagaaccgacagagtgatgttccaggacaaggagtacagcatcgaggagatcgaggccggcagaatccccaacccccacctgggccccgtggaggagagactggccctgcacgtgctgcagcagcagggcctggtgcccgagcacgtggagagcagacccctgtacagccccctgcagcccgacatcgagcagggcaagctgcagatgtgggtggacctgttccccaaggccctgggcagacccggcccccccttcaacatcacccccagaagagccagaagattcttcctgagatgcatcatctggaacaccagagacgtgatcctggacgacctgagcctgaccggcgagaagatgagcgacatctacgtgaagggctggatgatcggcttcgaggagcacaagcagaagaccgacgtgcactacagaagcctgggcggcgagggcaacttcaactggagattcatcttccccttcgactacctgcccgccgagcaggtgtgcaccatcgccaagaaggacgccttctggagactggacaagaccgagagcaagatccccgccagagtggtgttccagatctgggacaacgacaagttcagcttcgacgacttcctgggcagcctgcagctggacctgaacagaatgcccaagcccgccaagaccgccaagaagtgcagcctggaccagctggacgacgccttccaccccgagtggttcgtgagcctgttcgagcagaagaccgtgaagggctggtggccctgcgtggccgaggagggcgagaagaagatcctggccggcaagctggagatgaccctggagatcgtggccgagagcgagcacgaggagagacccgccggccagggcagagacgagcccaacatgaaccccaagctggaggaccccagaagacccgacaccagcttcctgtggttcaccagcccctacaagaccatgaagttcatcctgtggagaagattcagatgggccatcatcctgttcatcatcctgttcatcctgctgctgttcctggccatcttcatctacgccttccccaactacgccgccatgaagctggtgaagcccttcagctag

SEQ ID NO: 48109 - DNA, 6246 bp, Artificial Sequence
  derived and/or modified sequence
atgctttgctgcctgcttgtacgggcttcaaacctgcctagtgctaaaaaagatcgccgcagcgatccagtggctagtctcacattcagaggcgtgaagaagaggacaaaggttataaagaattctgtgaaccctgtctggaatgaaggtttcgaatgggacctgaaggggattccattagaccagggatctgagcttcatgtcgtggtcaaagaccacgagaccatgggacggaataggtttctcggtgaggccaaagtgcccttgcgcgaggtcctggctaccccttccctgtctgcttcatttaacgcgcctcttctggatacaaaaaagcagcccacgggagcttctctagtgctgcaggttagctacaccccgctgcctggcgctgtgcccctgttccctcctcctacacccctggaacccagcccaaccttgcctgacctcgacgtcgtcgcagacaccggtggcgaggaagataccgaggatcagggccttacaggagacgaggccgagccgttcctcgatcagtctggagggccaggcgcgcccacaactcctaggaaactgcctagcagacccccgccacattaccccgggattaagcgcaaacgcagcgcaccaacgtcacggaagttgctttctgacaagccccaggacttccagattcgggtgcaggtaattgagggtcgtcagctgcccggcgtcaacataaagcctgtcgtcaaagtaacagcggctggtcaaacaaaaaggaccagaatacacaagggcaactcaccgctgttcaatgaaactctgttcttcaatttgttcgactctccaggcgaactctttgacgagccgatattcatcacagtcgttgattcaaggagtttacgcaccgacgctctcctgggtgaattccggatggacgttggcacaatttaccgggagccgcggcacgcttacttaagaaagtggttgctcttatcggatcctgacgatttcagcgccggagcaagaggctaccttaaaacaagcctttgcgtgctgggacctggtgatgaagccccactcgagagaaaagacccatctgaagataaagaggacattgagtccaatctgctgcggcccacaggagtggctctcagaggcgcccatttctgtttaaaagtatttcgtgcagaagaccttccccagatggatgacgctgtgatggataacgtgaaacagattttcggcttcgaaagcaacaaaaagaacctcgtagacccttttgttgaggttagcttcgccggtaaaatgctttgtagcaagattttggaaaagactgcgaatccacagtggaaccagaatataactctgcccgccatgttccccagcatgtgcgaaaaaatgcggatcaggataattgattgggatcgcctgacacacaatgacatagtggccactacgtacctgagcatgtctaagatctctgcccccggcggggagattgaagaggagcctgcaggggcagtgaagccatccaaagcctccgacctggatgactacctgggattcttgccgacatttggcccctgttacatcaatctatacggttcccctagggagtttaccggattcccagatccttacactgaattaaataccggaaagggagaaggagttgcctatagaggacgcctgctgttatcgctggaaaccaagctggtggaacattctgaacagaaggtggaagacctccccgcagacgatattctgcgtgtggaaaagtatttgaggcgtcggaagtactccttattcgccgcattttattcagcaactatgctgcaagacgtcgacgatgcaatacagttcgaggtatccattggaaactatggtaacaaattcgatatgacatgtttgccgctcgcctcaaccacgcagtatagtcgtgccgttttcgacgggtgccactattactatctcccctggggcaacgtgaaaccagtggtcgttctaagctcatactgggaggatatatctcaccgaattgaaactcagaatcagctcctaggcatcgccgataggctggaggcaggtctggaacaggttcatcttgctctcaaggcacaatgcagtactgaggatgtagattccctggttgcccagctcaccgatgagctcattgccgggtgtagccagcctctgggggacatccacgaaacaccaagcgcaacacacctggatcagtatctttaccagctgaggactcaccacctgtcccaaattaccgaggcagcactggccctcaagttggggcacagcgaattacccgccgcccttgaacaggctgaggactggctcctgagactgcgcgccctggccgaagaaccacaaaactcccttccggatatcgtgatttggatgctgcaaggcgataagcgggttgcttatcagcgtgtaccggcccaccaggtgctcttctctaggcgaggcgcaaactactgtgggaaaaattgtggcaagctgcagactatcttcttaaaatatcctatggaaaaagtaccaggggcgaggatgccggtacagattcgggtgaaactgtggtttgggctgagcgtcgatgaaaaagaattcaatcagtttgcagagggcaaactgagcgttttcgccgagacatacgagaacgaaaccaagctggcactggtgggaaattggggaactacagggcttacctatcctaaattctctgacgttaccggcaaaatcaagctccccaaggatagctttcgtccctctgccggatggacttgggcaggcgattggtttgtgtgtccagagaagaccctgttacacgacatggacgccggacacctaagttttgttgaagaagtcttcgagaaccagacgcgcctgcccggcggccagtggatctacatgtccgataactacacagacgtcaacggagagaaagtactacccaaggacgatattgagtgcccactgggctggaagtgggaggatgaggaatggagcactgatctgaacagggccgtcgatgagcagggttgggagtacagcattaccattcccccagaaagaaaacccaaacactgggtccccgccgagaagatgtactacacccataggaggagaagatgggtgaggctgcgaagaagagacttgagtcagatggaggctctgaaacggcataggcaggctgaagcagagggtgagggctgggaatacgcgagtctgttcggttggaagttccatctggaatatcgcaagaccgacgcttttagacgccgaaggtggagacggcgaatggagcccctggaaaaaactggaccagcagctgtcttcgcgctggagggcgctctcggcggggtgatggacgataagagtgaagattctatgagtgtgtccacgctcagttttggtgtgaacagacctaccatttcctgtatcttcgattacggcaataggtaccacctgcgatgttatatgtatcaggcaagggatctggccgccatggacaaggactcatttagtgacccatacgctattgtctctttcctccaccaatctcagaaaaccgtcgtggtgaaaaataccctaaatcctacctgggaccagacccttatcttctacgaaattgaaatctttggcgagcctgcgacggtcgccgaacagccaccatccattgtcgtagaactttatgaccacgacacttacggagctgatgaatttatgggtcgatgtatctgtcagccaagcctggagagaatgcccaggttggcgtggttcccattaacgcgtggctctcagccgagcggcgaacttctcgccagcttcgagttaatccagagggagaaacctgctattcatcacattcctggctttgaagtgcaggagaccagcaggatacttgatgagtccgaagacaccgacttaccctaccctccgccccaacgagaggcaaacatttatatggtcccacagaacatcaaacctgctctccagcggacagccatagaaatactagcctggggactaagaaacatgaaaagctaccagttagcaaacattagctccccctccctggtggtagaatgtggagggcaaactgtccagtcatgcgtgatcaggaacctgcggaagaatccgaattttgatatttgcactctgtttatggaagtgatgcttcccagagaagagctctattgtccccccatcacagtgaaggtgatcgataatagacagttcggtcggcgtcctgtggtcggacagtgcacaattcgctcgttggaatcatttttatgcgacccctactccgccgagagtccaagccctcagggagggccggatgacgtgtctctgctgtctccaggtgaagacgtactgattgacattgacgacaaagaacctctcattccaattcaggaagaggaatttattgactggtggtccaagttttttgcatcaattggggaacgggagaaatgcggatcctatctggaaaaggatttcgatactttgaaggtatacgacactcagttggaaaacgtcgaagctttcgaaggcctgagcgatttttgtaacacgttcaagctataccgcgggaagacccaggaagaaactgaagacccttcagtgattggcgagttcaagggcctatttaagatttaccccttaccagaagatccggccattcccatgccgcctaggcagttccaccagttagccgcacaagggccacaggaatgccttgttagaatttatatagtaagggccttcggactgcagcccaaggaccccaatggtaagtgcgatccttatatcaagatttctatcgggaaaaagagtgtaagtgaccaggacaattatatcccatgcacactagagcccgtatttggcaaaatgtttgaacttacgtgtacattgcccctggagaaggatctcaagattaccctctacgactatgatctgcttagcaaggatgaaaaaattggcgagacggtggttgatttggaaaaccgacttctttcaaagtttggagcccgctgtggattgccacagacatattgtgtgtccgggcccaaccagtggagagatcaactacgccccagtcaattattgcatctgttctgccagcagcaccgggtcaaggcgcctgtatacaggacggatagggttatgtttcaggacaaagagtattccatcgaggaaatcgaagcaggacgtatccccaaccctcacttaggacccgtggaagaacgactcgcgttgcacgtcctacagcaacaggggctcgtgcccgaacacgtggaatcccgacctttgtactcccccctgcagccagatatcgagcaaggaaaactgcagatgtgggtggacctctttcctaaggcgttagggcggcccggccccccctttaatataaccccaagacgggccagaagattttttctgcgatgtataatctggaacactcgcgacgtcatccttgacgaccttagtctgaccggcgaaaagatgtcagatatctatgtcaaggggtggatgattggatttgaagaacataaacagaagactgacgtgcattatagatcactcggaggagaaggcaatttcaactggcgatttatcttccccttcgattacctgcctgctgagcaggtatgcaccatcgccaaaaaagacgccttctggagattagataagaccgaatccaagattcccgcgagagtcgtcttccaaatttgggacaacgacaaattctctttcgacgatttccttggcagtcttcagctggatctgaataggatgcctaagcccgctaagaccgctaagaaatgctctctcgatcaattagatgacgcattccatccagagtggtttgtgtcgctcttcgaacagaaaactgttaaagggtggtggccttgtgtggctgaagagggggagaagaagatattggcgggaaaactagaaatgactctggagattgtagccgaaagcgagcacgaggaacggcccgccggccagggccgggacgagcccaacatgaatcctaagctggaggatcccagacgcccagacacctcttttctgtggtttacctccccgtataaaacaatgaagttcatactgtggaggcggttccgctgggccattatcttgttcattatcctgtttattttgctcttgtttctggctattttcatttacgctttcccgaactacgcagccatgaagctagtgaagcctttcagctag

SEQ ID NO: 48110 - DNA, 6246 bp, Artificial Sequence
  derived and/or modified sequence
atgctgtgctgcctgctggtgcgggccagcaacctgcccagcgccaagaaggacagaagaagtgaccctgtggccagcctgaccttccggggcgtgaagaagaggaccaaggtgatcaagaacagcgtgaaccctgtgtggaatgaaggatttgagtgggacctgaagggcatccccctggaccagggcagcgagctgcacgtggtggtgaaggaccacgagaccatgggcaggaaccgcttcctgggggaggccaaggtgcccctgcgggaggtgctggccacccccagcctgagcgccagcttcaatgcccccctgctggacaccaagaagcagcccaccggggccagcctggtgctgcaggtgtcctacacccccctgcccggggctgtgcccctcttccccccacccacccccctggagcccagccccaccctgcctgacctggatgtggtggccgacacaggaggagaggaggacacagaggaccagggcctgactggagatgaagctgagcccttcctggaccagagcggcggccctggggcccccaccacccccaggaagctgcccagccggcccccaccccactacccaggcatcaagaggaagaggtctgcccccaccagcaggaagctgctgagtgacaagccccaggacttccagatccgggtgcaggtgattgagggccggcagctgcccggggtgaacatcaagcctgtggtgaaggtgacagctgctggccagaccaagaggacccgcatccacaagggcaacagccccctcttcaatgagaccctcttcttcaacctgtttgacagccctggagagctgtttgatgagcccatcttcatcaccgtggtggacagccgcagcctgaggacagatgccctgctgggggagttcaggatggatgtgggcaccatctaccgggagcccaggcatgcctacctgaggaagtggctgctgctgagtgaccctgatgacttctctgctggggcccggggctacctgaagaccagcctgtgtgtgctgggccctggagatgaggcccccctggagaggaaggaccccagcgaggacaaggaggacatcgagagcaacctgctgcggcccactggagtggccctgcggggggcccacttctgcctgaaggtgttccgggcagaggacctgccccagatggatgatgctgtgatggacaacgtgaagcagatctttggatttgagagcaacaagaagaacctggtggacccctttgtggaggtgtcctttgctgggaagatgctgtgcagcaagatcctggagaagacagccaacccccagtggaaccagaacatcaccctgcctgccatgttccccagcatgtgtgagaagatgaggatccgcatcatcgactgggaccggctgacccacaatgacatcgtggccaccacctacctgtccatgagcaagatcagcgcccctggaggagaaattgaggaggagcctgctggagctgtgaagcccagcaaggccagtgacctggatgactacctgggcttcctgcccaccttcggcccctgctacatcaacctgtatggcagcccccgggagttcaccggcttcccagacccctacacagagctgaacacaggaaaaggagagggcgtggcctaccggggccgcctgctgctgagcctggagaccaagctggtggagcacagcgagcagaaggtggaggacctgcctgcagatgacatcctgcgggtggagaagtacctgcggcggaggaagtacagcctgtttgctgccttctacagcgccaccatgctgcaggatgtggatgatgccatccagtttgaggtgtccatcggcaactacggcaacaagtttgacatgacctgcctgcccctggccagcaccacccagtacagcagagctgtgtttgatggctgccactactactacctgccctggggcaatgtgaagcctgtggtggtgctgagcagctactgggaggacatcagccacagaattgagacccagaaccagctgctgggcattgctgaccggctggaggccggcctggagcaggtgcacctggccctgaaggcccagtgcagcacagaagatgtggacagcctggtggcccagctgacagatgagctgattgctggctgcagccagcccctgggggacatccacgagaccccatctgccacccacctggaccagtacctgtaccagctgcggacccaccacctgagccagatcacagaagctgccctggccctgaagctgggccacagcgagctgcctgctgccctggagcaggccgaggactggctgctgcggctgcgggccctggccgaggagccccagaacagcctgcctgacatcgtcatctggatgctgcagggcgacaagagggtggcctaccagagggtgcctgcccaccaggtgctcttcagcagaagaggagccaactactgcggcaagaactgtgggaagctgcagaccatcttcctgaagtaccccatggagaaggtgcctggggccaggatgcctgtgcagatccgggtgaagctgtggtttggcctgtctgtggatgagaaggagttcaaccagtttgctgagggcaagctgtctgtgtttgctgagacctatgaaaatgagaccaagctggccctggtgggcaactggggcaccaccggcctgacctaccccaagttcagtgatgtgacaggcaagatcaagctgcccaaggacagcttccggcccagcgctggctggacctgggccggggactggtttgtgtgcccagagaagaccctgctgcatgacatggatgctggccacctgagctttgtggaggaggtgtttgagaaccagacccggctgcccggcggccagtggatctacatgtctgacaactacacagatgtgaatggagagaaggtgctgcccaaggatgacatcgagtgccccctgggctggaagtgggaggatgaggagtggagcacagacctgaacagagctgtggatgagcagggctgggagtacagcatcaccatccccccagagaggaagcccaagcactgggtgcctgctgagaagatgtactacacccacagaagaagacgctgggtgcggctgcggcggcgggacctgagccagatggaggccctgaagaggcaccggcaggccgaggccgagggggagggctgggagtatgccagcctgtttggctggaagttccacctggagtacaggaagacagatgccttcagaagaagacgctggaggaggaggatggagcccctggagaagacaggccctgctgctgtgtttgccctggagggcgccctgggcggcgtgatggatgacaagtctgaggacagcatgtctgtgtccaccctgagctttggagtgaaccggcccaccatcagctgcatctttgattatggcaaccgctaccacctgcgctgctacatgtaccaggcccgggacctggccgccatggacaaggacagcttcagtgacccctatgccatcgtgtccttcctgcaccagagccagaagacagtggtggtgaagaacaccctgaaccccacctgggaccagaccctcatcttctatgaaattgagatctttggagagcccgccaccgtggccgagcagccccccagcatcgtggtggagctgtatgaccatgacacctatggagcagatgagttcatgggccgctgcatctgccagcccagcctggagaggatgccccggctggcctggttccccctgacccggggcagccagcccagcggggagctgctggccagctttgagctgatccagcgggagaagccagccatccaccacatccctggctttgaggtgcaggagaccagccgcatcctggatgaaagtgaggacacagacctgccctaccccccaccccagcgggaggccaacatctacatggtgccccagaacatcaagccagccctgcagaggacagccatcgagatcctggcctggggcctgaggaacatgaagagctaccagctggccaacatcagcagccccagcctggtggtggagtgtggcggccagacagtgcagagctgtgtgatccggaacctgaggaagaaccccaactttgacatctgcaccctcttcatggaggtgatgctgccccgggaggagctgtactgcccccccatcaccgtgaaggtgattgacaaccggcagtttggccggcggcctgtggtgggccagtgcaccatccgcagcctggagagcttcctgtgtgacccctacagcgctgagagccccagcccccagggcggcccagatgatgtgtccctgctgagccctggagaagatgtgctgattgatattgatgacaaggagcccctcatccccatccaggaggaggagttcatcgactggtggagcaagttctttgccagcatcggggagcgggagaagtgtggcagctacctggagaaggactttgacaccctgaaggtgtatgacacccagctggagaatgtggaggcctttgagggcctgagtgacttctgcaacaccttcaagctgtaccggggcaagacccaggaggagacagaggaccccagcgtgattggagagttcaagggcctcttcaagatctaccccctgcctgaagatcctgccatccccatgccaccccggcagttccaccagctggccgcccagggcccccaggagtgcctggtgcgcatctacatcgtgcgggccttcggcctgcagcccaaggaccccaatggaaaatgtgacccctacatcaagatcagcatcggcaagaagtctgtgtctgaccaggacaactacatcccctgcaccctggagcctgtgtttgggaagatgtttgagctgacctgcaccctgcccctggagaaggacctgaagatcaccctgtatgactatgacctgctgagcaaggatgagaagatcggggagaccgtggtggacctggagaaccggctgctgagcaagtttggagcccgctgtggcctgccccagacctactgtgtgtctggccccaaccagtggagggaccagctgcggcccagccagctgctgcacctgttctgccagcagcaccgggtgaaggcccctgtgtacagaacagacagagtgatgttccaggacaaggagtacagcattgaggagattgaggccggccgcatccccaacccccacctgggccctgtggaggagcggctggccctgcacgtgctgcagcagcagggcctggtgcctgagcacgtggagagccggcccctgtacagccccctgcagcctgacatcgagcagggcaagctgcagatgtgggtggacctcttccccaaggccctgggccggcccggcccccccttcaacatcaccccaagaagagcccggcgcttcttcctgcgctgcatcatctggaacaccagagatgtgatcctggatgacctgagcctgaccggggagaagatgtctgacatctacgtgaagggctggatgattggatttgaggagcacaagcagaagacagatgtgcactaccgcagcctgggcggggagggcaacttcaactggaggttcatcttcccctttgactacctgcctgctgagcaggtgtgcaccatcgccaagaaggatgccttctggaggctggacaagacagagagcaagatcccagcccgggtggtgttccagatctgggacaatgacaagttctcctttgatgacttcctgggcagcctgcagctggacctgaacaggatgcccaagccagccaagacagccaagaagtgcagcctggaccagctggatgatgccttccaccctgagtggtttgtgtccctgtttgagcagaagacagtgaagggctggtggccctgtgtggccgaggagggggagaagaagatcctggccggcaagctggagatgaccctggagatcgtggccgagagcgagcacgaggagaggcctgctggccagggcagagatgagcccaacatgaaccccaagctggaggacccccggcggccagacaccagcttcctgtggttcaccagcccctacaagaccatgaagttcatcctgtggaggcgcttccgctgggccatcatcctcttcatcatcctcttcatcctgctgctcttcctggccatcttcatctatgccttccccaactatgctgccatgaagctggtgaagcccttctcctag

SEQ ID NO: 48111 - DNA, 6543 bp, Artificial Sequence
  derived and/or modified sequence
tctccgcggaggagcagcgaaggcgacagctctcttggcgcggctgcctgggagccgggcgcttgctgggtgggtgctcgggcccggtgctcccgctcccgccctgactgcgcgcctgtgtgccgccggggctgcccagccatgctgtgctgcctgctggtgagggccagcaacctccccagtgcgaagaaggaccggcgcagcgaccctgtcgcaagcctgactttccgaggggtgaagaagagaaccaaagtcatcaagaacagcgtgaaccctgtatggaatgagggatttgaatgggacctcaagggcatccccctggaccagggctctgagcttcatgtggtggtcaaagaccatgagacgatggggaggaacaggttcctgggggaagccaaggtcccactccgagaggtcctcgccacccctagtctgtccgccagcttcaatgcccccctgctggacaccaagaagcagcccacaggggcctcgctggtcctgcaggtgtcctacacaccgctgcctggagctgtgcccctgttcccgccccctactcctctggagccctccccgactctgcctgacctggatgtagtggcagacacaggaggagaggaagacacagaggaccagggactcactggagatgaggcggagccattcctggatcaaagcggaggcccgggggctcccaccaccccaaggaaactaccttcacgtcctccgccccactaccccgggatcaaaagaaagcgaagtgcgcctacatctagaaagctgctgtcagacaaaccgcaggatttccagatcagggtccaggtgatcgaggggcgccagctgccgggggtgaacatcaagcctgtggtcaaggttaccgctgcagggcagaccaagcggacgcggatccacaagggaaacagcccactcttcaatgagactcttttcttcaacttgtttgactctcctggggagctgtttgatgagcccatctttatcacggtggtagactctcgttctctcaggacagatgctctcctcggggagttccggatggacgtgggcaccatttacagagagccccggcacgcctatctcaggaagtggctgctgctctcagaccctgatgacttctctgctggggccagaggctacctgaaaacaagcctttgtgtgctggggcctggggacgaagcgcctctggagagaaaagacccctctgaagacaaggaggacattgaaagcaacctgctccggcccacaggcgtagccctgcgaggagcccacttctgcctgaaggtcttccgggccgaggacttgccgcagatggacgatgccgtgatggacaacgtgaaacagatctttggcttcgagagtaacaagaagaacttggtggacccctttgtggaggtcagctttgcggggaaaatgctgtgcagcaagatcttggagaagacggccaaccctcagtggaaccagaacatcacactgcctgccatgtttccctccatgtgcgaaaaaatgaggattcgtatcatagactgggaccgcctgactcacaatgacatcgtggctaccacctacctgagtatgtcgaaaatctctgcccctggaggagaaatagaagaggagcctgcaggtgctgtcaagccttcgaaagcctcagacttggatgactacctgggcttcctccccacttttgggccctgctacatcaacctctatggcagtcccagagagttcacaggcttcccagacccctacacagagctcaacacaggcaagggggaaggtgtggcttatcgtggccggcttctgctctccctggagaccaagctggtggagcacagtgaacagaaggtggaggaccttcctgcggatgacatcctccgggtggagaagtaccttaggaggcgcaagtactccctgtttgcggccttctactcagccaccatgctgcaggatgtggatgatgccatccagtttgaggtcagcatcgggaactacgggaacaagttcgacatgacctgcctgccgctggcctccaccactcagtacagccgtgcagtctttgacgggtgccactactactacctaccctggggtaacgtgaaacctgtggtggtgctgtcatcctactgggaggacatcagccatagaatcgagactcagaaccagctgcttgggattgctgaccggctggaagctggcctggagcaggtccacctggccctgaaggcgcagtgctccacggaggacgtggactcgctggtggctcagctgacggatgagctcatcgcaggctgcagccagcctctgggtgacatccatgagacaccctctgccacccacctggaccagtacctgtaccagctgcgcacccatcacctgagccaaatcactgaggctgccctggccctgaagctcggccacagtgagctccctgcagctctggagcaggcggaggactggctcctgcgtctgcgtgccctggcagaggagccccagaacagcctgccggacatcgtcatctggatgctgcagggagacaagcgtgtggcataccagcgggtgcccgcccaccaagtcctcttctcccggcggggtgccaactactgtggcaagaattgtgggaagctacagacaatctttctgaaatatccgatggagaaggtgcctggcgcccggatgccagtgcagatacgggtcaagctgtggtttgggctctcagtggatgagaaggagttcaaccagtttgctgaggggaagctgtctgtctttgctgaaacctatgagaacgagactaagttggcccttgttgggaactggggcacaacgggcctcacctaccccaagttttctgacgtcacgggcaagatcaagctacccaaggacagcttccgcccctcggccggctggacctgggctggagattggttcgtgtgtccggagaagactctgctccatgacatggacgccggtcacctgagcttcgtggaagaggtgtttgagaaccagacccggcttcccggaggccagtggatctacatgagtgacaactacaccgatgtgaacggggagaaggtgcttcccaaggatgacattgagtgcccactgggctggaagtgggaagatgaggaatggtccacagacctcaaccgggctgtcgatgagcaaggctgggagtatagcatcaccatccccccggagcggaagccgaagcactgggtccctgctgagaagatgtactacacacaccgacggcggcgctgggtgcgcctgcgcaggagggatctcagccaaatggaagcactgaaaaggcacaggcaggcggaggcggagggcgagggctgggagtacgcctctctttttggctggaagttccacctcgagtaccgcaagacagatgccttccgccgccgccgctggcgccgtcgcatggagccactggagaagacggggcctgcagctgtgtttgcccttgagggggccctgggcggcgtgatggatgacaagagtgaagattccatgtccgtctccaccttgagcttcggtgtgaacagacccacgatttcctgcatattcgactatgggaaccgctaccatctacgctgctacatgtaccaggcccgggacctggctgcgatggacaaggactctttttctgatccctatgccatcgtctccttcctgcaccagagccagaagacggtggtggtgaagaacacccttaaccccacctgggaccagacgctcatcttctacgagatcgagatctttggcgagccggccacagttgctgagcaaccgcccagcattgtggtggagctgtacgaccatgacacttatggtgcagacgagtttatgggtcgctgcatctgtcaaccgagtctggaacggatgccacggctggcctggttcccactgacgaggggcagccagccgtcgggggagctgctggcctcttttgagctcatccagagagagaagccggccatccaccatattcctggttttgaggtgcaggagacatcaaggatcctggatgagtctgaggacacagacctgccctacccaccaccccagagggaggccaacatctacatggttcctcagaacatcaagccagcgctccagcgtaccgccatcgagatcctggcatggggcctgcggaacatgaagagttaccagctggccaacatctcctcccccagcctcgtggtagagtgtgggggccagacggtgcagtcctgtgtcatcaggaacctccggaagaaccccaactttgacatctgcaccctcttcatggaagtgatgctgcccagggaggagctctactgcccccccatcaccgtcaaggtcatcgataaccgccagtttggccgccggcctgtggtgggccagtgtaccatccgctccctggagagcttcctgtgtgacccctactcggcggagagtccatccccacagggtggcccagacgatgtgagcctactcagtcctggggaagacgtgctcatcgacattgatgacaaggagcccctcatccccatccaggaggaagagttcatcgattggtggagcaaattctttgcctccataggggagagggaaaagtgcggctcctacctggagaaggattttgacaccctgaaggtctatgacacacagctggagaatgtggaggcctttgagggcctgtctgacttttgtaacaccttcaagctgtaccggggcaagacgcaggaggagacagaagatccatctgtgattggtgaatttaagggcctcttcaaaatttatcccctcccagaagacccagccatccccatgcccccaagacagttccaccagctggccgcccagggaccccaggagtgcttggtccgtatctacattgtccgagcatttggcctgcagcccaaggaccccaatggaaagtgtgatccttacatcaagatctccatagggaagaaatcagtgagtgaccaggataactacatcccctgcacgctggagcccgtatttggaaagatgttcgagctgacctgcactctgcctctggagaaggacctaaagatcactctctatgactatgacctcctctccaaggacgaaaagatcggtgagacggtcgtcgacctggagaacaggctgctgtccaagtttggggctcgctgtggactcccacagacctactgtgtctctggaccgaaccagtggcgggaccagctccgcccctcccagctcctccacctcttctgccagcagcatagagtcaaggcacctgtgtaccggacagaccgtgtaatgtttcaggataaagaatattccattgaagagatagaggctggcaggatcccaaacccacacctgggcccagtggaggagcgtctggctctgcatgtgcttcagcagcagggcctggtcccggagcacgtggagtcacggcccctctacagccccctgcagccagacatcgagcaggggaagctgcagatgtgggtcgacctatttccgaaggccctggggcggcctggacctcccttcaacatcaccccacggagagccagaaggtttttcctgcgttgtattatctggaataccagagatgtgatcctggatgacctgagcctcacgggggagaagatgagcgacatttatgtgaaaggttggatgattggctttgaagaacacaagcaaaagacagacgtgcattatcgttccctgggaggtgaaggcaacttcaactggaggttcattttccccttcgactacctgccagctgagcaagtctgtaccattgccaagaaggatgccttctggaggctggacaagactgagagcaaaatcccagcacgagtggtgttccagatctgggacaatgacaagttctcctttgatgattttctgggctccctgcagctcgatctcaaccgcatgcccaagccagccaagacagccaagaagtgctccttggaccagctggatgatgctttccacccagaatggtttgtgtccctttttgagcagaaaacagtgaagggctggtggccctgtgtagcagaagagggtgagaagaaaatactggcgggcaagctggaaatgaccttggagattgtagcagagagtgagcatgaggagcggcctgctggccagggccgggatgagcccaacatgaaccctaagcttgaggacccaaggcgccccgacacctccttcctgtggtttacctccccatacaagaccatgaagttcatcctgtggcggcgtttccggtgggccatcatcctcttcatcatcctcttcatcctgctgctgttcctggccatcttcatctacgccttcccgaactatgctgccatgaagctggtgaagcccttcagctgaggactctcctgccctgtagaaggggccgtggggtcccctccagcatgggactggcctgcctcctccgcccagctcggcgagctcctccagacctcctaggcctgattgtcctgccagggtgggcagacagacagatggaccggcccacactcccag

SEQ ID NO: 48112 - DNA, 6246 bp, Artificial Sequence
  derived and/or modified sequence
atgctgtgctgcctgctggtgcgggccagcaacctgcccagcgccaaaaaggacagaagatctgaccctgtcgcatctcttacctttcggggggtgaaaaagcgcactaaggtgatcaaaaattcggttaatcccgtttggaacgaaggattcgaatgggaccttaagggtatcccactcgaccagggcagcgaactgcacgtcgtagtaaaagaccacgagacaatgggacgaaataggttcttaggagaggctaaggtgcctctgagagaggtactggccaccccatctctttctgcatcatttaacgcacctcttttagacaccaaaaagcaacccacaggtgcctctctcgtcctccaggtatcctataccccactgcctggagccgtgcctctgttccctcccccgacacccttggagccatcccccaccctgcctgacctggatgtggttgctgacaccggcggcgaagaagacactgaggaccaaggactgaccggggatgaagccgagccgttccttgatcagtctggagggccgggcgcccccaccaccccccggaagcttcccagcaggccgcctcctcactatcccgggatcaaaaggaagcggtcggcccccaccagccgcaaactcctcagtgataagccacaggactttcaaatccgagtccaagtcatagaaggcagacagctccccggagttaacatcaaacccgtagtcaaagttaccgccgccggacaaacaaagcgaactcgtatacacaaaggcaattctcctctttttaacgaaactctcttcttcaacctattcgattcacctggtgagttattcgatgagccaatctttatcaccgttgtcgacagtcggtctctgaggacagacgcactcctcggtgagttcaggatggatgtaggcaccatctatagagaacccaggcacgcttatttgcgcaaatggctgctattgagcgatccagacgacttcagcgctggcgccaggggctacttgaagacaagcctgtgtgtgctgggccctggcgatgaagctccacttgagcggaaggatcccagtgaagacaaagaggacattgaatccaatttgctccggccgacaggtgtagcgttgcggggggctcatttctgtttgaaggtgtttagagccgaagatctcccacagatggatgatgccgtaatggacaacgtgaaacaaatcttcgggttcgagagtaacaagaagaacttggttgacccttttgtggaggtgtcattcgcaggcaagatgttatgttccaaaattctggaaaagacggccaatcctcaatggaatcagaacataacactcccagccatgtttccctcgatgtgcgaaaagatgagaatccggatcattgattgggacagacttactcacaacgacattgtggcgaccacttatctcagcatgtcgaaaatcagcgcccccgggggtgaaatcgaggaagaacccgcaggagctgtgaagccaagcaaggcctctgacctggatgattatctggggttcttacccaccttcggcccctgctatatcaacctgtacggcagcccacgcgaattcactggtttcccagatccttataccgaactgaatactgggaaaggggagggagtcgcgtaccggggtcggctgctactgtcattggagaccaaactggtcgagcattctgagcaaaaggtagaagacctgccagctgatgacatcctgcgggtcgagaaatatctgcgtaggcgcaagtatagcctgtttgccgcattctattcagctacaatgctgcaagacgtagacgacgcgatccagtttgaggtaagcattggcaattacggaaacaagtttgatatgacgtgcctgccgctggcatctacaacccaatattcacgggctgtgttcgacggctgtcactactactatctgccctgggggaacgttaaacctgtcgtggtactgtcctcatactgggaggacatctctcaccgcatcgagactcagaaccagttgttaggtattgccgataggctggaggcaggtttggaacaggtccacctggccctgaaggcccaatgcagtactgaggacgtggatagtctggtggctcagctgactgacgagcttatcgccggatgcagccagccattgggggacatccatgaaaccccaagcgcaacgcacctcgaccagtacctgtatcagttgcgtacccaccacctctctcagatcacggaggctgcactggcgctaaagctcggtcactctgaactgcccgctgcgttggaacaggcagaggactggctcctccgactgcgcgcactcgctgaagaaccacagaactccctcccagacattgtgatttggatgctgcagggtgataaacgagtggcttatcagagagtgcccgcacatcaggtcctgttcagcaggagaggcgcaaattattgcggtaaaaactgcgggaagctgcagactatttttctgaaatatcctatggagaaggtgcccggcgctaggatgcctgtccagatccgggtcaaactgtggtttggtctgtccgtagacgagaaagagtttaaccaattcgcagagggtaaactctctgtcttcgcggagacctacgaaaacgagaccaagctggcgctggtggggaactgggggactacaggattaacttacccgaagttcagtgatgtaacaggcaagattaagttgccaaaagactcttttagacctagcgctggctggacatgggcaggggattggttcgtttgtcccgagaagaccctcctgcatgacatggacgcgggccacctatcatttgtggaggaggtgttcgagaatcagacccgacttcccggaggccagtggatctacatgtcagataactataccgacgtcaatggggagaaagttctgcccaaggacgacatcgaatgccctctggggtggaagtgggaggatgaagaatggagtacagacttgaacagggccgtagatgaacaaggctgggagtactctattactatccctcctgagcgcaaacctaaacattgggtgcctgcagaaaaaatgtactatacccataggaggagaagatgggtaaggttacgtagaagggatcttagccagatggaggccctcaagcggcacagacaggctgaggcagagggggaggggtgggagtatgctagcctgttcgggtggaaatttcatctcgagtatcggaaaaccgatgccttcagacgaaggagatggcggcgaaggatggagcctttggagaaaacaggtcctgccgcggtgtttgcactggagggggcactgggtggcgtgatggatgacaagagcgaggattcgatgagcgtgtcaacgctaagctttggcgtgaacagacctacgattagctgtatttttgactatgggaacaggtatcatcttagatgctacatgtatcaggccagagacctggccgctatggacaaggactctttttcagatccctatgctatcgtgtctttcttacatcagtctcagaaaacagtagtcgtcaagaacactctcaatccgacatgggatcagacactgatattttacgaaatagagatttttggcgagcctgctacggtcgctgagcagcccccctccattgtggtggagctgtacgatcatgatacatatggagctgacgaatttatgggcagatgtatttgtcagccttctctcgagcgcatgccaagactggcatggtttcctctcaccaggggaagccaaccttcaggggagctgctggcctctttcgaacttatccagagggagaagccagcgatccatcatattcccgggttcgaagtccaggagactagtagaatacttgacgagagcgaggataccgacctgccatacccaccccctcaaagggaggcgaacatatatatggtgccgcaaaacatcaagcctgctttgcagagaacggctatcgagatcttggcttggggactgcggaatatgaaatcatatcagttagctaacatatcatccccctctcttgtggtggagtgcggaggacaaacggttcagagttgcgtgatccgcaacctaagaaagaatccaaattttgacatatgcaccttgttcatggaggttatgctgccaagagaagagctgtattgtcctcctattacggtgaaggttattgataacaggcagtttggccgacgacccgtggtaggccagtgcacaattcgatccctggaatcttttctgtgcgacccctacagcgctgaatcgccatcaccccagggtggcccagacgatgtgtctctgctgtctcctggtgaagacgttctgatcgacatagatgataaggaacctctcatacccattcaagaagaagagtttatagattggtggtccaagttttttgccagcatcggcgaacgcgaaaaatgtggaagttatctcgaaaaggattttgatactcttaaagtttacgatacccagttggaaaacgtggaagcttttgaaggattgtctgatttctgtaataccttcaaactgtaccggggtaagactcaggaagaaaccgaagatcccagcgtcattggtgaattcaaggggctctttaaaatataccccttgccagaggatcccgcaataccaatgccacctcgccagtttcaccagttagccgcacagggccctcaggaatgtctggtgcgcatctatatagtaagagcctttggcctgcagcctaaagaccctaacggtaagtgtgatccgtacattaaaatcagtattggcaagaaaagcgtgtccgaccaggacaactacatcccttgcactctggagcccgtctttggcaagatgtttgaactgacttgtactttgccactcgaaaaggacctgaaaataaccctttatgattacgatctgctttccaaggatgaaaagatcggtgaaactgtagtcgatttagagaacaggctgttgtctaagttcggtgcccgatgcggcctccctcagacatattgtgtaagtggtcccaatcagtggcgggaccaactccgaccgtcacaactgctccatctcttttgtcaacagcatagagtcaaggcgccagtgtaccggactgaccgtgtcatgtttcaggacaaagaatattccatcgaagaaattgaggctggccggatccccaatcctcatctcgggccggtggaggagaggctagctctccacgtgctgcagcagcaggggttagtgcccgaacatgtggagtctcgaccgctatacagtccgctccaacctgacattgaacaggggaaactccagatgtgggtggacttatttcccaaggccctggggagacccgggcccccattcaacatcacacccaggcgcgcgagaagattcttcctccgctgtataatttggaacactcgagacgtaatcctggatgatttgagcctgactggggaaaagatgtctgacatttacgttaaaggatggatgatagggttcgaggagcacaaacagaaaacagatgttcattaccgcagcctgggcggagagggcaacttcaactggagattcatattcccgttcgactaccttccagccgaacaggtgtgcaccatcgcaaagaaggatgccttctggcgactggataaaacagaatcaaagataccggctcgggttgtcttccaaatatgggataatgataagttctcctttgatgatttcttaggcagtttacaattggatctgaacaggatgccaaaaccagctaaaactgcgaagaaatgttcactcgaccaactagacgatgcctttcatcccgaatggtttgtatcgctgtttgagcagaagacagtgaaaggctggtggccatgtgtggccgaagaaggggaaaagaagatcctggctggcaagctggaaatgacccttgagatcgtggccgaatccgaacatgaggagcgcccggcgggacagggaagggatgagcccaacatgaaccctaaactggaagatcctcgacgtccagatactagtttcctctggttcacctcaccttacaagactatgaaatttatactgtggcgacgcttcaggtgggccatcattttattcatcattctgtttattctgctattgtttctggccatcttcatctatgcattcccaaactacgctgcgatgaaactcgttaaaccttttagttag

SEQ ID NO: 48113 - DNA, 6246 bp, Artificial Sequence
  derived and/or modified sequence
atgctttgctgcctgctggtgagagcatccaacctgccttcagccaagaaagatagacggtccgacccagtcgccagcttaacattcaggggagtgaaaaaaagaaccaaagttataaaaaacagcgttaatcctgtttggaacgagggatttgagtgggacttgaagggaatccccctcgatcagggcagcgaactgcatgtcgtagtgaaggaccatgaaacgatggggagaaacagatttttgggtgaggccaaagtgcctcttcgtgaagtgttggccacaccatctttatccgcttcgttcaacgctcccctccttgacacaaaaaagcagccaacgggcgcttccctggtgctccaggtgagttacacacctcttcccggtgccgtcccattgtttcccccacctacacccctggaacctagtcccactcttcccgatttggatgttgtagccgatactggtggggaagaggacaccgaggaccaaggactgactggcgacgaagccgagcctttcctcgaccagtcaggcggtcccggtgcacctactaccccacggaagctcccgagtcgaccgcctccacactaccctggtatcaaacggaagcgatcagcccctacctctcgaaaactgctgtcagataagccgcaggactttcagatcagggttcaagttattgaaggcaggcagctgcctggggtcaacatcaaacccgtcgttaaagtgaccgctgccggtcagaccaagaggaccaggattcacaagggcaactctccattattcaatgaaaccctgttctttaacctgtttgactctccaggagagctcttcgatgagccaatattcataactgtcgtggactctagaagtcttaggactgacgcactgctgggcgaattccggatggacgtgggaaccatttatcgcgaaccacgacacgcctatttgcgtaagtggctccttctgtctgatccagatgatttctctgccggtgcacggggttacctgaagaccagcttatgtgtgttgggccctggggacgaggccccactggagcgcaaggacccctcagaggataaagaagatatagagagcaatctattaagacccacgggcgtggcgcttcgaggcgctcatttttgcctgaaggtgtttcgggctgaagacctaccccagatggatgacgcagttatggacaatgtaaagcagatattcggctttgaaagcaacaaaaagaacctggtggacccctttgtggaagtgagttttgccggaaaaatgctttgctcaaagattcttgagaagactgcaaacccccaatggaaccagaacattaccctccccgctatgttccccagtatgtgtgagaaaatgagaattaggataatcgactgggatagactgacccacaatgacatagtcgcaactacttatctgagtatgagtaaaatctccgccccaggtggggagatcgaggaagaacctgccggtgccgtcaagccttccaaagcttcagacctggacgattatttgggtttcttgcccacgtttggtccttgttatatcaacttgtatggatctccgcgtgaatttactggctttcccgatccttataccgaacttaacactgggaagggagagggtgtcgcttacaggggccgactccttctcagcttggagaccaagttggttgagcattctgagcagaaggtggaggatctgccagccgacgacattctgcgcgtggagaagtacctcaggaggaggaaatacagcctattcgcagcattctatagcgcgactatgctgcaggacgtggatgacgccatacagttcgaggtatctattggcaattacggcaacaaattcgacatgacgtgtctgccgctcgcaagtactacgcagtacagtagagccgtattcgacggctgccactactactatctgccatggggcaacgtaaaacctgtggttgttctgagtagttattgggaggacatctcacacaggatcgaaactcagaatcagcttctgggtatagcagacagattagaggccggattggagcaagtgcacctggcgttgaaggctcagtgctcaactgaagacgtagacagcctggtggcacagttaacggacgaactgattgcaggttgcagccaaccactcggggacattcatgagacaccaagcgccacacacctggatcagtatctataccaactgagaactcatcatctgtcacagatcacagaagctgcactggctcttaagctcggccattctgagctgcccgctgccttggagcaagcagaggattggttactgcgactacgggctctggcagaagagccacagaattctctgcccgacatcgtgatatggatgcttcagggtgataagagagtggcgtaccagagggttcctgcccatcaggtgttattctctagaagaggagctaactactgtggaaaaaactgcgggaagctgcagactatctttctgaagtaccccatggaaaaagtgccaggcgcacggatgccagtccaaattcgtgtcaagttgtggttcgggctgagtgttgacgagaaagagtttaaccaattcgccgaggggaagctgagcgtgttcgctgaaacctatgagaacgaaactaaactagccctggtcgggaactgggggacgactggtctcacgtacccaaaatttagtgatgttaccggcaaaatcaagcttccgaaggattccttccgccctagtgctggatggacatgggcaggcgattggttcgtgtgcccagaaaaaaccctactccatgatatggacgccggacaccttagcttcgtggaggaggtttttgagaatcaaactagacttccagggggacagtggatatacatgagtgataactataccgatgtaaacggagagaaagtgctgcccaaggacgacatcgaatgccccctcggctggaagtgggaggacgaagagtggagtaccgacttgaacagggctgtcgacgaacaggggtgggaatatagtatcacaataccccctgagcgaaagccgaagcactgggtccctgcagaaaaaatgtactacactcataggaggagaaggtgggtgagactgagacggagagatctgtcacagatggaggcccttaagcggcatcgccaagccgaggctgaaggagaggggtgggaatatgccagcttgttcggttggaaattccatctagagtaccgtaaaacagacgccttccgccgtcgtcgctggagacggaggatggaaccactagaaaagaccggaccagctgccgtatttgcactcgaaggcgcactgggtggtgtaatggatgacaagagcgaagattctatgagcgttagtacgctgtcatttggggtcaatcggcctactatttcatgtatctttgattatggcaaccgttaccacttaaggtgttatatgtaccaggccagagatttagcggctatggacaaagattcattctctgacccctacgctatcgtcagcttcctgcaccagtctcagaaaaccgtcgtcgtaaagaacaccctgaatccaacatgggaccagactttaatcttctatgaaatcgaaatatttggagaacccgctactgttgcagagcagcccccatccatcgtagtcgaactctacgatcacgatacatacggcgctgacgaattcatgggcagatgcatttgtcagccctcgctggaaagaatgcccagactcgcctggtttccgctcacaaggggatcccagccctccggcgaactcctggcctccttcgaacttatacaaagagaaaagccagccattcatcacatccccggtttcgaggtgcaagagacgtcccgaatactggacgaaagcgaagacacagatttaccttaccctcctccgcagcgcgaagctaacatatacatggtgcctcagaacattaagcccgcactgcaacgaaccgcaatagagatactcgcttggggactgcgcaacatgaagtcctatcagctggcgaatatctcatccccttccctggtcgtggagtgtggagggcagaccgtgcagtcctgtgttattcgcaatctacgtaagaaccccaattttgacatatgtaccttgtttatggaggtgatgctacctcgcgaagagctgtactgcccacccatcaccgtgaaagtgattgacaataggcagttcggcaggagaccagttgtaggccagtgcacaatccggagcctggaaagcttcctgtgcgacccttactcggctgagtcaccttccccgcagggaggtccggacgatgtgtctctgttgtctccaggcgaagatgtgctaatcgacatcgacgataaagagcctctcatccccatccaagaagaggagttcatagactggtggtccaagttcttcgcttctatcggggagcgcgaaaagtgcggatcttatctcgaaaaggacttcgacacattgaaggtatacgatacgcaactggagaatgtggaagcgttcgaaggattgagtgacttctgtaacactttcaaattatacagggggaagacacaggaggagacagaggacccgtccgtgatcggtgaatttaaggggcttttcaaaatctatcccctgccagaagatcctgccataccaatgcccccacgacaattccaccaactggccgctcagggaccacaggagtgtctcgtcaggatctacatagtcagggcattcggactccaacctaaagatcccaacggcaagtgtgacccgtatatcaagatttccattggaaagaagagcgtcagcgaccaggacaattacattccatgtacattggagccagtgttcggcaaaatgtttgaactgacatgcacactacctctggagaaagacttgaaaatcaccttgtacgattacgatctgctgagcaaagacgagaagattggcgagaccgtcgtcgatctcgagaaccgacttctgtccaaattcggagcccgatgtggcttgccccagacctattgcgtttccggccctaatcagtggagggaccagcttagaccaagccagcttctgcacctgttctgtcagcagcacagggtgaaggctcccgtgtacagaacggaccgcgtgatgtttcaggacaaggagtactctatcgaggagattgaagccggtcgcatacccaaccctcatctcggcccagtggaagagagactggccctacacgtcctgcagcaacagggactagtccctgaacatgttgaaagccgtcctctctatagccccctgcagccagatatcgagcaggggaagctgcagatgtgggttgatctgtttccaaaggccctggggagacctggcccacccttcaatattacccctcggcgagcgaggcgattttttctccgttgcattatctggaacacacgggatgttatcctggacgacctgtcactgactggggagaagatgagtgacatatatgtaaaaggatggatgattggcttcgaggaacataagcagaagaccgacgtccactatagatcactgggcggtgagggaaactttaactggcggtttatctttccttttgattatctacctgctgagcaagtgtgtactatagccaaaaaggatgccttctggagattagacaagacagagtccaagataccagcacgcgtggtgtttcagatatgggataatgacaaattctcgtttgacgattttcttggctccctgcagctcgacttgaacagaatgcctaagcccgctaagactgcaaaaaagtgctcgctggaccagcttgacgacgccttccaccccgagtggtttgtttcacttttcgagcagaagaccgtaaaaggatggtggccctgcgtggctgaagagggtgaaaagaagatactggcaggtaagctagaaatgacattagaaatcgtggcagagagtgaacatgaagaacggcctgcaggccaggggagggatgagcctaatatgaatcctaagctggaagatcctcggcgacctgatacatccttcctgtggtttacctctccctataagacaatgaaatttatactctggcgaagattcaggtgggccattattctctttataatactcttcatcctgctattattcctggccatattcatatatgcctttcccaactatgccgcaatgaagctggtcaagcctttttcgtat

SEQ ID NO: 48114 - DNA, 6246 bp, Artificial Sequence
  derived and/or modified sequence
atgctctgttgtctcttggtgcgagccagcaacttaccgtctgccaaaaaagacagaagatctgatcctgtagcctcactcacatttaggggggtgaagaagcggacaaaagtaatcaaaaatagtgttaaccctgtttggaatgaaggatttgaatgggacctgaaggggattcccttggatcagggaagcgagctacacgtcgttgtgaaggaccatgagaccatggggaggaacaggttcttgggggaggctaaggtccccctccgcgaggttctagcaaccccctccctttccgccagcttcaacgcgcccctgctggataccaaaaagcagcctaccggggcctctctggtcctccaggtgagctataccccattgcctggtgctgtacctctgttccccccacctacgcctctggagccatcaccaacgttgcccgacctggatgttgtagctgacactgggggtgaggaagataccgaggaccagggtctaaccggagatgaagccgaaccttttctcgaccagtccggaggacccggggcaccgactacaccacgaaagctcccttcccggcctccccctcactatccaggaatcaaacgaaaacggagcgccccaacctcacgcaagcttctgagcgataaaccacaggacttccagatacgcgttcaagtgattgagggccgccagctgccgggtgtgaatataaagcctgtcgtgaaggtgaccgctgctggtcagactaaacgtactaggatccataagggtaattcaccactgtttaacgagacactgttcttcaacctcttcgattcccctggtgagcttttcgacgagcctatctttatcaccgtggtcgattcaaggagtctgaggaccgatgctcttcttggcgagttccgcatggatgtagggactatttaccgggagcccagacatgcctacctgcgcaagtggttactgttgtctgatcctgacgacttcagtgctggagcgaggggatacttgaaaaccagcctttgtgtcctggggcccggggatgaggcccccctagagagaaaagacccatcggaggacaaggaagatatagagtctaatctgctacggccaactggggttgcattaaggggggcacacttttgtctgaaagtttttagggctgaggacctccctcaaatggatgacgccgtaatggataatgtaaaacagatattcggttttgagtctaataaaaaaaatctcgtcgatcctttcgtcgaggtttccttcgccggaaaaatgttgtgcagcaagatcttagaaaaaacagctaacccccagtggaaccagaacatcacactccctgccatgtttccttcaatgtgtgaaaaaatgagaattcgaattatcgactgggaccgattgacccataacgacattgtggctaccacatatctcagtatgtctaagattagtgctccaggaggtgagatagaggaggagcccgccggcgcggtcaagcctagcaaagcctccgacttggatgattatctcgggttcttgcccacgtttggcccatgttacatcaatctttacggtagccctcgcgagttcactggctttccggatccctacacggaactaaatactgggaagggcgagggagtggcgtatcggggacggctgctgcttagtctggagaccaaactggtggagcatagcgaacagaaggttgaagatcttcccgccgacgacatattgcgagtagaaaagtacctcagacgcaggaagtactccctatttgcagctttctattcggccacaatgctgcaagacgtggatgatgcaatccagttcgaagtttccataggaaattatgggaataagtttgacatgacctgtctccctctagcttccacaacacagtactccagagctgtgttcgatgggtgtcattattattacttgccctggggcaatgttaagcctgtggtggtcttgagtagttattgggaggacattagtcatcgcatagaaacacagaaccagcttctagggattgctgatcggttagaagcaggactggagcaggtacacttggcgctcaaagctcagtgttctaccgaggatgtcgacagtctagtcgcccagctaaccgacgagttgatcgcaggctgtagccagcccctgggggacatccacgagacccctagcgccacacacctggatcagtatctttaccagctccggacacaccatctgagccagattacagaagccgctcttgccctcaaactaggccactctgagttgcctgctgccctagagcaagcggaagattggctcctgcgcctgagagccctggccgaagagcctcagaacagccttcccgatattgttatctggatgctacagggtgacaaacgcgttgcctaccaacgcgtgccggctcaccaggtactgttctcccgtcggggagcgaattactgcggaaaaaactgtggaaaactgcaaacgatcttcttgaagtaccctatggaaaaagtgcccggagccaggatgcccgttcaaattcgagtgaaattatggttcggccttagtgtagatgaaaaagagttcaatcagttcgctgagggtaaactcagtgtttttgctgagacttatgaaaatgaaactaaactggcacttgtcggtaattgggggaccaccggactaacatatccgaagttcagcgatgtgacagggaagatcaagctgcctaaggattcattccgtcccagcgcaggatggacttgggcaggtgattggttcgtgtgccccgagaagactctgctgcatgatatggatgccggtcatctctcctttgtagaggaggtgtttgagaaccagaccagacttcccggggggcagtggatctatatgtcagataactataccgatgtgaatggggaaaaagtactccctaaggatgacatcgaatgcccactgggctggaaatgggaagacgaggagtggtcaaccgacttaaaccgcgcggtggatgagcagggctgggagtattcgatcaccatccctccagagaggaagccgaaacactgggtacctgccgaaaagatgtattacactcacaggcggaggagatgggtgcgactgagacgccgggatttgagccagatggaagccctgaagaggcaccgtcaggcagaggctgaaggggagggctgggagtatgcgagcctgttcggttggaagtttcatttagagtaccgcaagacggacgcgttcaggagacgacgctggcggaggagaatggagcctcttgagaagacaggtccagccgcagtatttgccctcgagggagctctcgggggagtgatggatgataagagtgaggattccatgtcagtttcgaccttgtcgttcggcgtaaatagacccacaatctcctgtatcttcgactacgggaacagataccacttgcgttgttacatgtaccaagcccgtgacctcgccgcgatggataaagactctttctctgacccctacgccatcgtcagcttccttcatcagtcccagaaaacagtcgttgtgaaaaataccctgaacccgacttgggatcagacactgatcttctatgagattgagatcttcggggagcctgccacagtcgccgagcagcccccctccattgttgttgagctttatgatcacgatacatacggcgccgacgaatttatgggacgctgtatttgtcagccgagcctggagagaatgccaagacttgcctggtttcctctgaccagaggaagccaaccttccggagagcttctcgcctcattcgagctgatacaacgggagaagcccgctattcatcatattcctggattcgaagtgcaagaaaccagcaggattctcgacgaatccgaagatactgacctgccttacccaccaccacaaagggaagcaaatatttacatggtgccacagaacatcaagcctgctttgcagaggaccgccattgaaatccttgcatggggacttcggaatatgaaatcttaccagctggctaacatatcctccccctctcttgtggtcgagtgtggagggcagaccgtgcaaagttgcgtgattagaaatctgcgtaagaaccccaatttcgacatttgcactctttttatggaggtgatgctgcctcgcgaggaattgtattgtccacccattacggtaaaggttatcgataataggcaattcggacgcaggcctgtggttggacagtgtacaatcaggtcactggaatcctttctgtgtgacccctacagcgctgaaagtcctagcccacagggggggcctgatgacgtgtcactgttatcccccggcgaagacgtgctcattgacatcgacgacaaagagcccttgattccaatacaggaggaagaatttatcgattggtggtctaagttcttcgcatctatcggcgaacgggagaaatgtgggagctatctcgaaaaggatttcgacaccctgaaggtgtatgacacgcaactggaaaacgtggaggcttttgagggcctgagcgatttttgtaatacctttaaattatatagaggaaagactcaggaagagaccgaggacccctccgtaattggagaatttaaggggctctttaagatttaccctttgcctgaggatcccgccatccccatgcccccaagacagttccaccagctggccgctcaaggaccccaggaatgccttgttagaatttacattgtgagagcctttggcctgcagccgaaagatcccaacggtaaatgtgatccgtacattaaaatcagcataggtaaaaagagtgtgagcgaccaggataactacattccctgtacattggagcccgtgttcggaaagatgttcgaactcacatgcactctcccactggaaaaggacctgaaaataaccttgtatgactacgacctgctttcaaaggacgaaaaaatcggggaaactgtagtggacctggagaaccgtctgctgtccaagtttggagctagatgtggactcccccagacctattgcgtctctgggcccaaccagtggagagatcagttaagaccttcccagttattacatttgttttgccagcagcacagggtaaaagcacctgtttacaggactgaccgggtgatgtttcaagacaaagaatattctatcgaggagattgaagccggccgcatccctaatccccatctgggccctgtggaggaacgcctggctttacatgttctacagcagcagggtctggtacctgagcatgtcgagtcgaggccactgtactcacctctgcagccggacatagaacagggcaagctgcaaatgtgggttgatctgtttcccaaggctctgggaagacctggtccacctttcaacattacccctcggagggcacgcagattctttctccggtgcatcatttggaacacaagagatgttatcctcgatgatctctctttaacgggcgagaagatgagcgacatctacgtgaagggatggatgattggattcgaggagcacaagcagaaaaccgatgtgcactacagaagtttagggggagaaggaaacttcaattggcggtttatcttcccattcgattacctcccggctgaacaggtctgtacgatagccaagaaggatgcattctggcggctggacaaaacagagagcaagattcccgccagagtggtctttcagatttgggataatgacaaattctcttttgacgacttcctcggatccttacaactagatctgaataggatgccaaaaccggccaaaacagcaaagaaatgcagtctggatcagctggacgatgctttccaccccgagtggttcgtgtcattgtttgagcagaaaacggtcaaaggctggtggccctgcgtggccgaggagggcgaaaagaagattctcgctggaaagttagaaatgaccctggaaattgttgcggagagtgaacacgaggagagacccgctgggcaagggagagacgaaccaaacatgaatccaaagttagaggatccaagacggcctgatacgtcttttctctggtttacgagcccctataagacaatgaagtttattctctggcgcagatttcggtgggcaatcattcttttcataatcctgtttatacttcttcttttcctggctatttttatctacgccttcccaaactacgctgcgatgaaactagtgaagccattctcctag

SEQ ID NO: 48115 - DNA, 6246 bp, Artificial Sequence
  derived and/or modified sequence
atgctgtgctgcttattagtgagagcttctaacttgccaagcgcaaagaaagaccgccgatcagaccccgttgctagcctgactttcaggggagtcaagaaaaggacaaaagtgattaaaaactccgtcaaccccgtgtggaatgaaggatttgaatgggatctcaaaggcatccctcttgatcaaggctctgaactgcacgtagtggtgaaagaccatgaaaccatgggacgcaaccgtttcttaggagaggctaaggtgccccttcgcgaggtgctggcaacaccttccctgagtgccagctttaacgccccccttttagatactaaaaagcaacccaccggtgctagcctggtcctacaggtatcttacactcccctccctggagctgtaccccttttccccccccccaccccgcttgaaccttcacccaccctccccgaccttgatgttgtcgcagataccgggggtgaagaggatacagaagaccaagggcttactggcgacgaggccgagccattcctggatcaatctggaggacccggcgctcctaccactcctaggaaactgccgtcccgcccccccccccactatcccgggatcaaaaggaagcgatccgcacccacttcaagaaaactactctctgataaacctcaagacttccaaatccgggttcaagtgatcgagggacgccagctcccaggcgtcaatattaaaccagttgttaaagtcactgccgcgggtcaaaccaagcgtacacgcattcataaggggaattcccctttgtttaatgaaacactcttttttaaccttttcgactccccaggcgaactcttcgacgagcccattttcattacagttgtagatagtcgttccctgcgaacggatgcactgctaggtgagttccgtatggatgtcgggacaatctaccgtgagccccggcatgcttaccttcgtaaatggcttctccttagcgacccagacgatttcagtgcgggagcaagagggtatttgaagacaagcctgtgtgtgctcggacctggcgacgaagctccccttgaaagaaaagaccctagcgaggacaaagaggatatagagtcgaatcttctgagacctaccggcgtggcgcttcgcggtgcacatttttgccttaaggtattccgcgcagaagatcttcctcagatggatgacgcagtgatggataatgtgaaacagatatttggctttgagtctaacaaaaagaacctcgtcgacccctttgtggaggtgtcgttcgccggaaaaatgctatgctccaagatcctcgagaagactgccaacccacaatggaaccagaacatcacactcccagcaatgttcccatctatgtgcgaaaaaatgagaatcagaatcatcgattgggatcgtctcactcataacgacatcgtcgcaaccacgtacctttccatgtcaaaaatctccgcgcctggaggagagattgaagaggagcccgccggcgcagtgaagcctagcaaagcatccgaccttgacgactacctgggattcctgcccacatttggcccctgctacattaacctttacggaagcccgagggagttcaccggctttccagatccatatacagagctgaatactggcaaaggtgaaggcgtagcctatcgcgggagactgttactgagtttggagacaaaacttgtggaacatagtgaacagaaggtggaggatctgcctgctgatgacatcttacgggtcgagaagtacttacgacggagaaaatatagtttgttcgctgccttttattcagctacaatgctgcaagatgtggatgatgccatccagtttgaagtctccattggaaactacggaaacaaattcgacatgacttgccttcctctggcttccacaacacagtattcaagggctgtgtttgacggatgtcattattactacttaccttggggcaacgttaaacccgtggtagtgctgtcttcttactgggaggatatctcacaccggattgaaacacagaaccagctgctgggaatagccgaccgcctcgaagcaggacttgaacaagtgcacctagccctgaaagcacagtgcagtaccgaagacgttgactctctcgttgcacagctaacagatgaactgatcgcaggttgctcccagcctctcggcgatatccacgagacgccttccgccacgcatctggaccaatatttatatcagctgaggacccaccacctgtcgcaaattaccgaagctgccctagctctgaaattgggacattctgaattgcccgccgccctggaacaggctgaagactggcttctgcgcctccgagctcttgctgaagaaccccaaaactctcttccggacattgttatttggatgctgcagggcgataagagagtagcttaccagcgggtgccagcacaccaggtgctcttttccagacggggtgccaactattgcggaaagaactgtggaaaattgcagaccatctttctaaaataccctatggaaaaggtcccaggagctcgtatgccagtgcaaataagggtaaaactttggttcgggttgagtgtggatgagaaggagttcaatcaatttgctgagggcaaactgtctgtattcgccgaaacttacgaaaacgagaccaaattagctttggtagggaactggggaaccactggcctgacctaccctaagttttcagatgtgaccggcaaaatcaagttaccaaaagatagttttcgcccgtcggctggatggacctgggcaggagattggtttgtgtgcccggaaaaaaccctgctacacgatatggacgcaggacacctttcttttgttgaggaggtttttgaaaaccagacacgactgccaggaggacagtggatctacatgtctgacaactacaccgacgtcaacggcgagaaggtattgcctaaagatgatatagagtgtcccctagggtggaagtgggaggacgaggagtggtcgactgatctaaacagagcagttgacgagcagggatgggagtattctataactattccaccagagagaaagccaaagcattgggttcccgctgagaagatgtactacacacacagacgcaggcggtgggtcagactgcgacggagggacttgagccagatggaggcccttaagcggcatagacaagctgaagccgaaggagaggggtgggaatacgctagtttgtttgggtggaaatttcacctggagtaccgcaagacggacgcattcagacgtcggcgatggaggaggcggatggaacctcttgagaagacaggtccagccgcagtatttgccctcgagggagctctcgggggagtgatggatgataagagtgaggattccatgtcagtttcgaccttgtcgttcggcgtaaatagacccacaatctcctgtatcttcgactacgggaacagataccacttgcgttgttacatgtaccaagcccgtgacctcgccgcgatggataaagactctttctctgacccctacgccatcgtcagcttccttcatcagtcccagaaaacagtcgttgtgaaaaataccctgaacccgacttgggaccaaacgctaattttctacgagattgagatcttcggggagcccgctacagttgccgagcagccaccaagcatcgtggtggagctctatgaccacgatacctacggcgctgacgaatttatgggtcgttgcatttgccaaccctctctcgagcgtatgcctcggcttgcttggtttcccctaacacggggttcacagccttccggagagctactggccagctttgaacttattcaacgtgagaaacccgctattcaccacatcccaggctttgaagtgcaggagactagccgaatccttgatgagagcgaggacacagatctgccctatcccccaccacagcgagaagccaacatttatatggtccctcagaacataaagcccgcccttcaacggacggcaattgaaattctcgcatggggcttgaggaacatgaagtcatatcagctggccaatattagtagcccctcactggtcgtagagtgtggcgggcaaactgtccagagctgtgtgataagaaacctgcgaaaaaaccccaattttgatatttgtactctgttcatggaagtgatgctgccaagagaagagctttattgcccacctatcacagtgaaagtaatcgacaatagacagttcggacggagacccgtggtaggccagtgcacaatccgtagtctcgagtcctttctctgtgatccatactcggcagaaagcccaagcccgcagggcggcccagacgatgtgtcactattatctccaggcgaggacgtgcttattgacatcgacgacaaagaaccccttatcccaatccaggaagaagagtttattgattggtggtcaaagttcttcgcaagcattggtgaaagagaaaaatgtgggagttatctggagaaagacttcgatactttaaaggtgtatgatacccagctggagaatgtcgaagcattcgagggtttatcagatttttgtaacacatttaagctctacagaggcaaaacacaggaagagacagaagatcctagcgtgattggtgagttcaaaggcctatttaagatttatccattgcccgaagatccggccatccctatgcctccccggcaattccatcagctcgctgctcagggccctcaggaatgcctggttcggatatatatcgttcgcgcatttggcctgcagccaaaggatcctaacggcaagtgcgatccgtatattaagatttctatcgggaaaaaaagtgtcagtgatcaggataactacattccatgtactctggagcccgtcttcggcaagatgttcgaacttacatgcactctgcccctggaaaaggatctgaaaattaccttgtacgactacgatctactgagcaaagacgaaaagatcggcgagaccgttgtggatttggaaaaccgtttgctttcaaagttcggggcccgatgcggcctgccacaaacgtattgcgtgtccggacctaaccaatggagagatcagttaaggccttcccaactgctacatcttttctgccagcagcatcgcgtcaaggcaccagtgtatagaactgatcgggtaatgtttcaggacaaagaatattctatcgaggagatcgaggccgggcgcattcccaatcctcatctggggcctgtagaagagcggctggcactgcacgtattacaacagcaagggcttgtgccagaacacgtagaatccagacccctctactcacctctacaacccgatatagaacaggggaagttacagatgtgggtggatctattccctaaggctctgggccgtccaggacctcccttcaacattacccccagacgcgcccgtcgatttttcctgagatgcattatctggaacactagggacgtaatcctcgacgacctgagtctcaccggtgaaaaaatgtccgatatttacgtgaaaggatggatgataggctttgaagagcacaagcagaagacagatgtgcactacagaagtctcggcggcgaaggaaacttcaactggcgctttattttcccttttgattaccttccagcagaacaggtgtgcacaattgcgaaaaaagacgccttttggcgattggacaaaactgagtcaaagataccggcccgggtcgttttccagatctgggacaatgataagtttagcttcgacgactttttgggctccctccagttggacttgaatagaatgccaaaacccgcgaagactgccaagaagtgttccctcgaccaattggacgacgcgtttcatccagagtggttcgtcagcttatttgaacagaagacagtcaaaggttggtggccgtgcgtcgcagaggaaggtgaaaagaaaatccttgctggcaaattagaaatgactctcgagattgttgccgagtccgagcatgaggaacggccggccggtcaaggacgcgacgaacccaatatgaaccctaagctagaggaccctaggagacccgataccagttttctttggtttacctcaccctataagacaatgaaatttatactgtggcggagatttcgatgggctatcatcctttttatcatcctgttcatactgcttctgtttctggccatctttatctacgctttccccaattatgcagcaatgaagcttgtgaaacccttctcttag

SEQ ID NO: 48116 - RNA, 6389 nt, Artificial Sequence
  derived and/or modified sequence
gggaaauaagagagaaaagaagaguaagaagaaauauaagagccaccaugcugugcugucucuugguacgggcuucgaaucuuccaucagccaagaaggacaggcgguccgacccuguagcaucgcuuacguucaggggagucaagaagagaacaaaggucauuaaaaacucaguaaaccccguguggaacgagggguucgagugggauuugaaggggaucccucucgaucaggguucagaguugcacguaguagugaaagaccaugaaacgauggggcgaaaccgcuucuugggggaagcgaaggucccccucagagaggucuuggcuacgccgucguugucggccagcuuuaacgccccguugcuggauacgaagaaacagccgacgggagccucacucguguugcaaguaucguauacuccgcuucccggggcggucccccuuuuuccucccccgacaccgcuugagccuagccccacucugcccgaucuggauguggucgcggacacugguggagaagaggacacagaggaccagggguugacuggggacgaggcagagcccuuccucgaucagucgggcgggccuggugcucccacuacaccgcggaaacucccuagccggccucccccgcacuauccagggauuaagagaaaaaggagcgcaccgacaagccgcaaacucuuguccgacaaaccgcaggacuuccaaaucagggugcaggucauugagggacgccagcuccccggagugaauaucaagcccguaguaaaagugaccgcggcaggucaaacaaaaaggacacggauucauaaaggaaauuccccgcucuucaacgagacauuguucuuuaaucucuuugauucaccgggagagcucuucgacgaaccuaucuuuaucacuguggucgauucccgcucacuucggaccgacgcgcuccuuggagaguuuaggauggauguagggacaaucuaucgagaaccgaggcaugcuuaucuuagaaaguggcugcuguugucggaucccgaugacuucuccgccggagcacggggguaucucaagacgagccucugcgucuugggaccgggggaugaagcgccccucgagcgcaaggauccguccgaggacaaagaggacaucgagagcaacuuguugcggccgacuggcguggcccugagaggagcccauuucugucucaaggucuuuagggccgaggaucucccacaaauggaugacgccguaauggauaacgugaagcagauuuucgguuuugaauccaauaagaagaaucuugucgauccguuugucgaggucucguuugccggaaagaugcuuugcagcaagauccuugaaaagacagcaaacccccaguggaaucaaaacaucacgcugccagcuauguuuccguccaugugugagaagaugagaauucgcaucaucgacugggaucggcuuacgcacaacgacaucgucgccaccaccuaucugucgaugucgaagaucucagcaccagggggugaaauugaggaagagccugccggugcagugaaaccgucaaaggcgucggauuuggaugacuaucuggguuuucuucccacauuuggaccuugcuacaucaaccuuuacggcucgccucgggaauucaccggauuccccgaccccuauacggaacugaauacagggaagggugaggggguggcauacagagguaggcuucuguugucgcucgagacaaagcuuguagagcacucggagcagaaggucgaggaccugccggcagacgauauucugcgaguggagaaauauuugcggcggcggaaguauucgcucuuugcggcauucuacagcgcuacuaugcugcaagaugucgacgacgcgauccaguucgaaguaucgaucggaaauuaugguaauaaguucgauaugacgugucuuccacucgcuucaaccacgcaguauucgagagcgguguucgauggaugccacuacuacuaucugccuuggggaaaugucaaacccgucgugguccucucguccuauugggaagauauuucacaccgcaucgagacgcagaaccagcugcugggaaucgccgauagguuggaagccggguuggagcaggugcaucucgcgcucaaggcgcagugcagcacugaggacgucgacucgcugguagcucaacuuacagacgagcugauugcgggguguagccagccccugggugauauccacgagacacccucggcgacucaccucgaccaguauuuguaccagcuccgcacccaccaccugucgcaaauuacagaggcugcccuggcgcugaagcugggacacuccgaacugcccgcagcguuggagcaggcggaagauuggcuccuuagguugagggcgcucgccgaggagccucagaauagccucccugauauugucaucuggauguugcagggggauaaacgaguggccuaccagagggucccggcgcaucaaguccuuuuuucaagacggggagccaacuacugugggaaaaacugcggaaagcugcaaaccauuuuucucaaguaccccauggagaaggugcccggugcacgcaugcccguccagauccgcgucaaacugugguuugggcucucggucgacgagaaggaguuuaaucaauuugcagagggcaaacucucgguguuugcggagacuuaugagaacgaaacgaaguuggcauugguggggaauuggggaacuacgggacuuacguacccgaaguuuagcgaugugacagggaagauuaaacuucccaaagacuccuuuagaccgucagcaggguggacaugggcgggugacugguucgugugccccgagaaaaccuuguugcaugacauggacgcuggucaucucucauucguagaggaaguguucgaaaaccaaaccagauugccggguggacaauggaucuauaugucagauaacuacacagaugucaauggggaaaaagugcuucccaaagaugacauugagugcccuuugggguggaagugggaggacgaagaguggagcacggaccucaauagggcgguagacgaacaggggugggaauauucaauuacgaucccacccgagaggaagccaaagcacugggugccugccgagaagauguauuacacgcaccgaaggagaaggugggucagauugcgacggcgcgacuugagccagauggaggcgcuuaaaagacaccgacaggcggaagccgaaggagaagguugggaguacgccucacucuucggauggaaauuucaucuggaguauagaaagacagaugccuuuagacgcaggcgguggaggagaaggauggagccuuuggagaaaacuggucccgcugccgucuuugcgcuggaaggcgcacuuggcggggucauggacgauaaguccgaggacuccaugagcgucuccacccuguccuucggcgucaauaggccaacgaucucguguaucuucgauuaugggaaucgguaccaucuccgaugcuacauguaccaggcucgcgaucuugcggcaauggacaaagacagcuuuucggauccuuacgcgaucgucucguuuuugcaucagucgcagaaaaccgucguagugaagaauacucucaacccgacgugggaccagacauugaucuuuuacgagaucgagaucuuuggggagccugcgacgguggccgagcagccgcccucgaucguagucgaauuguaugaccaugauacauauggagcagaugaguuuauggggcggugcaucugucagcccucacuggagagaaugccgagacucgcaugguuuccguugaccagaggaucgcaacccagcggugaacuccucgccucguuugaauugauucagagagagaagccugcgauccaucauauccccggcuucgagguccaagaaacgucgcgcauuuuggacgaaagcgaagauaccgaucucccguacccacccccgcaacgagaggcaaacaucuacaugguaccgcagaacaucaagccagcccuucaacgcacggccaucgaaauccucgcauggggguugcgaaauaugaagucguaucaguuggccaacauuuccucgccuucgcucguggucgaauguggcgggcaaacgguccaaucgugcgugauccgcaaccuccgcaagaaucccaauuucgauaucugcacacucuucauggaagucauguugccgcgcgaggagcuguacuguccgccgauuaccgucaaagugaucgacaaccgccaguucggccgccgcccggugguaggacagugcacaauccgcucgcuggagagcuuuuugugcgaccccuauagcgcggagucccccucgccgcagggcgguccugaugacgucucauugcuuagccccggagaggacgugcugaucgacauugacgauaaggagccgcucaucccaauccaagaagaagaguucaucgauugguggucaaaauuuuucgcauccauuggugagagggagaagugcggguccuaucuugaaaaagacuucgacacucucaaaguauacgacacucagcuggagaacgucgaggccuuugaaggacucucggacuucuguaauacauucaaacucuacagaggaaaaacgcaggaagagacagaggaccccucggucauuggcgaguuuaagggucucuucaagaucuacccgcuuccagaggauccugccaucccgaugccaccucgccaguuccaccagcucgccgcgcaagggccccaggagugccuuguccgaaucuacaucguaagagcguucggacuucagcccaaggaucccaauggaaaaugugacccguauaucaagauuucgaucggcaaaaagucgguaucagaucaggacaacuauauuccgugcacacuugagcccguauucggaaagauguucgagcucacgugcacgcugccgcucgaaaaggaccucaagaucacacuuuaugauuaugaccuucucucgaaggaugaaaagauuggcgaaacggucguggaccuugaaaauagacuccuuagcaaguucggagcaaggugcggacugccccagacguauugcgugucggggcccaaccaguggcgggaucagcuucggccaucacagcugcugcaccucuuuugccagcagcauagggugaaagccccaguguaucggacagauagagucauguuucaggauaaagaguacucaaucgaggagauugaagcagguagaauccccaacccgcaccucggacccguggaagaacggcucgcguugcacguccuucagcagcaggguuugguacccgaacacguagagucgcgcccauuguacucgcccuugcaaccagauauugaacagggaaaguugcagauguggguagaccucuuccccaaagcgcucgguagacccggaccaccuuuuaacauuaccccacgcagggcgagacgauucuuuuugcgguguauuaucuggaacacccgcgaugucauccucgaugaccucucgcucaccggagaaaagaugucggauaucuacguaaagggauggaugaucggauuugaggaacacaagcagaaaacagacgugcauuaccgaucacucgggggagaaggaaacuuuaacuggcgcuuuaucuuucccuucgacuaucuucccgccgaacaagucuguacaauugcgaaaaaggacgcauucuggcgauuggauaaaacggaauccaaaauucccgcacgcguaguauuucagaucugggacaaugauaaguucucauuugacgacuuucuggggucccugcaguuggaucugaacaggaugccgaagccugccaagacggccaaaaaguguucacucgaucaacuggacgacgccuuccacccggagugguuuguaucgcuuuuugagcagaaaacagucaaagguugguggccuuguguggcggaagagggggaaaagaaaauucucgcgggcaagcucgagaugacgcuugagaucgucgccgaguccgagcacgaggagagaccagcuggacaaggccgggaugagcccaacaugaauccgaagcuggaggacccgcgacgcccugauaccagcuuccucugguuuacgucgcccuauaagacuaugaaauucauccucuggaggagauucagaugggcgaucaucuuguucaucauccuuuucaucuugcuucuguuuuuggcgaucuuuaucuacgccuucccgaacuacgcagccaugaagcuugucaagcccuuuucaugaagcgcugccuucugcggggcuugccuucuggccaugcccuucuucucucccuugcaccuguaccucuuggucuuugaauaaagccugaguaggaag

SEQ ID NO: 48117 - RNA, 6246 nt, Artificial Sequence
  derived and/or modified sequence
augcucuguugucucuuggugcgagccagcaacuuaccgucugccaaaaaagacagaagaucugauccuguagccucacucacauuuaggggggugaagaagcggacaaaaguaaucaaaaauaguguuaacccuguuuggaaugaaggauuugaaugggaccugaaggggauucccuuggaucagggaagcgagcuacacgucguugugaaggaccaugagaccauggggaggaacagguucuugggggaggcuaaggucccccuccgcgagguucuagcaacccccucccuuuccgccagcuucaacgcgccccugcuggauaccaaaaagcagccuaccggggccucucugguccuccaggugagcuauaccccauugccuggugcuguaccucuguuccccccaccuacgccucuggagccaucaccaacguugcccgaccuggauguuguagcugacacugggggugaggaagauaccgaggaccagggucuaaccggagaugaagccgaaccuuuucucgaccaguccggaggacccggggcaccgacuacaccacgaaagcucccuucccggccucccccucacuauccaggaaucaaacgaaaacggagcgccccaaccucacgcaagcuucugagcgauaaaccacaggacuuccagauacgcguucaagugauugagggccgccagcugccgggugugaauauaaagccugucgugaaggugaccgcugcuggucagacuaaacguacuaggauccauaaggguaauucaccacuguuuaacgagacacuguucuucaaccucuucgauuccccuggugagcuuuucgacgagccuaucuuuaucaccguggucgauucaaggagucugaggaccgaugcucuucuuggcgaguuccgcauggauguagggacuauuuaccgggagcccagacaugccuaccugcgcaagugguuacuguugucugauccugacgacuucagugcuggagcgaggggauacuugaaaaccagccuuuguguccuggggcccggggaugaggccccccuagagagaaaagacccaucggaggacaaggaagauauagagucuaaucugcuacggccaacugggguugcauuaaggggggcacacuuuugucugaaaguuuuuagggcugaggaccucccucaaauggaugacgccguaauggauaauguaaaacagauauucgguuuugagucuaauaaaaaaaaucucgucgauccuuucgucgagguuuccuucgccggaaaaauguugugcagcaagaucuuagaaaaaacagcuaacccccaguggaaccagaacaucacacucccugccauguuuccuucaaugugugaaaaaaugagaauucgaauuaucgacugggaccgauugacccauaacgacauuguggcuaccacauaucucaguaugucuaagauuagugcuccaggaggugagauagaggaggagcccgccggcgcggucaagccuagcaaagccuccgacuuggaugauuaucucggguucuugcccacguuuggcccauguuacaucaaucuuuacgguagcccucgcgaguucacuggcuuuccggaucccuacacggaacuaaauacugggaagggcgagggaguggcguaucggggacggcugcugcuuagucuggagaccaaacugguggagcauagcgaacagaagguugaagaucuucccgccgacgacauauugcgaguagaaaaguaccucagacgcaggaaguacucccuauuugcagcuuucuauucggccacaaugcugcaagacguggaugaugcaauccaguucgaaguuuccauaggaaauuaugggaauaaguuugacaugaccugucucccucuagcuuccacaacacaguacuccagagcuguguucgaugggugucauuauuauuacuugcccuggggcaauguuaagccugugguggucuugaguaguuauugggaggacauuagucaucgcauagaaacacagaaccagcuucuagggauugcugaucgguuagaagcaggacuggagcagguacacuuggcgcucaaagcucaguguucuaccgaggaugucgacagucuagucgcccagcuaaccgacgaguugaucgcaggcuguagccagccccugggggacauccacgagaccccuagcgccacacaccuggaucaguaucuuuaccagcuccggacacaccaucugagccagauuacagaagccgcucuugcccucaaacuaggccacucugaguugccugcugcccuagagcaagcggaagauuggcuccugcgccugagagcccuggccgaagagccucagaacagccuucccgauauuguuaucuggaugcuacagggugacaaacgcguugccuaccaacgcgugccggcucaccagguacuguucucccgucggggagcgaauuacugcggaaaaaacuguggaaaacugcaaacgaucuucuugaaguacccuauggaaaaagugcccggagccaggaugcccguucaaauucgagugaaauuaugguucggccuuaguguagaugaaaaagaguucaaucaguucgcugaggguaaacucaguguuuuugcugagacuuaugaaaaugaaacuaaacuggcacuugucgguaauugggggaccaccggacuaacauauccgaaguucagcgaugugacagggaagaucaagcugccuaaggauucauuccgucccagcgcaggauggacuugggcaggugauugguucgugugccccgagaagacucugcugcaugauauggaugccggucaucucuccuuuguagaggagguguuugagaaccagaccagacuucccggggggcaguggaucuauaugucagauaacuauaccgaugugaauggggaaaaaguacucccuaaggaugacaucgaaugcccacugggcuggaaaugggaagacgaggaguggucaaccgacuuaaaccgcgcgguggaugagcagggcugggaguauucgaucaccaucccuccagagaggaagccgaaacacuggguaccugccgaaaagauguauuacacucacaggcggaggagaugggugcgacugagacgccgggauuugagccagauggaagcccugaagaggcaccgucaggcagaggcugaaggggagggcugggaguaugcgagccuguucgguuggaaguuucauuuagaguaccgcaagacggacgcguucaggagacgacgcuggcggaggagaauggagccucuugagaagacagguccagccgcaguauuugcccucgagggagcucucgggggagugauggaugauaagagugaggauuccaugucaguuucgaccuugucguucggcguaaauagacccacaaucuccuguaucuucgacuacgggaacagauaccacuugcguuguuacauguaccaagcccgugaccucgccgcgauggauaaagacucuuucucugaccccuacgccaucgucagcuuccuucaucagucccagaaaacagucguugugaaaaauacccugaacccgacuugggaucagacacugaucuucuaugagauugagaucuucggggagccugccacagucgccgagcagccccccuccauuguuguugagcuuuaugaucacgauacauacggcgccgacgaauuuaugggacgcuguauuugucagccgagccuggagagaaugccaagacuugccugguuuccucugaccagaggaagccaaccuuccggagagcuucucgccucauucgagcugauacaacgggagaagcccgcuauucaucauauuccuggauucgaagugcaagaaaccagcaggauucucgacgaauccgaagauacugaccugccuuacccaccaccacaaagggaagcaaauauuuacauggugccacagaacaucaagccugcuuugcagaggaccgccauugaaauccuugcauggggacuucggaauaugaaaucuuaccagcuggcuaacauauccucccccucucuuguggucgaguguggagggcagaccgugcaaaguugcgugauuagaaaucugcguaagaaccccaauuucgacauuugcacucuuuuuauggaggugaugcugccucgcgaggaauuguauuguccacccauuacgguaaagguuaucgauaauaggcaauucggacgcaggccugugguuggacaguguacaaucaggucacuggaauccuuucugugugaccccuacagcgcugaaaguccuagcccacagggggggccugaugacgugucacuguuaucccccggcgaagacgugcucauugacaucgacgacaaagagcccuugauuccaauacaggaggaagaauuuaucgauugguggucuaaguucuucgcaucuaucggcgaacgggagaaaugugggagcuaucucgaaaaggauuucgacacccugaagguguaugacacgcaacuggaaaacguggaggcuuuugagggccugagcgauuuuuguaauaccuuuaaauuauauagaggaaagacucaggaagagaccgaggaccccuccguaauuggagaauuuaaggggcucuuuaagauuuacccuuugccugaggaucccgccauccccaugcccccaagacaguuccaccagcuggccgcucaaggaccccaggaaugccuuguuagaauuuacauugugagagccuuuggccugcagccgaaagaucccaacgguaaaugugauccguacauuaaaaucagcauagguaaaaagagugugagcgaccaggauaacuacauucccuguacauuggagcccguguucggaaagauguucgaacucacaugcacucucccacuggaaaaggaccugaaaauaaccuuguaugacuacgaccugcuuucaaaggacgaaaaaaucggggaaacuguaguggaccuggagaaccgucugcuguccaaguuuggagcuagauguggacucccccagaccuauugcgucucugggcccaaccaguggagagaucaguuaagaccuucccaguuauuacauuuguuuugccagcagcacaggguaaaagcaccuguuuacaggacugaccgggugauguuucaagacaaagaauauucuaucgaggagauugaagccggccgcaucccuaauccccaucugggcccuguggaggaacgccuggcuuuacauguucuacagcagcagggucugguaccugagcaugucgagucgaggccacuguacucaccucugcagccggacauagaacagggcaagcugcaaauguggguugaucuguuucccaaggcucugggaagaccugguccaccuuucaacauuaccccucggagggcacgcagauucuuucuccggugcaucauuuggaacacaagagauguuauccucgaugaucucucuuuaacgggcgagaagaugagcgacaucuacgugaagggauggaugauuggauucgaggagcacaagcagaaaaccgaugugcacuacagaaguuuagggggagaaggaaacuucaauuggcgguuuaucuucccauucgauuaccucccggcugaacaggucuguacgauagccaagaaggaugcauucuggcggcuggacaaaacagagagcaagauucccgccagaguggucuuucagauuugggauaaugacaaauucucuuuugacgacuuccucggauccuuacaacuagaucugaauaggaugccaaaaccggccaaaacagcaaagaaaugcagucuggaucagcuggacgaugcuuuccaccccgagugguucgugucauuguuugagcagaaaacggucaaaggcugguggcccugcguggccgaggagggcgaaaagaagauucucgcuggaaaguuagaaaugacccuggaaauuguugcggagagugaacacgaggagagacccgcugggcaagggagagacgaaccaaacaugaauccaaaguuagaggauccaagacggccugauacgucuuuucucugguuuacgagccccuauaagacaaugaaguuuauucucuggcgcagauuucggugggcaaucauucuuuucauaauccuguuuauacuucuucuuuuccuggcuauuuuuaucuacgccuucccaaacuacgcugcgaugaaacuagugaagccauucuccuag

SEQ ID NO: 48118 - RNA, 6246 nt, Artificial Sequence
  derived and/or modified sequence
augcugugcugcuuauuagugagagcuucuaacuugccaagcgcaaagaaagaccgccgaucagaccccguugcuagccugacuuucaggggagucaagaaaaggacaaaagugauuaaaaacuccgucaaccccguguggaaugaaggauuugaaugggaucucaaaggcaucccucuugaucaaggcucugaacugcacguaguggugaaagaccaugaaaccaugggacgcaaccguuucuuaggagaggcuaaggugccccuucgcgaggugcuggcaacaccuucccugagugccagcuuuaacgccccccuuuuagauacuaaaaagcaacccaccggugcuagccugguccuacagguaucuuacacuccccucccuggagcuguaccccuuuuccccccccccaccccgcuugaaccuucacccacccuccccgaccuugauguugucgcagauaccgggggugaagaggauacagaagaccaagggcuuacuggcgacgaggccgagccauuccuggaucaaucuggaggacccggcgcuccuaccacuccuaggaaacugccgucccgcccccccccccacuaucccgggaucaaaaggaagcgauccgcacccacuucaagaaaacuacucucugauaaaccucaagacuuccaaauccggguucaagugaucgagggacgccagcucccaggcgucaauauuaaaccaguuguuaaagucacugccgcgggucaaaccaagcguacacgcauucauaaggggaauuccccuuuguuuaaugaaacacucuuuuuuaaccuuuucgacuccccaggcgaacucuucgacgagcccauuuucauuacaguuguagauagucguucccugcgaacggaugcacugcuaggugaguuccguauggaugucgggacaaucuaccgugagccccggcaugcuuaccuucguaaauggcuucuccuuagcgacccagacgauuucagugcgggagcaagaggguauuugaagacaagccugugugugcucggaccuggcgacgaagcuccccuugaaagaaaagacccuagcgaggacaaagaggauauagagucgaaucuucugagaccuaccggcguggcgcuucgcggugcacauuuuugccuuaagguauuccgcgcagaagaucuuccucagauggaugacgcagugauggauaaugugaaacagauauuuggcuuugagucuaacaaaaagaaccucgucgaccccuuuguggaggugucguucgccggaaaaaugcuaugcuccaagauccucgagaagacugccaacccacaauggaaccagaacaucacacucccagcaauguucccaucuaugugcgaaaaaaugagaaucagaaucaucgauugggaucgucucacucauaacgacaucgucgcaaccacguaccuuuccaugucaaaaaucuccgcgccuggaggagagauugaagaggagcccgccggcgcagugaagccuagcaaagcauccgaccuugacgacuaccugggauuccugcccacauuuggccccugcuacauuaaccuuuacggaagcccgagggaguucaccggcuuuccagauccauauacagagcugaauacuggcaaaggugaaggcguagccuaucgcgggagacuguuacugaguuuggagacaaaacuuguggaacauagugaacagaagguggaggaucugccugcugaugacaucuuacgggucgagaaguacuuacgacggagaaaauauaguuuguucgcugccuuuuauucagcuacaaugcugcaagauguggaugaugccauccaguuugaagucuccauuggaaacuacggaaacaaauucgacaugacuugccuuccucuggcuuccacaacacaguauucaagggcuguguuugacggaugucauuauuacuacuuaccuuggggcaacguuaaacccgugguagugcugucuucuuacugggaggauaucucacaccggauugaaacacagaaccagcugcugggaauagccgaccgccucgaagcaggacuugaacaagugcaccuagcccugaaagcacagugcaguaccgaagacguugacucucucguugcacagcuaacagaugaacugaucgcagguugcucccagccucucggcgauauccacgagacgccuuccgccacgcaucuggaccaauauuuauaucagcugaggacccaccaccugucgcaaauuaccgaagcugcccuagcucugaaauugggacauucugaauugcccgccgcccuggaacaggcugaagacuggcuucugcgccuccgagcucuugcugaagaaccccaaaacucucuuccggacauuguuauuuggaugcugcagggcgauaagagaguagcuuaccagcgggugccagcacaccaggugcucuuuuccagacggggugccaacuauugcggaaagaacuguggaaaauugcagaccaucuuucuaaaauacccuauggaaaaggucccaggagcucguaugccagugcaaauaaggguaaaacuuugguucggguugaguguggaugagaaggaguucaaucaauuugcugagggcaaacugucuguauucgccgaaacuuacgaaaacgagaccaaauuagcuuugguagggaacuggggaaccacuggccugaccuacccuaaguuuucagaugugaccggcaaaaucaaguuaccaaaagauaguuuucgcccgucggcuggauggaccugggcaggagauugguuugugugcccggaaaaaacccugcuacacgauauggacgcaggacaccuuucuuuuguugaggagguuuuugaaaaccagacacgacugccaggaggacaguggaucuacaugucugacaacuacaccgacgucaacggcgagaagguauugccuaaagaugauauagaguguccccuaggguggaagugggaggacgaggaguggucgacugaucuaaacagagcaguugacgagcagggaugggaguauucuauaacuauuccaccagagagaaagccaaagcauuggguucccgcugagaagauguacuacacacacagacgcaggcggugggucagacugcgacggagggacuugagccagauggaggcccuuaagcggcauagacaagcugaagccgaaggagaggggugggaauacgcuaguuuguuuggguggaaauuucaccuggaguaccgcaagacggacgcauucagacgucggcgauggaggaggcggauggaaccucuugagaagacagguccagccgcaguauuugcccucgagggagcucucgggggagugauggaugauaagagugaggauuccaugucaguuucgaccuugucguucggcguaaauagacccacaaucuccuguaucuucgacuacgggaacagauaccacuugcguuguuacauguaccaagcccgugaccucgccgcgauggauaaagacucuuucucugaccccuacgccaucgucagcuuccuucaucagucccagaaaacagucguugugaaaaauacccugaacccgacuugggaccaaacgcuaauuuucuacgagauugagaucuucggggagcccgcuacaguugccgagcagccaccaagcaucgugguggagcucuaugaccacgauaccuacggcgcugacgaauuuaugggucguugcauuugccaacccucucucgagcguaugccucggcuugcuugguuuccccuaacacgggguucacagccuuccggagagcuacuggccagcuuugaacuuauucaacgugagaaacccgcuauucaccacaucccaggcuuugaagugcaggagacuagccgaauccuugaugagagcgaggacacagaucugcccuaucccccaccacagcgagaagccaacauuuauauggucccucagaacauaaagcccgcccuucaacggacggcaauugaaauucucgcauggggcuugaggaacaugaagucauaucagcuggccaauauuaguagccccucacuggucguagaguguggcgggcaaacuguccagagcugugugauaagaaaccugcgaaaaaaccccaauuuugauauuuguacucuguucauggaagugaugcugccaagagaagagcuuuauugcccaccuaucacagugaaaguaaucgacaauagacaguucggacggagacccgugguaggccagugcacaauccguagucucgaguccuuucucugugauccauacucggcagaaagcccaagcccgcagggcggcccagacgaugugucacuauuaucuccaggcgaggacgugcuuauugacaucgacgacaaagaaccccuuaucccaauccaggaagaagaguuuauugauugguggucaaaguucuucgcaagcauuggugaaagagaaaaaugugggaguuaucuggagaaagacuucgauacuuuaaagguguaugauacccagcuggagaaugucgaagcauucgaggguuuaucagauuuuuguaacacauuuaagcucuacagaggcaaaacacaggaagagacagaagauccuagcgugauuggugaguucaaaggccuauuuaagauuuauccauugcccgaagauccggccaucccuaugccuccccggcaauuccaucagcucgcugcucagggcccucaggaaugccugguucggauauauaucguucgcgcauuuggccugcagccaaaggauccuaacggcaagugcgauccguauauuaagauuucuaucgggaaaaaaagugucagugaucaggauaacuacauuccauguacucuggagcccgucuucggcaagauguucgaacuuacaugcacucugccccuggaaaaggaucugaaaauuaccuuguacgacuacgaucuacugagcaaagacgaaaagaucggcgagaccguuguggauuuggaaaaccguuugcuuucaaaguucggggcccgaugcggccugccacaaacguauugcguguccggaccuaaccaauggagagaucaguuaaggccuucccaacugcuacaucuuuucugccagcagcaucgcgucaaggcaccaguguauagaacugaucggguaauguuucaggacaaagaauauucuaucgaggagaucgaggccgggcgcauucccaauccucaucuggggccuguagaagagcggcuggcacugcacguauuacaacagcaagggcuugugccagaacacguagaauccagaccccucuacucaccucuacaacccgauauagaacaggggaaguuacagauguggguggaucuauucccuaaggcucugggccguccaggaccucccuucaacauuacccccagacgcgcccgucgauuuuuccugagaugcauuaucuggaacacuagggacguaauccucgacgaccugagucucaccggugaaaaaauguccgauauuuacgugaaaggauggaugauaggcuuugaagagcacaagcagaagacagaugugcacuacagaagucucggcggcgaaggaaacuucaacuggcgcuuuauuuucccuuuugauuaccuuccagcagaacaggugugcacaauugcgaaaaaagacgccuuuuggcgauuggacaaaacugagucaaagauaccggcccgggucguuuuccagaucugggacaaugauaaguuuagcuucgacgacuuuuugggcucccuccaguuggacuugaauagaaugccaaaacccgcgaagacugccaagaaguguucccucgaccaauuggacgacgcguuucauccagagugguucgucagcuuauuugaacagaagacagucaaagguugguggccgugcgucgcagaggaaggugaaaagaaaauccuugcuggcaaauuagaaaugacucucgagauuguugccgaguccgagcaugaggaacggccggccggucaaggacgcgacgaacccaauaugaacccuaagcuagaggacccuaggagacccgauaccaguuuucuuugguuuaccucacccuauaagacaaugaaauuuauacuguggcggagauuucgaugggcuaucauccuuuuuaucauccuguucauacugcuucuguuucuggccaucuuuaucuacgcuuuccccaauuaugcagcaaugaagcuugugaaacccuucucuuag

SEQ ID NO: 48119 - protein, 508 aa, Artificial Sequence
  derived and/or modified sequence
MPPKRNEKYKLPIPFPEGKVLDDMEGNQWVLGKKIGSGGFGLIYLAFPTNKPEKDARHVVKVEYQENGPLFSELKFYQRVAKKDCIKKWIERKQLDYLGIPLFYGSGLTEFKGRSYRFMVMERLGIDLQKISGQNGTFKKSTVLQLGIRMLDVLEYIHENEYVHGDIKAANLLLGYKNPDQVYLADYGLSYRYCPNGNHKQYQENPRKGHNGTIEFTSLDAHKGVALSRRSDVEILGYCMLRWLCGKLPWEQNLKDPVAVQTAKTNLLDELPQSVLKWAPSGSSCCEIAQFLVCAHSLAYDEKPNYQALKKILNPHGIPLGPLDFSTKGQSINVHTPNSQKVDSQKAATKQVNKAHNRLIEKKVHSERSAESCATWKVQKEEKLIGLMNNEAAQESTRRRQKYQESQEPLNEVNSFPQKISYTQFPNSFYEPHQDFTSPDIFKKSRSPSWYKYTSTVSTGITDLESSTGLWPTISQFTLSEETNADVYYYRIIIPVLLMLVFLALFFL

SEQ ID NO: 48120 - protein, 400 aa, Artificial Sequence
  derived and/or modified sequence
MPPKRNEKYKLPIPFPEGKVLDDMEGNQWVLGKKIGSGGFGLIYLAFPTNKPEKDARHVVKVEYQENGPLFSELKFYQRVAKKDCIKKWIERKQLDYLGIPLFYGSGLTEFKGRSYRFMVMERLGIDLQKISGQNGTFKKSTVLQLGIRMLDVLEYIHENEYVHGDIKAANLLLGYKNPDQVYLADYGLSYRYCPNGNHKQYQENPRKGHNGTIEFTSLDAHKGVALSRRSDVEILGYCMLRWLCGKLPWEQNLKDPVAVQTAKTNLLDELPQSVLKWAPSGSSCCEIAQFLVCAHSLAYDEKPNYQALKKILNPHGIPLGPLDFSTKGQSINVHTPNSQKVDSQKAATKQVNKAHNRLIEKKVHSERSAESCATWKVQKEEKLIGLMNNEAAQIRQLGY

SEQ ID NO: 48121 - protein, 291 aa, Artificial Sequence [sequence omitted]

SEQ ID NO: 48122 - DNA, 1527 bp, Artificial Sequence
  derived and/or modified sequence
atgccccccaagagaaacgagaagtacaagctgcccatccccttccccgagggcaaggtgctggacgacatggagggcaaccagtgggtgctgggcaagaagatcggcagcggcggcttcggcctgatctacctggccttccccaccaacaagcccgagaaggacgccagacacgtggtgaaggtggagtaccaggagaacggccccctgttcagcgagctgaagttctaccagagagtggccaagaaggactgcatcaagaagtggatcgagagaaagcagctggactacctgggcatccccctgttctacggcagcggcctgaccgagttcaagggcagaagctacagattcatggtgatggagagactgggcatcgacctgcagaagatcagcggccagaacggcaccttcaagaagagcaccgtgctgcagctgggcatcagaatgctggacgtgctggagtacatccacgagaacgagtacgtgcacggcgacatcaaggccgccaacctgctgctgggctacaagaaccccgaccaggtgtacctggccgactacggcctgagctacagatactgccccaacggcaaccacaagcagtaccaggagaaccccagaaagggccacaacggcaccatcgagttcaccagcctggacgcccacaagggcgtggccctgagcagaagaagcgacgtggagatcctgggctactgcatgctgagatggctgtgcggcaagctgccctgggagcagaacctgaaggaccccgtggccgtgcagaccgccaagaccaacctgctggacgagctgccccagagcgtgctgaagtgggcccccagcggcagcagctgctgcgagatcgcccagttcctggtgtgcgcccacagcctggcctacgacgagaagcccaactaccaggccctgaagaagatcctgaacccccacggcatccccctgggccccctggacttcagcaccaagggccagagcatcaacgtgcacacccccaacagccagaaggtggacagccagaaggccgccaccaagcaggtgaacaaggcccacaacagactgatcgagaagaaggtgcacagcgagagaagcgccgagagctgcgccacctggaaggtgcagaaggaggagaagctgatcggcctgatgaacaacgaggccgcccaggagagcaccagaagaagacagaagtaccaggagagccaggagcccctgaacgaggtgaacagcttcccccagaagatcagctacacccagttccccaacagcttctacgagccccaccaggacttcaccagccccgacatcttcaagaagagcagaagccccagctggtacaagtacaccagcaccgtgagcaccggcatcaccgacctggagagcagcaccggcctgtggcccaccatcagccagttcaccctgagcgaggagaccaacgccgacgtgtactactacagaatcatcatccccgtgctgctgatgctggtgttcctggccctgttcttcctgtag

SEQ ID NO: 48123 - DNA, 1458 bp, Artificial Sequence
  derived and/or modified sequence
atggagggcaaccagtgggtgctgggcaagaagatcggcagcggcggcttcggcctgatctacctggccttccccaccaacaagcccgagaaggacgccagacacgtggtgaaggtggagtaccaggagaacggccccctgttcagcgagctgaagttctaccagagagtggccaagaaggactgcatcaagaagtggatcgagagaaagcagctggactacctgggcatccccctgttctacggcagcggcctgaccgagttcaagggcagaagctacagattcatggtgatggagagactgggcatcgacctgcagaagatcagcggccagaacggcaccttcaagaagagcaccgtgctgcagctgggcatcagaatgctggacgtgctggagtacatccacgagaacgagtacgtgcacggcgacatcaaggccgccaacctgctgctgggctacaagaaccccgaccaggtgtacctggccgactacggcctgagctacagatactgccccaacggcaaccacaagcagtaccaggagaaccccagaaagggccacaacggcaccatcgagttcaccagcctggacgcccacaagggcgtggccctgagcagaagaagcgacgtggagatcctgggctactgcatgctgagatggctgtgcggcaagctgccctgggagcagaacctgaaggaccccgtggccgtgcagaccgccaagaccaacctgctggacgagctgccccagagcgtgctgaagtgggcccccagcggcagcagctgctgcgagatcgcccagttcctggtgtgcgcccacagcctggcctacgacgagaagcccaactaccaggccctgaagaagatcctgaacccccacggcatccccctgggccccctggacttcagcaccaagggccagagcatcaacgtgcacacccccaacagccagaaggtggacagccagaaggccgccaccaagcaggtgaacaaggcccacaacagactgatcgagaagaaggtgcacagcgagagaagcgccgagagctgcgccacctggaaggtgcagaaggaggagaagctgatcggcctgatgaacaacgaggccgcccaggagagcaccagaagaagacagaagtaccaggagagccaggagcccctgaacgaggtgaacagcttcccccagaagatcagctacacccagttccccaacagcttctacgagccccaccaggacttcaccagccccgacatcttcaagaagagcagaagccccagctggtacaagtacaccagcaccgtgagcaccggcatcaccgacctggagagcagcaccggcctgtggcccaccatcagccagttcaccctgagcgaggagaccaacgccgacgtgtactactacagaatcatcatccccgtgctgctgatgctggtgttcctggccctgttcttcctgtag

SEQ ID NO: 48124 - DNA, 1527 bp, Artificial Sequence
  derived and/or modified sequence
atgcctcccaaaagaaatgagaagtataagctgcctataccttttccagaaggaaaagtcctggatgacatggaaggtaatcagtgggtactgggtaaaaagataggatctggcggcttcggcctcatctatctagcctttccaactaacaagcctgagaaagatgcacgccacgttgtgaaagtagagtatcaagaaaatggccctctgttcagcgagctcaaattttatcaaagagtggccaagaaggactgtatcaaaaaatggatagaacgcaagcagctcgactatttgggtatccctctattttacggtagcgggctcaccgagttcaagggaagaagctaccggtttatggttatggaacgcctggggattgacctccagaagatatctggccagaatgggactttcaagaaatccaccgttctgcagcttggaattaggatgttagacgtcctggaatacattcatgaaaacgagtatgtacacggagatattaaagctgccaacctcctgttagggtacaagaatcccgatcaggtctacctggctgactatggcctctcttaccggtattgtcccaacgggaatcataaacaataccaggagaatccccggaaagggcacaatggcacaattgagttcacatctctcgatgctcacaaaggcgtggctctgagcaggcgtagcgacgtggagattcttggctattgtatgctgcgctggctctgtggcaagctgccgtgggagcagaatcttaaagaccccgtggccgtgcagaccgccaagaccaatctcctcgacgagctgccacagtctgtcctgaagtgggccccttctggaagcagttgttgcgaaatcgcacagttcttggtctgcgcccactctcttgcttatgacgagaagcctaactaccaggcgcttaagaagatcctgaatccccacgggatcccactgggcccactggatttttctaccaaagggcagtcgatcaacgtccacacgcctaacagccagaaggtggatagccagaaagcagcgactaagcaggtcaataaagcccacaatcggttgattgagaagaaagtgcatagcgagcgttccgcggagagttgcgccacatggaaggtacagaaggaggaaaagctgataggactgatgaacaatgaagccgcccaggaaagcacacggcgtcggcagaaataccaggaaagccaggagccactgaatgaggtaaattcttttccacagaaaatcagctacacacagttccctaatagcttctacgagccccaccaagacttcacgtcccctgacatattcaaaaaaagcagaagcccctcttggtataaatatacaagtactgtttctaccggtataacggatctcgaaagttcgacaggcctttggcccactattagtcagttcaccctgagtgaagagaccaatgcagacgtctattactacagaataatcatccccgtgcttctgatgcttgtgtttctagctttgtttttcctgtag

SEQ ID NO: 48125 - DNA, 1527 bp, Artificial Sequence
  derived and/or modified sequence
atgcccccaaagagaaatgagaaatacaaactcccaatccctttccctgaggggaaagttttagacgatatggaggggaatcagtgggtgctggggaaaaagatcggatcgggaggtttcgggctgatatatctagcgttcccaaccaataagccggaaaaagacgccagacacgtggtaaaggtggaataccaagagaatgggcctctctttagcgagctcaaattctatcagcgggtggccaagaaggactgcataaaaaagtggattgaaagaaaacaattggattatctcgggatccccttgttttacggatccggtttgactgagttcaagggcaggtcctatcgctttatggtgatggaacggcttggaattgatcttcaaaagatttctggacagaatggcacctttaaaaagtctaccgtattacagcttggcattcgcatgctggacgtcctggagtatatacatgagaatgagtatgtgcacggtgacataaaggcagctaaccttttattaggctataaaaaccccgatcaggtatacctagccgactacggcttatcataccggtactgccctaatggcaatcataagcagtaccaggagaaccccagaaagggccataatggtacaattgagttcacctcactggatgcccacaagggtgtggctctgtcgcggaggagcgatgttgaaattcttgggtactgtatgctgaggtggctgtgtgggaagctgccgtgggagcagaacctcaaggacccagtagccgtgcagactgccaaaactaatctgctggacgaattgcctcaatcagtgcttaaatgggccccatccggttcttcatgctgcgaaatcgcccagttcctggtatgcgctcactcccttgcatacgacgagaagcccaattatcaggccttgaagaaaattctgaacccccacggaattcctctgggacccttagatttctccaccaaaggccaatcaataaatgtccacaccccaaactctcagaaagttgacagccaaaaggcagctaccaagcaggtgaacaaagcccataataggctcatagagaagaaagtacatagcgagcggtctgctgaaagctgtgcaacctggaaagtgcagaaggaagaaaagctgattggccttatgaataacgaagccgctcaggagtctaccagaagacgacagaagtaccaagaatcgcaggagcccctcaatgaggtgaactctttcccacagaaaatctcatacacccaattcccaaactccttttatgagcctcatcaagatttcacttccccagacatcttcaaaaagtctcgttccccgagctggtacaagtacacgtcaacagtctcgaccgggataacagacctcgaatcatctacaggtctatggccaaccatctcacagtttacactgtccgaggaaacaaacgcagacgtctactattaccgtatcattataccagtgttgctgatgttagtgttccttgcactgtttttcttatag

SEQ ID NO: 48126 - DNA, 1458 bp, Artificial Sequence
  derived and/or modified sequence
atggagggaaaccagtgggtcctcggcaagaagattggcagcggtggctttggccttatttatctagccttccctaccaacaaaccagagaaagacgctcggcatgtggtcaaggtggagtatcaagagaatggacccctgttttcagaactgaagttttatcagagagtcgcgaagaaggattgtattaaaaaatggattgagagaaagcagctggactacctcggtataccactgttctacggatccgggttgactgagtttaagggtcgttcataccggttcatggtgatggaaagactggggattgatttgcaaaaaatatccggacagaacggcacatttaagaagagtaccgtgctgcagctggggatacggatgctggacgtcctggaatacatccacgagaatgagtatgtgcatggggacattaaggccgctaatttgttactgggctacaaaaaccctgaccaagtgtatctggccgactatggtctgtcgtatcggtactgtccaaatggaaaccataaacagtatcaagagaatccgcgaaagggccataatggaacaatagaattcaccagcctggacgcccacaaaggagtggccctaagccgacggtccgacgtggaaattctgggatattgcatgttgaggtggctgtgtggaaaactgccctgggagcagaatttgaaggacccagtggcagtccagaccgccaagacgaacctcctggacgagctcccccagtcagtgcttaagtgggcacccagtgggagttcatgctgcgagatcgcacagtttctggtgtgtgcccatagccttgcctatgacgaaaagccaaactatcaggcactgaaaaaaatactgaatccccacggcattcccctggggcccctcgatttttcaactaagggccagtccattaatgtccacaccccgaattcccagaaagttgactctcagaaggccgccacgaagcaggtgaataaggctcacaataggctgatagagaaaaaagtgcacagcgaacgctccgcagagagttgtgccacctggaaggtgcaaaaagaagaaaagctgattggactgatgaacaacgaggctgcccaggagtcgacaaggaggagacagaagtaccaggagagccaggaacccctgaacgaggtgaattccttccctcaaaagatttcctacacccagttccctaactctttttacgaaccccatcaggacttcaccagtccagacatcttcaagaaaagcaggtcacctagctggtacaaatatacttccacggtgtcaacaggcataacagacctggaaagtagcacaggactctggcccaccatctcccaattcacactctctgaggagaccaatgcagatgtgtactactaccgaatcattatcccagtgctgctgatgctggtgttcttggctctcttttttttatag

SEQ ID NO: 48127 - DNA, 1527 bp, Artificial Sequence
  derived and/or modified sequence
atgccacccaagagaaatgagaagtacaagctgcccatccccttccctgagggcaaggtgctggatgacatggagggcaaccagtgggtgctgggcaagaagattggcagcggcggcttcggcctcatctacctggccttccccaccaacaagccagagaaggatgcccggcacgtggtgaaggtggagtaccaggagaatggccccctcttcagcgagctgaagttctaccagagggtggccaagaaggactgcatcaagaagtggattgaaaggaagcagctggactacctgggcatccccctcttctacggcagcggcctgacagagttcaagggccgcagctaccgcttcatggtgatggagcggctgggcatcgacctgcagaagatcagcggccagaatggcaccttcaagaagagcacagtgctgcagctgggcatccgcatgctggatgtgctggagtacatccatgaaaatgaatatgtgcacggggacatcaaggccgccaacctgctgctgggctacaagaacccagaccaggtgtacctggccgactatggcctgagctaccgctactgccccaacggcaaccacaagcagtaccaggagaaccccaggaagggccacaacggcaccatcgagttcaccagcctggatgcccacaagggcgtggccctgagcagaagaagtgatgtggagatcctgggctactgcatgctgcgctggctgtgtgggaagctgccctgggagcagaacctgaaggaccctgtggccgtgcagacagccaagaccaacctgctggatgagctgccccagagcgtgctgaagtgggcccccagcggcagcagctgctgtgagatcgcccagttcctggtgtgtgcccacagcctggcctatgatgagaagcccaactaccaggccctgaagaagatcctgaacccccacggcatccccctgggccccctggacttcagcaccaagggccagagcatcaacgtgcacacccccaacagccagaaggtggacagccagaaggccgccaccaagcaggtgaacaaggcccacaacagactcatcgagaagaaggtgcacagcgagaggtctgctgagagctgtgccacctggaaggtgcagaaggaggagaagctgattggcctgatgaacaatgaggccgcccaggagagcacccggcggcggcagaagtaccaggagagccaggagcccctgaatgaggtgaacagcttcccccagaagatctcctacacccagttccccaacagcttctatgagccccaccaggacttcaccagcccagacatcttcaagaagagccgcagccccagctggtacaagtacaccagcacagtgtccacaggcatcacagacctggagagcagcacaggcctgtggcccaccatcagccagttcaccctgtctgaggagaccaatgctgatgtgtactactaccgcatcatcatccctgtgctgctgatgctggtgttcctggccctcttcttcctgtag

SEQ ID NO: 48128 - DNA, 1458 bp, Artificial Sequence
  derived and/or modified sequence
atggagggcaaccagtgggtgctgggcaagaagattggcagcggcggcttcggcctcatctacctggccttccccaccaacaagccagagaaggatgcccggcacgtggtgaaggtggagtaccaggagaatggccccctcttcagcgagctgaagttctaccagagggtggccaagaaggactgcatcaagaagtggattgaaaggaagcagctggactacctgggcatccccctcttctacggcagcggcctgacagagttcaagggccgcagctaccgcttcatggtgatggagcggctgggcatcgacctgcagaagatcagcggccagaatggcaccttcaagaagagcacagtgctgcagctgggcatccgcatgctggatgtgctggagtacatccatgaaaatgaatatgtgcatggagacatcaaggccgccaacctgctgctgggctacaagaacccagaccaggtgtacctggccgactatggcctgagctaccgctactgccccaatggaaaccacaagcagtaccaggagaaccccaggaagggccacaacggcaccatcgagttcaccagcctggatgcccacaagggcgtggccctgagccgccgcagtgatgtggagatcctgggctactgcatgctgcgctggctgtgtgggaagctgccctgggagcagaacctgaaggaccctgtggccgtgcagacagccaagaccaacctgctggatgagctgccccagagcgtgctgaagtgggcccccagcggcagcagctgctgtgaaattgcccagttcctggtgtgtgcccacagcctggcctatgatgagaagcccaactaccaggccctgaagaagatcctgaacccccacggcatccccctgggccccctggacttcagcaccaagggccagagcatcaacgtgcacacccccaacagccagaaggtggacagccagaaggccgccaccaagcaggtgaacaaggcccacaaccggctgattgagaagaaggtgcacagcgagaggtctgctgagagctgtgccacctggaaggtgcagaaggaggagaagctgattggcctgatgaacaatgaagctgcccaggagagcacccggcggcggcagaagtaccaggagagccaggagcccctgaatgaggtgaacagcttcccccagaagatctcctacacccagttccccaacagcttctatgagccccaccaggacttcaccagcccagacatcttcaagaagagccgcagccccagctggtacaagtacaccagcacagtgtccacaggcatcacagacctggagagcagcacaggcctgtggcccaccatcagccagttcaccctgtctgaggagaccaatgctgatgtgtactactaccgcatcatcatccctgtgctgctgatgctggtgttcctggccctcttcttcctgtag

SEQ ID NO: 48129 - DNA, 1527 bp, Artificial Sequence
  derived and/or modified sequence
atgccccccaagcggaacgagaagtacaagctgcccatccccttcccagagggcaaggtgctggacgatatggaagggaaccaatgggttctgggaaagaagattggctcagggggtttcggactgatttacctggcatttccaactaataagcccgagaaggacgcccggcatgtggtgaaggtggaataccaagagaatggccctctgttctctgaactgaaattttatcaaagggttgctaagaaagactgtatcaagaaatggatcgaacggaagcaactggactacctcggaattcccctcttttacggctccggactcactgagttcaaaggaagatcttaccggttcatggttatggagaggctgggtatcgatttgcaaaaaatcagcgggcagaatgggaccttcaagaaaagtaccgtgttacagcttggcataaggatgctggacgttctggaatatattcacgagaacgagtatgttcacggagacattaaggctgccaacttgcttcttggatataaaaatcctgatcaggtctatctcgcagactacgggctttcgtatcgctattgccctaacggaaatcataagcagtatcaagagaaccctcggaaggggcacaacggcacaatcgaatttactagcctcgatgcacataagggagtcgctctctcacgaagatcggacgtggagattctgggatattgtatgctaaggtggctttgtggcaagttgccatgggaacagaacctgaaggatccagtggcagttcagaccgcgaagactaatctgctggatgagcttcctcagtctgtgttgaagtgggccccttctggctcatcatgttgcgagatagcacagtttctagtgtgcgcgcatagccttgcttatgatgagaagcccaactatcaagcactgaagaagattttaaatccccacggcatcccactgggtcccctggacttctcaaccaagggccagagcatcaacgtacacacccccaactcgcaaaaggtcgacagtcaaaaggcagctactaagcaagtgaacaaagcccataaccgcctaatcgaaaagaaagtacatagtgagcggagcgccgaatcgtgtgccacctggaaagtacagaaggaggaaaagctgattggactaatgaataatgaggcagcccaggagtcaactcgtaggaggcagaaataccaggaatctcaagagcccctgaacgaggtgaattcatttcctcagaaaatctcttatacccagtttccaaacagcttctacgagccacatcaagacttcacctcacctgatatctttaaaaagagccgcagccctagctggtataagtatacctcaaccgtctccactggaattacagacctcgagagcagtacaggtctgtggcccaccatctctcagttcacactgagcgaagagactaacgctgatgtctactattaccgaatcatcattccagtgttactaatgcttgttttcctcgcacttttttttctctag

SEQ ID NO: 48130 - DNA, 1527 bp, Artificial Sequence
  derived and/or modified sequence
atgccccccaagcggaacgagaagtacaagctgcccatccccttcccagagggcaaggtcctggacgacatggaaggaaatcagtgggtgctcggcaaaaagatcggctccggtggcttcggcctcatctatctagccttcccgactaacaaacccgagaaggacgcacggcacgtcgtgaaggttgagtaccaggagaacgggcctctgttttccgaattaaagttttatcagagggtggctaaaaaggattgtatcaagaaatggatagaacgtaagcagttggattacctgggcatccctctgttctatggatccgggctgacggaattcaagggccggtcctatcgctttatggttatggaaagattgggaatcgacttacagaaaataagtggacagaacggcacttttaagaagagcaccgtgctccagctcggcatccgaatgctggacgtcctggagtatattcatgagaatgagtacgtgcatggtgacatcaaagccgccaacctgctcctcggctacaagaacccggatcaggtgtacttagctgattatggactgtcctatcggtactgcccaaacggcaatcacaaacagtaccaggaaaacccgcgcaaaggccataatggtaccatcgaattcactagtctcgatgcccacaaaggtgtcgccctgtcccggcgctcggacgtcgagatcctcggctattgtatgctgaggtggctgtgtggaaaactgccctgggagcagaatctcaaagatccggtggccgtgcagaccgctaagaccaatttactggacgaactcccacagtctgtgctgaagtgggctccaagcgggtcttcctgctgcgaaatagctcagtttttagtctgtgcccattcactcgcatatgacgaaaagcccaactatcaggcacttaagaagatactaaatccacatgggataccactggggccacttgactttagcaccaagggtcagtcaatcaacgtgcatacccccaactcccaaaaggttgatagtcagaaagcggcgacgaagcaagtcaataaggctcacaatcgcctgattgaaaagaaagtgcactcggagagatccgcagaaagctgcgccacctggaaggttcagaaggaggagaagctgatcggccttatgaataacgaggccgcccaggaatctactcggagaagacagaagtatcaagagagtcaggaaccactaaacgaggtgaactcttttcctcagaagatctcttacacgcagttccctaattccttttacgaaccacaccaagacttcacgagccctgatatcttcaagaagagcaggagtccttcctggtacaagtacacatcgacggtgagtacaggcattacagacctggagtcttccacgggactctggcccacgatcagccaatttaccctgtctgaggagaccaatgccgacgtctactactatcggatcataatccccgtgttactgatgctggtgtttctagccctctttttcctgtag

SEQ ID NO: 48131 - DNA, 1458 bp, Artificial Sequence
  derived and/or modified sequence
atggagggcaaccagtgggtgctgggcaagaagatcggcagcggcggcttcggacttatctacctggcgttcccgacgaataaacctgagaaggatgccaggcacgtcgtaaaggtggaatatcaagagaatggccctctgttcagcgagttgaagttttatcagagagtggccaagaaagattgcatcaaaaagtggatcgagagaaaacaactggactatttgggtatcccactgttttacgggtcaggcctcacggagtttaagggacggagctatcggttcatggtcatggagcgattgggtatcgatttgcagaaaatcagcggacaaaatgggacttttaagaaatctactgtcttgcagctgggcatccggatgttagatgtgctcgaatacatccacgagaacgagtacgtgcacggcgatattaaggcagcgaatctcttgttgggatacaagaatcccgaccaggtatacttggctgattatggtctttcatataggtactgcccaaatggaaatcataagcaataccaggagaatcctcggaagggccacaatggaaccattgagttcacatccctcgacgcccacaagggggtcgccctgagccggagaagcgacgttgaaatcctgggctattgtatgctccgatggttgtgcggcaagcttccttgggaacaaaatttgaaagaccccgttgccgttcagacggctaaaaccaacttgctggacgaactaccacagtccgtgctgaaatgggctccttctggtagttcgtgttgcgagattgcccagtttctagtgtgcgctcatagcttagcatacgatgagaaacccaattatcaggccctaaaaaagatcttgaatccccatgggattccactggggcccctagacttttctaccaagggacagtcaatcaatgttcacacgccaaattcccaaaaagttgatagccaaaaggcggctaccaaacaggttaacaaggcccacaatcgcctgatcgaaaagaaggttcactcagagcggtctgccgaaagctgcgccacatggaaggttcagaaggaggagaagttgattggcttaatgaacaatgaggcggcacaagaaagcacacggaggcggcaaaagtaccaggaatctcaggagcctttgaatgaagtcaactcattcccccagaagatctcatacacacagttcccgaactcgttctatgagccccatcaggacttcacctccccagatatctttaagaaatctcggagtccttcctggtataaatacaccagcacagtaagtaccggcatcacagacctggaatcctcgacgggcctatggccaaccatcagtcaattcactctgtctgaggagactaatgccgacgtgtattattatcgcatcatcattccggttctcctcatgctcgtgttcctcgcattattcttcctgtag

SEQ ID NO: 48132 - DNA, 1527 bp, Artificial Sequence
  derived and/or modified sequence
atgccacccaagcgcaacgagaagtacaagctgccaatcccattccctgaggggaaagtcctggatgatatggaggggaatcagtgggtactgggaaaaaaaatcggaagcgggggatttggactcatctaccttgcctttccgacaaataaacccgagaaggatgcgagacacgtggttaaggtcgagtatcaggagaatggacctctgttcagcgaactcaaattttaccagagagtcgcgaagaaggactgtattaaaaagtggatcgagcgcaaacagctagattacctgggcatcccactcttctacggttcaggcttaactgaatttaagggacgaagttaccgctttatggtgatggagcgactcggcattgatcttcagaaaatctctggccaaaacgggaccttcaaaaagtcgacagtgcttcaactgggcatccggatgcttgacgtgctcgagtacattcacgagaacgagtacgtgcatggcgacatcaaggccgcaaatctgctgttgggttataagaatccggatcaggtctatctggcagattacgggctttcctatcggtactgccctaacgggaatcataaacaatatcaggaaaaccctcgcaaaggccataacggaaccatcgagtttaccagcctcgacgctcacaagggcgttgccctgtccaggagaagcgacgtggagatcctgggatactgcatgcttcggtggttatgcggaaagctgccctgggaacagaatttaaaggatcctgtggctgtgcaaactgcgaagacaaatctcctggacgagctgcctcagtccgttctgaagtgggcaccatccggttcttcctgctgtgaaattgcacaattcctcgtgtgcgcacactcccttgcctatgacgagaagccgaactaccaggccctcaaaaagattctcaacccccacggtatacctctcggacctctggacttcagtaccaaaggtcagtcaatcaacgtccataccccaaactctcaaaaggtggacagccagaaagcggcaaccaaacaggtgaataaggcccataacagactgatcgagaaaaaggtccattccgagaggtctgccgagtcttgtgcaacctggaaggtacagaaagaagaaaagctgatcgggctgatgaataacgaagctgcgcaggaatcaactcggcgtcggcagaagtaccaggagagccaggaacccctgaacgaagtgaacagcttcccgcagaagattagttacacacagttccctaactcattttacgagcctcaccaggattttacctctcccgatattttcaagaagagccgctcccccagctggtataaatatacaagcacggtgagcaccggcatcaccgatcttgagagctcaaccggcctgtggccaacaatttctcagttcaccctgagcgaggagactaacgcagatgtttattattataggattatcatcccagtactgcttatgcttgtctttctcgctctcttttttttgtag

SEQ ID NO: 48133 - DNA, 1527 bp, Artificial Sequence
  derived and/or modified sequence
atgccaccgaaacgaaacgagaagtataagctgcccatcccctttcctgagggtaaggtgctagatgatatggaagggaaccagtgggttctggggaagaagattggcagtggcggttttggtcttatataccttgcttttcccactaataagcccgagaaggatgcacgccacgtagtgaaagtagagtatcaggagaacggacccttgttttccgagctaaagttctaccaacgggtggccaaaaaggattgcatcaaaaagtggatcgaaagaaaacagttagactacctcggcatccctctattctacggctccggtctgactgaatttaaggggagaagttaccgctttatggtgatggaacgcctcggcatcgatttgcaaaagatctctggccagaatgggactttcaagaagtccaccgtcctgcagctcggaatacgtatgcttgacgtgctggaatatattcatgagaacgaatatgtgcacggagatattaaagccgctaatctgcttcttgggtacaaaaacccagatcaggtgtatctggctgattacggtctttcttacagatactgtcccaacgggaatcataagcagtatcaggagaaccctagaaaggggcataacggcacgattgagtttacatcattggacgcacataagggcgtggctctatctcgcaggagcgacgtcgaaatcctcggatactgtatgctgcgatggttatgcggaaagttgccgtgggagcagaacctgaaagacccagtggcggtgcaaaccgccaaaacgaacctgctggacgaattaccacaatctgtcctgaagtgggctccgtccggaagttcctgctgcgaaattgcacagttcctggtatgtgcccatagtctagcatacgatgagaagcctaactaccaggcactgaagaagatcctaaacccccatggaatcccattggggccacttgacttctccactaaaggacagtcaattaacgttcacacccccaacagtcagaaggtggattcccagaaggccgcaacaaagcaagtgaacaaagctcacaacagactgattgagaaaaaagtgcatagcgaaagaagcgctgaaagttgcgccacctggaaggttcagaaggaagagaagcttatcgggctcatgaataacgaagcagctcaggaatcgactagaagaaggcagaaataccaagagagccaagagcccttaaacgaggtcaatagctttcctcagaagataagctatacacagttcccaaattccttttatgagccacaccaggatttcacgtctccagacattttcaagaagtcacggtccccttcctggtacaaatacactagtaccgtttccacgggaattaccgatctcgagtcctctacaggtttgtggcctacaattagccagtttacgctaagtgaggaaaccaacgccgacgtctactactaccggattataatccctgtcctcctgatgttagtattcctcgcattgttttttttatag

SEQ ID NO: 48134 - DNA, 1458 bp, Artificial Sequence
  derived and/or modified sequence
atggaggggaaccagtgggtgctcggaaagaagatcggctctggcggtttcggtttgatttacttagctttcccaaccaataaacctgaaaaggatgccaggcatgttgtgaaagtcgaataccaggaaaatggtccgttgttttcggagttaaaattctatcagagggtcgccaagaaggactgcatcaaaaagtggattgaacggaagcaactggattacctggggatccctctgttctacgggtccggactgactgagtttaaggggcgtagttatagattcatggtgatggagaggttggggattgatctccagaagatcagcggacagaatggcacctttaagaagtccacagtgctccagttgggtatccgtatgctggatgttctcgaatatatccacgagaacgaatatgtccacggagacattaaagcagcaaacctgctcctgggctataagaatcctgatcaggtatatttggctgactacggcctaagttataggtattgccccaacggaaatcataagcagtatcaggaaaaccctcggaaaggccacaacggcacaattgaattcacctccctggatgcacataagggtgttgcactgagcaggaggagcgacgtggaaattctggggtattgcatgttgagatggctatgcggcaagttgccatgggagcagaatctgaaagaccctgtagccgtgcaaacagcaaaaactaacttgctggacgaactgcctcagtccgtgctgaaatgggccccatccggttccagttgctgcgaaatagcacagttcttggtgtgcgctcattcccttgcctacgacgagaaacctaattatcaggccctgaaaaagatcttaaacccccacgggattccactgggcccactggacttctccaccaaaggccagtcgatcaacgttcacacccccaatagccagaaggtggattcgcagaaagccgcaaccaagcaggttaataaggcccacaaccggttaattgagaaaaaggtgcattcagagagatctgctgaatcttgcgccacttggaaagtgcagaaggaagaaaaactcatcggcctgatgaacaacgaagctgctcaagaatccaccagacgacgtcagaaataccaggaaagccaagagcccctcaatgaggtcaacagcttcccacagaaaattagttacacccagtttcccaactcgttttatgagcctcaccaagacttcacctctcctgacatcttcaaaaagagtcgatcaccaagctggtacaagtacacaagcaccgtgtctactggaattacggatctggagagctcaacagggttatggcctacaattagtcagttcaccctgagtgaagaaacaaacgccgatgtgtactattacaggattatcattcccgttttgctgatgctggtgtttctggctctgttttttctgtag

SEQ ID NO: 48135 - DNA, 1888 bp, Artificial Sequence
  derived and/or modified sequence
gggccgctgcactgcgaggccgacgcagctggagagaagttaggcaggtcctagggagggcaggctcgagtgctgggcccgcctccccgcgggactgtaggcccgggggctccgcctcgtcgcagcggcaggtaggaggcggtgcgcgcggcccggcgacgggggatcctgaggcccgaagtgatgccaccaaaaagaaatgaaaaatacaaacttcctattccatttccagaaggcaaggttctggatgatatggaaggcaatcagtgggtactgggcaagaagattggctctggaggatttggattgatatatttagctttccccacaaataaaccagagaaagatgcaagacatgtagtaaaagtggaatatcaagaaaatggcccgttattttcagaacttaaattttatcagagagttgcaaaaaaagactgtatcaaaaagtggatagaacgcaaacaacttgattatttaggaattcctctgttttatggatctggtctgactgaattcaagggaagaagttacagatttatggtaatggaaagactaggaatagatttacagaagatctcaggccagaatggtacctttaaaaagtcaactgtcctgcaattaggtatccgaatgttggatgtactggaatatatacatgaaaatgaatatgttcatggtgatataaaagcagcaaatctacttttgggttacaaaaatccagaccaggtttatcttgcagattatggactttcctacagatattgtcccaatgggaaccacaaacagtatcaggaaaatcctagaaaaggccataatgggacaatagagtttaccagcttggatgcccacaagggagtagccttgtccagacgaagtgacgttgagatcctcggctactgcatgctgcggtggttgtgtgggaaacttccctgggaacagaacctgaaggaccctgtggctgtgcagactgctaaaacaaatctgttggacgagctcccccagtcagtgcttaaatgggctccttctggaagcagttgctgtgaaatagcccaatttttggtatgtgctcatagtttagcatatgatgaaaagccaaactatcaagccctcaagaaaattttgaaccctcatggaatacctttaggaccactggacttttccacaaaaggacagagtataaatgtccatactccaaacagtcaaaaagttgattcacaaaaggctgcaacaaagcaagtcaacaaggcacacaataggttaatcgaaaaaaaagtccacagtgagagaagcgctgagtcctgtgcaacatggaaagtgcagaaagaggagaaactgattggattgatgaacaatgaagcagctcaggaaagcacaaggagaagacagaaatatcaagagtctcaagaacctttgaatgaagtaaacagtttcccacaaaaaatcagctatacacaattcccaaactcattttatgagcctcatcaagattttaccagtccagatatattcaagaagtcaagatctccatcttggtataaatacacttccacagtcagcacggggatcacagacttagaaagttcaactggactttggcctacaatttcccagtttactcttagtgaagagacaaacgcagatgtttattattatcgcatcatcatacctgtccttttgatgttagtatttcttgctttattttttctctgaagatgataccaaaattccttttgataattttttaagtttccagctcttcaccgaaatgttgtattcttatttcagtgtttccttccagacatttttaaggtaattggctttaaaaagagaacatattttaacaaagtttgtggacactctaaaaaataaaattgctttgtactagaaa

SEQ ID NO: 48136 - DNA, 2446 bp, Artificial Sequence
  derived and/or modified sequence
ggctattcacacgcttcagttcacaacttccatccagaatcctacttctctgattgtcctcatggggaaagtatgctatttccttcatcctacaagatgcttctcactgactctatccatattcttctcatccttcaagagccaagtcaaatctctctgcttccaataagccttccttgctacactcagaaatggaatgaatccccaagatggcttaaggatgcccttctgttttggaatgctttctcttggtgtatatcaaggttggttcagtttaccagagaaaagatgccagggtctcattctgtcacccaagctggagtccagtgacatggtcacagctcactgaagcctcaacctccttggctcaagcaatcctttcacctcagccttctaagtagctaggagcacagtgtcataaagaagaatatttgaagctctataaatatgttgctttacgtggcaaaaaggactttacagatctgagtacactggattatctgggtgggcacaatgtaatcacaaggggctttctaagaaggaagaaggagggttcaaggcagaaaaaccggaagaagttataacattggctttgaagatggaagatggggacacaagtcaaggaattcaggtggcctctagaagcctgaaaagtcaaagaaatgaattctcccctagagcctcaagaaggaacacagccctgctgacagcttgattttaggatttctgacctccagactaagtgatgccaccaaaaagaaatgaaaaatacaaacttcctattccatttccagaaggcaaggttctggatgatatggaaggcaatcagtgggtactgggcaagaagattggctctggaggatttggattgatatatttagctttccccacaaataaaccagagaaagatgcaagacatgtagtaaaagtggaatatcaagaaaatggcccgttattttcagaacttaaattttatcagagagttgcaaaaaaagactgtatcaaaaagtggatagaacgcaaacaacttgattatttaggaattcctctgttttatggatctggtctgactgaattcaagggaagaagttacagatttatggtaatggaaagactaggaatagatttacagaagatctcaggccagaatggtacctttaaaaagtcaactgtcctgcaattaggtatccgaatgttggatgtactggaatatatacatgaaaatgaatatgttcatggtgatataaaagcagcaaatctacttttgggttacaaaaatccagaccaggtttatcttgcagattatggactttcctacagatattgtcccaatgggaaccacaaacagtatcaggaaaatcctagaaaaggccataatgggacaatagagtttaccagcttggatgcccacaagggagtagccttgtccagacgaagtgacgttgagatcctcggctactgcatgctgcggtggttgtgtgggaaacttccctgggaacagaacctgaaggaccctgtggctgtgcagactgctaaaacaaatctgttggacgagctcccccagtcagtgcttaaatgggctccttctggaagcagttgctgtgaaatagcccaatttttggtatgtgctcatagtttagcatatgatgaaaagccaaactatcaagccctcaagaaaattttgaaccctcatggaatacctttaggaccactggacttttccacaaaaggacagagtataaatgtccatactccaaacagtcaaaaagttgattcacaaaaggctgcaacaaagcaagtcaacaaggcacacaataggttaatcgaaaaaaaagtccacagtgagagaagcgctgagtcctgtgcaacatggaaagtgcagaaagaggagaaactgattggattgatgaacaatgaagcagctcaggaaagcacaaggagaagacagaaatatcaagagtctcaagaacctttgaatgaagtaaacagtttcccacaaaaaatcagctatacacaattcccaaactcattttatgagcctcatcaagattttaccagtccagatatattcaagaagtcaagatctccatcttggtataaatacacttccacagtcagcacggggatcacagacttagaaagttcaactggactttggcctacaatttcccagtttactcttagtgaagagacaaacgcagatgtttattattatcgcatcatcatacctgtccttttgatgttagtatttcttgctttattttttctctgaagatgataccaaaattccttttgataattttttaagtttccagctcttcaccgaaatgttgtattcttatttcagtgtttccttccagacatttttaaggtaattggctttaaaaagagaacatattttaacaaagtttgtggacactctaaaaaataaaattgctttgtacta

SEQ ID NO: 48137 - DNA, 1676 bp, Artificial Sequence
  derived and/or modified sequence
gcagctggagagaagttaggcaggtcctagggagggcaggctcgagtgctgggcccgcctccccgcgggactgtaggcccgggggctccgcctcgtcgcagcggcagaaggcaaggttctggatgatatggaaggcaatcagtgggtactgggcaagaagattggctctggaggatttggattgatatatttagctttccccacaaataaaccagagaaagatgcaagacatgtagtaaaagtggaatatcaagaaaatggcccgttattttcagaacttaaattttatcagagagttgcaaaaaaagactgtatcaaaaagtggatagaacgcaaacaacttgattatttaggaattcctctgttttatggatctggtctgactgaattcaagggaagaagttacagatttatggtaatggaaagactaggaatagatttacagaagatctcaggccagaatggtacctttaaaaagtcaactgtcctgcaattaggtatccgaatgttggatgtactggaatatatacatgaaaatgaatatgttcatggtgatataaaagcagcaaatctacttttgggttacaaaaatccagaccaggtttatcttgcagattatggactttcctacagatattgtcccaatgggaaccacaaacagtatcaggaaaatcctagaaaaggccataatgggacaatagagtttaccagcttggatgcccacaagggagtagccttgtccagacgaagtgacgttgagatcctcggctactgcatgctgcggtggttgtgtgggaaacttccctgggaacagaacctgaaggaccctgtggctgtgcagactgctaaaacaaatctgttggacgagctcccccagtcagtgcttaaatgggctccttctggaagcagttgctgtgaaatagcccaatttttggtatgtgctcatagtttagcatatgatgaaaagccaaactatcaagccctcaagaaaattttgaaccctcatggaatacctttaggaccactggacttttccacaaaaggacagagtataaatgtccatactccaaacagtcaaaaagttgattcacaaaaggctgcaacaaagcaagtcaacaaggcacacaataggttaatcgaaaaaaaagtccacagtgagagaagcgctgagtcctgtgcaacatggaaagtgcagaaagaggagaaactgattggattgatgaacaatgaagcagctcaggaaagcacaaggagaagacagaaatatcaagagtctcaagaacctttgaatgaagtaaacagtttcccacaaaaaatcagctatacacaattcccaaactcattttatgagcctcatcaagattttaccagtccagatatattcaagaagtcaagatctccatcttggtataaatacacttccacagtcagcacggggatcacagacttagaaagttcaactggactttggcctacaatttcccagtttactcttagtgaagagacaaacgcagatgtttattattatcgcatcatcatacctgtccttttgatgttagtatttcttgctttattttttctctgaagatgataccaaaattccttttgataattttttaagtttccagctcttcaccgaaatgttgtattcttatttcagtgtttccttccagaca

SEQ ID NO: 48138 - protein, 485 aa, Artificial Sequence
  derived and/or modified sequence
MEGNQWVLGKKIGSGGFGLIYLAFPTNKPEKDARHVVKVEYQENGPLFSELKFYQRVAKKDCIKKWIERKQLDYLGIPLFYGSGLTEFKGRSYRFMVMERLGIDLQKISGQNGTFKKSTVLQLGIRMLDVLEYIHENEYVHGDIKAANLLLGYKNPDQVYLADYGLSYRYCPNGNHKQYQENPRKGHNGTIEFTSLDAHKGVALSRRSDVEILGYCMLRWLCGKLPWEQNLKDPVAVQTAKTNLLDELPQSVLKWAPSGSSCCEIAQFLVCAHSLAYDEKPNYQALKKILNPHGIPLGPLDFSTKGQSINVHTPNSQKVDSQKAATKQVNKAHNRLIEKKVHSERSAESCATWKVQKEEKLIGLMNNEAAQESTRRRQKYQESQEPLNEVNSFPQKISYTQFPNSFYEPHQDFTSPDIFKKSRSPSWYKYTSTVSTGITDLESSTGLWPTISQFTLSEETNADVYYYRIIIPVLLMLVFLALFFL

SEQ ID NO: 48139 - protein, 391 aa, Artificial Sequence
  derived and/or modified sequence
MKVLGHRLELLTGLLLHDVTMAGLQELRFPEEKPLLRGQDATELESSDAFLLAADTDWKEHDIETPYGLLHVVIRGSPKGNRPAILTYHDVGLNHKLCFNTFFNFEDMQEITKHFVVCHVDAPGQQVGASQFPQGYQFPSMEQLAAMLPSVVQHFGFKYVIGIGVGAGAYVLAKFALIFPDLVEGLVLVNIDPNGKGWIDWAATKLSGLTSTLPDTVLSHLFSQEELVNNTELVQSYRQQIGNVVNQANLQLFWNMYNSRRDLDINRPGTVPNAKTLRCPVMLVVGDNAPAEDGVVECNSKLDPTTTTFLKMADSGGLPQVTQPGKLTEAFKYFLQGMGYMPSASMTRLARSRTASLTSASSVDGSRPQACTHSESSEGLGQVNHTMEVSC

SEQ ID NO: 48140 - DNA, 1176 bp, Artificial Sequence
  derived and/or modified sequence
atgaaggtgctgggccacagactggagctgctgaccggcctgctgctgcacgacgtgaccatggccggcctgcaggagctgagattccccgaggagaagcccctgctgagaggccaggacgccaccgagctggagagcagcgacgccttcctgctggccgccgacaccgactggaaggagcacgacatcgagaccccctacggcctgctgcacgtggtgatcagaggcagccccaagggcaacagacccgccatcctgacctaccacgacgtgggcctgaaccacaagctgtgcttcaacaccttcttcaacttcgaggacatgcaggagatcaccaagcacttcgtggtgtgccacgtggacgcccccggccagcaggtgggcgccagccagttcccccagggctaccagttccccagcatggagcagctggccgccatgctgcccagcgtggtgcagcacttcggcttcaagtacgtgatcggcatcggcgtgggcgccggcgcctacgtgctggccaagttcgccctgatcttccccgacctggtggagggcctggtgctggtgaacatcgaccccaacggcaagggctggatcgactgggccgccaccaagctgagcggcctgaccagcaccctgcccgacaccgtgctgagccacctgttcagccaggaggagctggtgaacaacaccgagctggtgcagagctacagacagcagatcggcaacgtggtgaaccaggccaacctgcagctgttctggaacatgtacaacagcagaagagacctggacatcaacagacccggcaccgtgcccaacgccaagaccctgagatgccccgtgatgctggtggtgggcgacaacgcccccgccgaggacggcgtggtggagtgcaacagcaagctggaccccaccaccaccaccttcctgaagatggccgacagcggcggcctgccccaggtgacccagcccggcaagctgaccgaggccttcaagtacttcctgcagggcatgggctacatgcccagcgccagcatgaccagactggccagaagcagaaccgccagcctgaccagcgccagcagcgtggacggcagcagaccccaggcctgcacccacagcgagagcagcgagggcctgggccaggtgaaccacaccatggaggtgagctgctag

SEQ ID NO: 48141 - DNA, 1176 bp, Artificial Sequence
  derived and/or modified sequence
atgaaagtgctgggtcatagactcgagctgctgaccgggctcttgctccatgacgtcaccatggcaggcctgcaggagttacgctttcctgaggaaaagccattgttgcgggggcaagacgcaacagagctggagagtagcgacgccttcttattagccgcagatacagactggaaggaacatgatatcgaaaccccatatgggttgctgcacgtggtgattaggggctctccaaagggcaacagaccggccatcctgacatatcacgacgtgggcctgaatcataagctctgtttcaacaccttcttcaactttgaggatatgcaagagattactaaacattttgtggtttgccatgtcgacgcccccgggcagcaggtcggtgctagccaatttcctcaggggtaccagtttccatcaatggaacaactggcagcaatgctgcccagcgtcgtgcaacacttcggatttaaatacgttattggaatcggcgtgggcgctggagcctacgtgcttgctaagtttgccctcatctttccagacctggtggaagggctcgtgctggtgaacatcgacccaaatggcaaaggctggatcgactgggccgcaaccaaactcagtggcctaacatccaccctgccggatacggtgctaagccatctcttctctcaggaggagttggtcaataatacagagttagtgcagtcctacagacagcaaatagggaatgttgtgaatcaggcaaatctccagttgttctggaatatgtacaattcgcggcgagacctggacatcaaccgccccggcaccgtacccaacgcgaagacactgcggtgtcccgtgatgctggtggtgggcgacaatgccccagccgaggacggggtggtcgagtgtaacagtaaacttgatccaacgacgacgacattcctgaagatggccgactcgggaggtctgcctcaagtaacccagcccggcaagctgaccgaggcctttaaatattttctgcaggggatgggctatatgccttcggcgtctatgacccgactggcgcggtcacggaccgcgtcattaacaagcgctagttcagtggacgggtcccggccacaggcttgcacccattccgagtcatcggagggcctgggacaggtaaaccacactatggaggtcagttgctag

SEQ ID NO: 48142 - DNA, 1176 bp, Artificial Sequence
  derived and/or modified sequence
atgaaggtgctgggccaccggctggagctgctgaccggcctgctgctgcatgatgtgaccatggccggcctgcaggagctgcgcttccctgaggagaagcccctgctgcggggccaggatgccacagagctggagagcagtgatgccttcctgctggccgctgacacagactggaaggagcatgacatcgagaccccctacggcctgctgcacgtggtgatccggggcagccccaagggcaacagacctgccatcctgacctaccatgatgtgggcctgaaccacaagctgtgcttcaacaccttcttcaactttgaggacatgcaggagatcaccaagcactttgtggtgtgccacgtggatgcccctggccagcaggtgggcgccagccagttcccccagggctaccagttccccagcatggagcagctggccgccatgctgcccagcgtggtgcagcacttcggcttcaagtatgtgattggaattggagtgggcgctggggcctacgtgctggccaagtttgccctgatcttcccagacctggtggagggcctggtgctggtgaacatcgaccccaacgggaagggctggattgactgggccgccaccaagctgagcggcctgaccagcaccctgcctgacacagtgctgagccacctgttcagccaggaggagctggtgaacaacacagagctggtgcagagctaccggcagcagattggaaatgtggtgaaccaggccaacctgcagctgttctggaacatgtacaacagccggcgggacctggacatcaaccggcccggcaccgtgcccaatgccaagaccctgcgctgccctgtgatgctggtggtgggggacaatgccccagcagaagatggagtggtggagtgcaacagcaagctggaccccaccaccaccaccttcctgaagatggctgacagcggcggcctgccccaggtgacccagcccgggaagctgacagaggccttcaagtacttcctgcagggcatgggctacatgcccagcgcctccatgacccggctggcccggagcaggacagccagcctgaccagcgccagctctgtggatggcagccggccccaggcctgcacccacagcgagagcagcgagggcctgggccaggtgaaccacaccatggaggtgtcctgctag

SEQ ID NO: 48143 - DNA, 1176 bp, Artificial Sequence
  derived and/or modified sequence
atgaaggtgctgggccaccggctggagctgctgaccggcctgctgctgcatgatgtcaccatggccggtttacaagaactcaggtttccagaggaaaagccactgttaagaggccaggatgcaacggaactggagtcatccgacgcatttctgctcgccgccgataccgattggaaagaacacgacattgaaacgccatacggcttgcttcacgtggtgatcagagggtctccgaagggcaaccgccccgccatccttacctatcacgacgtcgggctgaatcacaagctgtgcttcaatactttctttaacttcgaggacatgcaggagataaccaagcacttcgtcgtctgtcacgtggatgcaccgggccaacaagtgggggcgagccagttcccccaggggtatcagttcccaagcatggaacagctggcagccatgcttccttccgtggtgcagcacttcggctttaaatatgtgatcggcatcggagttggggccggggcctatgtcctcgcaaagttcgccttaatcttccccgacctcgttgaaggcttagtcctggtgaatatagatccgaatggcaagggatggatagattgggctgcgacaaaactgtcaggccttacatcaacactcccagacaccgttctgagccatctgttcagccaggaagagctggtcaacaatactgagttggtccagagctatcgccagcaaatcggtaatgtagtgaatcaggcaaatctgcagctgttctggaatatgtataactcacgcagggacctcgacatcaataggccaggcacagttcccaacgccaagaccctgaggtgtccagtgatgctggtcgtcggggataatgcgcctgccgaagatggagtggtggagtgcaactcaaagctggatcccacaacaaccacttttttgaaaatggcagacagtggtggacttccgcaagtgacacagcccggcaagctcaccgaagcttttaagtatttccttcagggaatgggctacatgccctccgccagcatgacccgcttagcgcgaagtcggactgcctctctaacgtccgcaagttccgtggatggctcccgaccccaggcctgcacgcatagcgagagcagcgaggggctggggcaggtcaatcacaccatggaagtcagttgttag

SEQ ID NO: 48144 - DNA, 3278 bp, Artificial Sequence
  derived and/or modified sequence
cggaggggctcctggctgcccgcacctgcacccgcgcgtcggcggcgccgaagccccgctccccgcctgcgcgtctgtctcgtccgcatctccgcggcctcctgctccacgacgtgaccatggccgggctgcaggagctgcgattccctgaggagaagccgctgctccggggccaggacgccaccgagctggagagctccgatgccttcctcttggctgcagacacagactggaaggaacatgacatcgagacaccctacggccttctgcatgtagtgatccggggctcccccaaggggaaccgcccagccatcctcacctaccatgatgtgggcctcaaccacaaactatgcttcaacaccttcttcaacttcgaggacatgcaggagatcaccaagcactttgtggtgtgtcacgtggatgcccctggacaacaggtgggggcgtcgcagtttcctcaggggtaccagttcccctccatggagcagctggctgccatgctccccagcgtggtgcagcatttcgggttcaagtatgtgattggcatcggagtgggcgccggagcctatgtgctggccaagtttgcactcatcttccccgacctggtggaggggctggtgctggtgaacatcgaccccaatggcaaaggctggatagactgggctgccaccaagctctccggcctaactagcactttacccgacacggtgctctcccacctcttcagccaggaggagctggtgaacaacacagagttggtgcagagctaccggcagcagattgggaacgtggtgaaccaggccaacctgcagctcttctggaacatgtacaacagccgcagagacctggacattaaccggcctggaacggtgcccaatgccaagacgctccgctgccccgtgatgctggtggttggggataatgcacccgctgaggacggggtggtggagtgcaactccaaactggacccgaccactacgaccttcctgaagatggcagactctggagggctgccccaggtcacacagccagggaagctgactgaagccttcaaatacttcctgcaaggcatgggctacatgccctcagccagcatgacccgcctggcacgctcccgcactgcatccctcaccagtgccagctcggtggatggcagccgcccacaggcctgcacccactcagagagcagcgaggggctgggccaggtcaaccacaccatggaggtgtcctgttgaagcccttgatcccgctgacgacgcccacgtcgaggccccaccgccatccttgcgccggctcatgttccctttagtttatttttgtgagggcaaaggggaggaaatggggttctgtttgaaaaaaatgaggggatcttagatgctgcagcagaacagtctccaggtgttttaaggggctcagtcctcctcatcccatctcactctccgtggtaacttagccaacttgacccctctcatcccactcccggcggcccaggcacagaagggcagggccatagggagggagattcgctacggatccaggccattcctgggtgagcccttgggcaggcatgtttggagatgagagaggcttcgagagggtgggtgctgggccacaggggtgcggggccagctcaggcactggcgtgggagccctgggagaccccttcccccaccctccaccaagcacacctgtttctgtctcatagcacatgtgacaatcatctggacaacagccacaagggggcgctcggaccaggcagccactttcctggtgctctctgggcccagctggtgctgtagggccacgcaggcaggggcgtcaaggggtttctctgcccaaggaagacagaacatggagaaccgtcagggcaggaaccccacagactgtcccttccagcccacactctgccacctcctggccctgtcccaattctgagccaaggcctccccgaggcagaagttgcctggtcctctgtccccacagtgacctgactgggggtgagggagaaggaggagagagcccatgtgtggtgtgtgtgcccctgagaacttcgtggtgactgcctttgggagcccgcaggtggccagaggcaggggtagctgagttcctggagaccccttttttgcccccaggttccccagagggcaacgccatcagtagcagtgtggtgtttcaggcagagctctggccaggctgtgccagtgtgtcccggacgcatcactaaggaagagagagtttatttagtcaactggcccaaggcagcgaggcttctacagtcccacaccccatagccgcctgggctggggcttactgggggctgaaggttctggacatgaacaagggtcaggtagaagagaaaggcttcccctacaccccagcctcctgctgtcccctgaagcccaggactgcgttgtatgctttccatccactcaccttaccccatagcatcttgcggcccagaaaccagagccatttgtctcagaccctaaatcaataatcacaaaccccaaaacgggagagagcagtgaaaacatgcagggctgtggacgggggaagggttgtggcgggtgttctgaggctgagaggacacctatatgcgtatttcctctacacacatcaccccccttctataatcttaagccatgactagcctggtggcgtgttagtttctgcccagttctaccccctcatgtgcttcttctgaatactgaatgtgactgtttgaaagctggtagaattcatccctcttactgtagataacactgcaaatcttggaattttgttttttgctgtttccagatgtatctataaatatctatacattatatgtgtgtgtgtgtgtgtgtgtgtgtgtgtacatcgggtcctcccatgtgtggtgttcttctggaggttgtctctttggtcaaggtgaacttttaatgtttattattttcttctccgcacaaagtaaagagcctaattttgtgtattctggtggctgctgtcatgagatgataaaatgtaaaacaaaactctagtcaacgtagaaagagttaactgtgctgaaaaactaataaagaacctaagaagaattccagtgtggtgatgccatgcccatcatgggaggcttttggagaaacagaatgtttgggcaggggctgctggtgctgcttgggttttgggttgagggtgctaggagaggatggtctccacccatctttctatttccagtacacgtcacattattttaccggtgagatgagaatgtcacaaacattaaaagccttatgtgctca

SEQ ID NO: 48145 - DNA, 3392 bp, Artificial Sequence
  derived and/or modified sequence
aatctgagccgtctttctctgggggagaagtttcttgctgggagtggaggcgacgccaagtggcctgggaagtgggaagccagattggaccctactgactggggaccctcagccttggggctcctctggagaagtgatcagttgccctgctggaaactcacatccagggggcagtggctggagagcaagagcgaacggtcaggaagaggaggcctcctgctccacgacgtgaccatggccgggctgcaggagctgcgattccctgaggagaagccgctgctccggggccaggacgccaccgagctggagagctccgatgccttcctcttggctgcagacacagactggaaggaacatgacatcgagacaccctacggccttctgcatgtagtgatccggggctcccccaaggggaaccgcccagccatcctcacctaccatgatgtgggcctcaaccacaaactatgcttcaacaccttcttcaacttcgaggacatgcaggagatcaccaagcactttgtggtgtgtcacgtggatgcccctggacaacaggtgggggcgtcgcagtttcctcaggggtaccagttcccctccatggagcagctggctgccatgctccccagcgtggtgcagcatttcgggttcaagtatgtgattggcatcggagtgggcgccggagcctatgtgctggccaagtttgcactcatcttccccgacctggtggaggggctggtgctggtgaacatcgaccccaatggcaaaggctggatagactgggctgccaccaagctctccggcctaactagcactttacccgacacggtgctctcccacctcttcagccaggaggagctggtgaacaacacagagttggtgcagagctaccggcagcagattgggaacgtggtgaaccaggccaacctgcagctcttctggaacatgtacaacagccgcagagacctggacattaaccggcctggaacggtgcccaatgccaagacgctccgctgccccgtgatgctggtggttggggataatgcacccgctgaggacggggtggtggagtgcaactccaaactggacccgaccactacgaccttcctgaagatggcagactctggagggctgccccaggtcacacagccagggaagctgactgaagccttcaaatacttcctgcaaggcatgggctacatgccctcagccagcatgacccgcctggcacgctcccgcactgcatccctcaccagtgccagctcggtggatggcagccgcccacaggcctgcacccactcagagagcagcgaggggctgggccaggtcaaccacaccatggaggtgtcctgttgaagcccttgatcccgctgacgacgcccacgtcgaggccccaccgccatccttgcgccggctcatgttccctttagtttatttttgtgagggcaaaggggaggaaatggggttctgtttgaaaaaaatgaggggatcttagatgctgcagcagaacagtctccaggtgttttaaggggctcagtcctcctcatcccatctcactctccgtggtaacttagccaacttgacccctctcatcccactcccggcggcccaggcacagaagggcagggccatagggagggagattcgctacggatccaggccattcctgggtgagcccttgggcaggcatgtttggagatgagagaggcttcgagagggtgggtgctgggccacaggggtgcggggccagctcaggcactggcgtgggagccctgggagaccccttcccccaccctccaccaagcacacctgtttctgtctcatagcacatgtgacaatcatctggacaacagccacaagggggcgctcggaccaggcagccactttcctggtgctctctgggcccagctggtgctgtagggccacgcaggcaggggcgtcaaggggtttctctgcccaaggaagacagaacatggagaaccgtcagggcaggaaccccacagactgtcccttccagcccacactctgccacctcctggccctgtcccaattctgagccaaggcctccccgaggcagaagttgcctggtcctctgtccccacagtgacctgactgggggtgagggagaaggaggagagagcccatgtgtggtgtgtgtgcccctgagaacttcgtggtgactgcctttgggagcccgcaggtggccagaggcaggggtagctgagttcctggagaccccttttttgcccccaggttccccagagggcaacgccatcagtagcagtgtggtgtttcaggcagagctctggccaggctgtgccagtgtgtcccggacgcatcactaaggaagagagagtttatttagtcaactggcccaaggcagcgaggcttctacagtcccacaccccatagccgcctgggctggggcttactgggggctgaaggttctggacatgaacaagggtcaggtagaagagaaaggcttcccctacaccccagcctcctgctgtcccctgaagcccaggactgcgttgtatgctttccatccactcaccttaccccatagcatcttgcggcccagaaaccagagccatttgtctcagaccctaaatcaataatcacaaaccccaaaacgggagagagcagtgaaaacatgcagggctgtggacgggggaagggttgtggcgggtgttctgaggctgagaggacacctatatgcgtatttcctctacacacatcaccccccttctataatcttaagccatgactagcctggtggcgtgttagtttctgcccagttctaccccctcatgtgcttcttctgaatactgaatgtgactgtttgaaagctggtagaattcatccctcttactgtagataacactgcaaatcttggaattttgttttttgctgtttccagatgtatctataaatatctatacattatatgtgtgtgtgtgtgtgtgtgtgtgtgtgtacatcgggtcctcccatgtgtggtgttcttctggaggttgtctctttggtcaaggtgaacttttaatgtttattattttcttctccgcacaaagtaaagagcctaattttgtgtattctggtggctgctgtcatgagatgataaaatgtaaaacaaaactctagtcaacgtagaaagagttaactgtgctgaaaaactaataaagaacctaagaagaattccagtgtggtgatgccatgcccatcatgggaggcttttggagaaacagaatgtttgggcaggggctgctggtgctgcttgggttttgggttgagggtgctaggagaggatggtctccacccatctttctatttccagtacacgtcacattattttaccggtgagatgagaatgtcacaaacattaaaagccttatgtgctc

SEQ ID NO: 48146 - DNA, 3332 bp, Artificial Sequence
  derived and/or modified sequence
gctccgcgctctcctgccgctccgctccgggtctcccgcgctcctctccccggctcggccgagcgcgctgccccgacgccgccacccagagccgggccgcgccgggcgccgagatgaaggtgctgggacaccggctggagctgctcacaggcctcctgctccacgacgtgaccatggccgggctgcaggagctgcgattccctgaggagaagccgctgctccggggccaggacgccaccgagctggagagctccgatgccttcctcttggctgcagacacagactggaaggaacatgacatcgagacaccctacggccttctgcatgtagtgatccggggctcccccaaggggaaccgcccagccatcctcacctaccatgatgtgggcctcaaccacaaactatgcttcaacaccttcttcaacttcgaggacatgcaggagatcaccaagcactttgtggtgtgtcacgtggatgcccctggacaacaggtgggggcgtcgcagtttcctcaggggtaccagttcccctccatggagcagctggctgccatgctccccagcgtggtgcagcatttcgggttcaagtatgtgattggcatcggagtgggcgccggagcctatgtgctggccaagtttgcactcatcttccccgacctggtggaggggctggtgctggtgaacatcgaccccaatggcaaaggctggatagactgggctgccaccaagctctccggcctaactagcactttacccgacacggtgctctcccacctcttcagccaggaggagctggtgaacaacacagagttggtgcagagctaccggcagcagattgggaacgtggtgaaccaggccaacctgcagctcttctggaacatgtacaacagccgcagagacctggacattaaccggcctggaacggtgcccaatgccaagacgctccgctgccccgtgatgctggtggttggggataatgcacccgctgaggacggggtggtggagtgcaactccaaactggacccgaccactacgaccttcctgaagatggcagactctggagggctgccccaggtcacacagccagggaagctgactgaagccttcaaatacttcctgcaaggcatgggctacatgccctcagccagcatgacccgcctggcacgctcccgcactgcatccctcaccagtgccagctcggtggatggcagccgcccacaggcctgcacccactcagagagcagcgaggggctgggccaggtcaaccacaccatggaggtgtcctgttgaagcccttgatcccgctgacgacgcccacgtcgaggccccaccgccatccttgcgccggctcatgttccctttagtttatttttgtgagggcaaaggggaggaaatggggttctgtttgaaaaaaatgaggggatcttagatgctgcagcagaacagtctccaggtgttttaaggggctcagtcctcctcatcccatctcactctccgtggtaacttagccaacttgacccctctcatcccactcccggcggcccaggcacagaagggcagggccatagggagggagattcgctacggatccaggccattcctgggtgagcccttgggcaggcatgtttggagatgagagaggcttcgagagggtgggtgctgggccacaggggtgcggggccagctcaggcactggcgtgggagccctgggagaccccttcccccaccctccaccaagcacacctgtttctgtctcatagcacatgtgacaatcatctggacaacagccacaagggggcgctcggaccaggcagccactttcctggtgctctctgggcccagctggtgctgtagggccacgcaggcaggggcgtcaaggggtttctctgcccaaggaagacagaacatggagaaccgtcagggcaggaaccccacagactgtcccttccagcccacactctgccacctcctggccctgtcccaattctgagccaaggcctccccgaggcagaagttgcctggtcctctgtccccacagtgacctgactgggggtgagggagaaggaggagagagcccatgtgtggtgtgtgtgcccctgagaacttcgtggtgactgcctttgggagcccgcaggtggccagaggcaggggtagctgagttcctggagaccccttttttgcccccaggttccccagagggcaacgccatcagtagcagtgtggtgtttcaggcagagctctggccaggctgtgccagtgtgtcccggacgcatcactaaggaagagagagtttatttagtcaactggcccaaggcagcgaggcttctacagtcccacaccccatagccgcctgggctggggcttactgggggctgaaggttctggacatgaacaagggtcaggtagaagagaaaggcttcccctacaccccagcctcctgctgtcccctgaagcccaggactgcgttgtatgctttccatccactcaccttaccccatagcatcttgcggcccagaaaccagagccatttgtctcagaccctaaatcaataatcacaaaccccaaaacgggagagagcagtgaaaacatgcagggctgtggacgggggaagggttgtggcgggtgttctgaggctgagaggacacctatatgcgtatttcctctacacacatcaccccccttctataatcttaagccatgactagcctggtggcgtgttagtttctgcccagttctaccccctcatgtgcttcttctgaatactgaatgtgactgtttgaaagctggtagaattcatccctcttactgtagataacactgcaaatcttggaattttgttttttgctgtttccagatgtatctataaatatctatacattatatgtgtgtgtgtgtgtgtgtgtgtgtgtgtacatcgggtcctcccatgtgtggtgttcttctggaggttgtctctttggtcaaggtgaacttttaatgtttattattttcttctccgcacaaagtaaagagcctaattttgtgtattctggtggctgctgtcatgagatgataaaatgtaaaacaaaactctagtcaacgtagaaagagttaactgtgctgaaaaactaataaagaacctaagaagaattccagtgtggtgatgccatgcccatcatgggaggcttttggagaaacagaatgtttgggcaggggctgctggtgctgcttgggttttgggttgagggtgctaggagaggatggtctccacccatctttctatttccagtacacgtcacattattttaccggtgagatgagaatgtcacaaacattaaaagccttatgtgctca

SEQ ID NO: 48147 - DNA, 1176 bp, Artificial Sequence
  derived and/or modified sequence
atgaaggtgttgggccaccgccttgaactgctcacaggccttctcctgcacgacgtgactatggcgggactgcaggaactcaggtttccggaggaaaagccactactacgcggacaagacgctacagagctggaatccagcgacgcgtttcttttggctgctgacacagactggaaagaacatgacatcgaaacaccctacggcctcctgcacgtcgttatacgtgggagccctaagggcaatagacctgccattctcacctaccacgatgtgggactgaatcataagctttgcttcaatacattcttcaacttcgaagatatgcaagagatcactaaacatttcgtggtgtgtcatgtcgacgcccctggccagcaggtgggggcaagccagtttccacaggggtatcagttcccatccatggaacagctggcggcaatgctccccagcgtggtacagcacttcggatttaaatatgtaattgggattggcgtgggggctggtgcctacgtgctggcaaaattcgccctgatcttccccgatctcgtggagggactggtcctggtgaacatcgaccccaacggcaaggggtggattgattgggcggctaccaaactgagtgggctgacctctacgttgcctgataccgttctgtcccatctgttcagccaagaagagctagtcaacaatacagagcttgtccagtcatacaggcagcagataggcaacgttgtcaatcaggccaacctccaattgttttggaacatgtataatagtcgacgtgatctggacataaacagacccggaaccgtgccaaatgcaaaaacactgagatgccctgtaatgttagtggtcggggacaatgccccagccgaagatggggttgtcgaatgcaactccaagttggatccaacgactacaactttcctgaagatggctgactcgggtggcctgccacaagtgacccagcccggaaaattgaccgaagcttttaagtatttcctccagggcatggggtacatgcccagcgcaagcatgacccgactggcacggagccgcactgcttcgctgacatcagcttcgtcagtggacgggtcacggccacaggcgtgtactcattctgagtcctctgagggactcggccaggttaaccatacaatggaggtatcttgctag

SEQ ID NO: 48148 - DNA, 894 bp, Artificial Sequence
  derived and/or modified sequence
atggcgtcaccccagctttgcagagccctcgtttctgcacagtgggttgcagaagctctgagggccccacgggctggccagccactgcagctattggacgcatcatggtacctacctaagctgggcagagacgcccggcgggaattcgaggaacgccatatccctggagccgcattcttcgatattgaccagtgttcagaccggaccagtccctacgatcatatgctgcccggtgcggaacacttcgctgaatatgccggccgacttggtgtgggggccgcaactcacgtggtaatctacgatgccagtgaccaaggattgtactctgccccacgtgtctggtggatgttccgtgcattcggtcatcatgctgtgtccctactagacggtggtcttaggcactggctgcgtcagaacctgcctctctcttctggaaaatctcagcccgcgccagctgagttccgagcgcaactggacccagctttcatcaagacctacgaggatattaaggagaacctggaatccagacgttttcaggttgttgacagcagggctactggaaggtttcggggaacggagcctgagcctcgcgacggtatcgaacccgggcatatacctggtaccgtcaatattcccttcactgacttcctgtcacaggagggcctcgagaaatcacctgaggagataagacacctgttccaggagaaaaaggtcgacctgtctaaacccctggtcgcaacctgtggttccggggttacggcatgccatgttgctctcggggcctatctgtgcgggaagcccgacgttcctatttatgatgggagctgggtcgaatggtatatgagagcccgtccagaggacgtgattagtgagggcaggggcaagacccactag

SEQ ID NO: 48149 - DNA, 894 bp, Artificial Sequence
  derived and/or modified sequence
atggcctcaccccagttgtgtcgggccttggtgagcgcccagtgggttgccgaagcgttgcgcgctcctcgggcaggccaacctttacaattgctggatgcatcctggtatctgccaaaacttggccgggacgcacgcagggagtttgaggaacggcacattccaggagccgcatttttcgatatcgatcagtgtagtgaccgcacgtccccgtatgaccacatgctccccggagccgagcatttcgccgaatacgccggacgcctcggggtgggtgcagctacacatgttgtcatctatgatgcatctgatcagggcttatatagtgctcctcgggtgtggtggatgtttagagctttcggacatcacgcagtctccctgctggatggcggactaaggcactggcttcggcaaaacctccccctgtcttctggcaaatcacaacccgcacccgcggaattccgggcccagttggaccccgcctttatcaagacgtacgaggatatcaaagaaaacctcgaatcacgtcgatttcaggttgtcgacagccgtgccacggggcgcttccgagggacggagcctgaaccccgggacggcatagagcctggccacattcctggtaccgtaaatatcccattcacggattttctgtcccaggaaggcctggaaaagtctcctgaagagatacgacacctgtttcaggaaaagaaagtagacctgagtaagcccttagtcgcaacgtgcggctccggggtgactgcttgccacgtagccctgggggcctacctgtgcggaaaaccagacgtacccatctatgacggttcctgggtggagtggtacatgcgagcccgacccgaagatgtgatctcggaggggcgagggaaaacccactag

SEQ ID NO: 48150 - DNA, 894 bp, Artificial Sequence
  derived and/or modified sequence
atggcatcaccccagctctgccgagccctggtgtccgctcagtgggttgctgaggcactccgcgccccacgggctggacagccgttacagctactggacgcatcttggtatttgcccaagctaggcagagacgcccgaagggagtttgaggagcgacacatccctggcgctgccttctttgacattgaccagtgcagtgatcgcacctcaccttacgatcatatgctgcctggcgccgagcactttgccgagtatgcaggtagactgggggttggtgcagccacccacgtggtgatatacgacgcatctgaccagggcctgtattctgcccccagggtgtggtggatgttccgagctttcggtcaccacgctgtgtctttgctggacggcgggctgcggcactggctaagacagaatttacctttgagctccggcaaatcgcaacccgctccagccgagttccgggctcagctcgacccggcattcattaagacctacgaggacataaaagagaacctagagtctcgccgattccaggtggtggattcacgggcaacaggccgctttaggggcaccgagccagagcctcgggatggcatcgagcctggccatatccccggcactgtcaacatccccttcaccgattttctgtcccaggaggggctggagaaaagccccgaggaaatcaggcatctcttccaggagaagaaggttgacctcagcaagccactcgtagcaacctgtggatcaggagtgaccgcatgtcacgtcgcactgggtgcatacctgtgtggtaaaccagacgttcccatttacgacgggtcttgggtggagtggtacatgagggcccgtccagaggatgtgatcagcgagggcaggggtaaaacacattag

SEQ ID NO: 48151 - DNA, 894 bp, Artificial Sequence
  derived and/or modified sequence
atggcttctccacagctgtgtagggctttggtgtccgctcagtgggtggctgaagctctgagagcaccccgggccgggcagcccctgcagctgctcgatgccagttggtacctccccaagctggggagggacgcaagacgagaatttgaagagaggcacatcccaggagccgccttcttcgacatcgaccagtgctcagatagaacgagcccatacgatcatatgctgcccggcgccgaacatttcgccgagtacgctggccgccttggcgttggagccgccacacatgtggtcatctatgatgcttcagaccagggcctctatagtgccccgcgcgtgtggtggatgtttcgcgctttcgggcaccacgctgtgtcactgttggacggcggcctcagacactggctgagacagaatctcccattatcttcaggaaagagccagcccgcacctgcggagttcagagctcaactggatcctgcattcatcaagacctatgaggatattaaagaaaacctggaatctagaaggttccaggtggtagactcgcgggctaccggcaggttccgcggcacggaaccagagccaagggacggaatcgagcctgggcacattcctggcaccgtgaatattccattcacggatttcctttcgcaggaggggctggaaaaaagccctgaggaaattcgccatctattccaggaaaagaaagtggatctgagcaaacctcttgtcgccacttgcgggtcaggcgtcaccgcctgtcacgttgcacttggagcttacctgtgcggcaagcccgacgtcccaatatatgacggcagctgggtggagtggtacatgcgagcccgtccagaggacgtgatttcagagggccggggcaaaacacattag

SEQ ID NO: 48152 - DNA, 894 bp, Artificial Sequence
  derived and/or modified sequence
atggcgagcccccagctctgcagggctctggtgagcgctcagtgggttgccgaggctcttagagcccctcgagccggccaacccctccaattgttagacgccagctggtatctacccaagttgggaagggatgctcgaagagaattcgaagagcggcacatccctggggccgccttttttgatatcgatcagtgttctgacagaacctccccctatgatcatatgctccctggcgctgagcacttcgcagaatatgctggccggctcggggtgggtgccgctacccatgttgtgatctacgacgcctccgaccagggcctgtattcagcgcctcgcgtgtggtggatgttccgagcctttgggcaccacgccgtatctctgcttgacggcggactgcgccactggctcagacagaatctgcccctgagctctggcaagtcacaacctgcccctgcggagttccgcgcacagttagatcctgccttcattaagacctacgaagatatcaaagaaaacttagaaagccgacgttttcaggttgtggacagtagagccactggaagattccggggaacagaacctgagccccgggatggaattgagccgggccacatacctggcactgttaacataccttttaccgattttttatctcaggaaggccttgagaagtcacctgaagagatccgacatcttttccaggaaaaaaaagtggacctgtccaagccgctggtggccacatgcggatctggcgtgacggcatgccatgtggccctgggtgcttacctgtgtggcaaaccggacgtcccgatttatgacggttcatgggtcgaatggtacatgcgcgcaagaccggaagatgtgatcagcgagggaagggggaagacacattag

SEQ ID NO: 48153 - DNA, 738 bp, Artificial Sequence
  derived and/or modified sequence
atggcgtctccccagctctgtagagccctggtgtcggcccaatgggtggccgaagccctgcgagcccctagggccgggcagccccttcagctgctggatgccagttggtacttaccaaagctcggacgggacgcacggagggagttcgaagagcgccacatcccgggtgcggccttttttgacatagaccaatgcagcgacagaaccagcccatacgatcacatgctgcctggcgccgagcacttcgccgagtacgccggaagactgggcgtgggggcagcgacgcacgtcgttatttacgacgcctctgaccagggcctctattctgcaccacgagtgtggtggatgtttcgagctttcgggcatcacgccgtgtctctccttgacggaggcttgagacattggttgaggcagaacttgcccctatcctccggcaagtcacagcctgctccagcggaattccgggcacagctggacccagccttcatcaaaacctatgaagacatcaaggagaacttagaaagtcgccggtttcaggttgttgacagcagagcaaccggacggttccgaggaactgagccggaacctcctgccgtaggcattgagcccggtcacattccggggactgttaacattcccttcacggatttcctgagccaagatggctcctgggtggagtggtacatgagagctcgaccagaggacgttattagtgagggaaggggaaaaactcattag

SEQ ID NO: 48154 - DNA, 894 bp, Artificial Sequence
  derived and/or modified sequence
atggccagcccccagctgtgccgggccctggtgtctgcccagtgggtggccgaggccctgcgggcccccagggctggccagcccctgcagctgctggatgcctcctggtacctgcccaagctgggcagagatgcccggcgggagtttgaggagcggcacatccctggagctgccttctttgacatcgaccagtgcagcgacaggaccagcccctatgaccacatgctgcctggagctgagcactttgctgaatatgccggccgcctgggcgtgggcgccgccacccacgtggtgatctatgatgccagtgaccagggcctgtacagcgccccccgggtgtggtggatgttccgggccttcggccaccacgctgtgtccctgctggatggcggcctgcggcactggctgcggcagaacctgcccctgagcagcggcaagagccagcctgccccagctgagttccgggcccagctggaccctgccttcatcaagacctatgaggacatcaaggagaacctggagagccgccgcttccaggtggtggacagccgggccaccggccgcttccggggcacagagcctgagcccagagatggcatcgagcccggccacatccctggcaccgtgaacatccccttcacagacttcctgagccaggagggcctggagaagagccctgaggagatccgccacctgttccaggagaagaaggtggacctgagcaagcccctggtggccacctgtggcagcggcgtgacagcctgccacgtggccctgggcgcctacctgtgtgggaagccagatgtgcccatctatgatggctcctgggtggagtggtacatgagggcccggccagaagatgtgatcagcgagggccggggcaagacccactag

SEQ ID NO: 48155 - DNA, 738 bp, Artificial Sequence
  derived and/or modified sequence
atggccagcccccagctgtgccgggccctggtgtctgcccagtgggtggccgaggccctgcgggcccccagggctggccagcccctgcagctgctggatgcctcctggtacctgcccaagctgggcagagatgcccggcgggagtttgaggagcggcacatccctggagctgccttctttgacatcgaccagtgcagcgacaggaccagcccctatgaccacatgctgcctggagctgagcactttgctgaatatgccggccgcctgggcgtgggcgccgccacccacgtggtgatctatgatgccagtgaccagggcctgtacagcgccccccgggtgtggtggatgttccgggccttcggccaccacgctgtgtccctgctggatggcggcctgcggcactggctgcggcagaacctgcccctgagcagcggcaagagccagcctgccccagctgagttccgggcccagctggaccctgccttcatcaagacctatgaggacatcaaggagaacctggagagccgccgcttccaggtggtggacagccgggccaccggccgcttccggggcacagagcctgagcccccagctgtgggcatcgagcccggccacatccctggcaccgtgaacatccccttcacagacttcctgagccaggacggctcctgggtggagtggtacatgagggcccggccagaagatgtgatcagcgagggccggggcaagacccactag

SEQ ID NO: 48156 - DNA, 738 bp, Artificial Sequence
  derived and/or modified sequence
atggcttcgccgcagctctgccgcgcgctggtgtcggcgcaatgggtggcggaggcgctgcgggccccgcgcgctgggcagcctctgcagctgctggacgcctcctggtacctgccgaagctggggcgcgacgcgcgacgcgagttcgaggagcgccacatcccgggcgccgctttcttcgacatcgaccagtgcagcgaccgcacctcgccctacgaccacatgctgcccggggccgagcatttcgcggagtacgcaggccgcctgggcgtgggcgcggccacccacgtcgtgatctacgacgccagcgaccagggcctctactccgccccgcgcgtctggtggatgttccgcgccttcggccaccacgccgtgtcactgcttgatggcggcctccgccactggctgcgccagaacctcccgctcagctccggcaagagccaacctgctcccgccgagttccgcgctcagctcgaccccgccttcatcaagacctacgaggacatcaaggagaacctggaatcccggcgcttccaggtggtggactcccgagccactggcaggttccgcggcaccgagcccgagccccctgctgtaggcattgaacctggccacatcccaggtaccgtgaacatccccttcacagacttcctgagccaggatggctcctgggtggagtggtacatgcgcgcccggcccgaggatgtcatctcagagggccgggggaagacccactga

SEQ ID NO: 48157 - DNA, 894 bp, Artificial Sequence
  derived and/or modified sequence
atggccagcccccagctgtgccgggccctggtgagcgcccagtgggttgctgaagctctgcgagcgccacgggccggccagcccctacagctgctggacgccagctggtatctcccgaaactgggccgcgacgctcggagagaatttgaggaaaggcatatccccggggctgccttcttcgacatagaccaatgcagtgatcgaaccagcccatacgatcacatgctcccaggggcagagcattttgcggaatatgccggtcgcctgggagtaggagctgctactcatgtggtgatatatgatgcctcagatcagggcctctatagcgccccacgggtgtggtggatgtttcgtgcctttggtcatcacgccgtatccctactggacggtgggctgaggcattggctgcggcaaaatctccccctctcctctgggaagtcacagcccgctccagctgagttcagggcccaactagatccggccttcatcaagacctatgaagatataaaagaaaatctcgagtcacggagatttcaggtagtcgattctagggcaaccgggcgtttccgaggaactgaacctgagccccgcgacgggattgagccaggccacatcccggggaccgtgaatatacctttcacggactttctctcacaggaagggctggagaaatccccagaggaaataagacacctcttccaggagaagaaagtcgacctgtccaaacctctcgtggcaacctgtggctccggggttaccgcttgtcatgtagccctcggggcttacttgtgtggcaagcccgacgtgccaatctatgacggaagctgggtagaatggtacatgcgggcccgacccgaggatgtgatttccgagggcaggggcaaaacccactag

SEQ ID NO: 48158 - DNA, 894 bp, Artificial Sequence
  derived and/or modified sequence
atggccagcccccagctgtgccgggccctggtgagcgcccagtgggtggcagaggctctgagggcaccgcgggccggtcagcctttacagctgttggatgcctcttggtacctcccaaaactggggagagatgctcgacgggagttcgaggagcggcatattccaggggccgctttcttcgacattgaccagtgttcagatcgaacctctccctatgatcacatgcttccaggcgctgagcacttcgcggagtatgctggccgtctgggggttggtgccgccacccatgttgtgatttatgatgcctctgaccagggcttgtattcagctccacgcgtctggtggatgtttcgcgcttttggccaccacgccgtgagcctattggatggcggcttgcgccactggctgagacagaatctgccactgtcgtcaggtaaatcacaaccagccccggctgaatttcgcgctcagctggatcccgccttcatcaaaacctacgaggacatcaaagagaatcttgagagccgccgattccaggtggtggactctcgagccacaggccgcttccggggtacggaaccagaacccagggacgggattgaacctggtcacatccctggaacagtgaatatcccatttacggacttcctctcccaggagggcctcgaaaagagcccagaagagataaggcatttgttccaggaaaagaaggtcgacttgagcaaacctcttgtggctacttgtggctccggcgttacagcttgccatgtggcacttggcgcatacctgtgcggaaaaccagatgtccccatctacgacgggtcctgggtggagtggtacatgcgcgcccgccccgaggacgtgattagcgagggccgaggtaagacacactag

SEQ ID NO: 48159 - DNA, 894 bp, Artificial Sequence
  derived and/or modified sequence
atggccagcccccagctgtgccgggccctggtgagcgcccagtgggttgcagaagccttgagggccccccgagccggccagcctctgcaattactggatgcttcctggtatctgcctaagctgggccgcgacgcgagacgtgagtttgaagagcgccatatcccaggcgccgctttctttgacatcgaccagtgctctgacaggacctccccatatgaccacatgctgcccggagccgaacacttcgctgaatacgctggacggcttggcgtgggcgctgccacacatgtcgtcatctatgacgccagtgaccaggggctatattctgcaccccgcgtatggtggatgtttcgcgcatttggccaccatgcagtctcccttcttgatggaggtctgagacactggttgcggcagaatctgccgctgtctagtggcaagtcccaacccgccccggccgaattccgggcccaattggatccagcttttattaagacctatgaagatatcaaggagaatctcgagagccggcgatttcaggtcgtggacagccgggctacgggaagatttcggggcactgaacccgaaccccgggacggaatcgaaccaggccacatacccggcacggtaaatattccttttactgacttcctgtcccaggaaggcctcgagaagtcgcctgaggagatcagacatctctttcaggaaaagaaggtggatttgagtaagccgttagtcgccacctgtggatccggcgtcactgcgtgccatgtggcacttggcgcctatctgtgcggtaaacccgatgtccctatttatgacggctcctgggtggaatggtatatgagagcacgacctgaagatgtcatctccgagggccgcgggaaaacccattag

SEQ ID NO: 48160 - DNA, 894 bp, Artificial Sequence
  derived and/or modified sequence
atggccagcccccagctgtgccgggccctggtgagcgcccagtgggtggctgaagcactgcgggctccaagagctggacagccactgcagcttttagacgcttcttggtacctgccaaagctgggacgggatgccagacgggagttcgaggagagacacatcccaggcgcagccttctttgacattgaccaatgctcagacaggacctccccatacgatcacatgctacccggggcagagcattttgctgagtatgccggcaggttgggagtcggcgccgcgacacacgtggtaatatacgatgcaagcgatcagggcctttacagtgccccccgagtgtggtggatgtttcgcgcgttcggacatcacgccgtgagtttgctcgacgggggcctgaggcactggctacgccagaatctcccactttcctctgggaaatcccaaccggcccccgctgagtttcgcgcccagttggaccccgctttcatcaagacatatgaggatataaaagaaaatctggagtccagacgattccaggtcgtcgactcccgagcgactgggcgatttcgcggaaccgaacccgaacctcgggatggtattgagccgggtcacatccctggaaccgtgaacatccccttcacagattttttgagccaggaagggctcgaaaagtcccccgaagagatcagacatttgtttcaggagaagaaagtagacctcagcaagccccttgtcgcaacctgtgggagcggggtgactgcctgccacgtggccttaggcgcctatttgtgtggcaaacccgatgtgcccatatacgatggtagttgggtcgaatggtacatgagggcccggcctgaggacgtaatcagtgaaggacggggcaagacccattag

SEQ ID NO: 48161 - DNA, 894 bp, Artificial Sequence
  derived and/or modified sequence
atggccagcccccagctgtgccgggccctggtgagcgcccagtgggtggcagaggccctgcgcgctccccgtgccggacagccattacagctcttggatgcaagctggtatctcccaaagctgggccgtgatgcccgtcgggaatttgaagagaggcacattcctggggccgctttttttgacatagaccagtgctcggataggactagcccctacgatcatatgttaccaggcgctgagcacttcgctgagtatgccggcaggttgggggtaggggctgccactcatgtcgttatctatgatgcctccgaccaggggctgtatagtgcccctcgggtgtggtggatgtttcgggccttcggtcaccatgctgtttccctgttggatgggggcttgaggcattggcttaggcagaatctccccctgagtagcggcaagtcccagccagcccctgcagaattccgggctcaactggaccccgcctttatcaagacatacgaggatataaaggagaatctagaatcacggcgtttccaggtcgtggattcaagagctacaggcagatttagaggcacggaacctgaaccaagggacgggattgaaccaggacacattccaggtactgtgaacatccccttcactgattttctgtcccaggagggtctggaaaagtcccccgaggagattcgacacctatttcaggagaaaaaagtggatctatccaagcccttagtggcaacatgcggcagtggagtaacagcttgccatgttgccctaggcgcatatttatgcggcaagcccgatgtgccaatttatgatggaagctgggttgagtggtatatgagagcccggccagaggacgtgatctccgaggggcgcggaaagactcattag

SEQ ID NO: 48162 - DNA, 738 bp, Artificial Sequence
  derived and/or modified sequence
atggccagcccccagctgtgccgggccctggtgagcgcccagtgggtcgctgaagccctaagagcacctagggctggacagccgctgcagctgttggacgccagctggtatcttccaaagctagggcgggacgctagacgagagttcgaggaacgccacatcccgggcgcggccttcttcgacatcgaccagtgcagcgatcgaaccagcccttacgatcatatgctgccgggcgcggagcactttgctgagtacgcaggacgcctgggcgtgggggccgcgacgcacgtcgttatctatgatgcgagtgatcaaggcctgtattcagcacctcgagtctggtggatgttcagagcgtttggccatcatgccgtgagtctgctcgacgggggactcaggcattggctgagacagaacctgcccctttctagtggcaagtcgcagcctgcccctgccgagtttagagcccaattagatcccgcttttattaaaacctacgaagatatcaaggagaacctggagtcgcgcaggtttcaggtggtggacagccgagcaacaggcagatttaggggtaccgagccagaacctcccgctgtcgggatcgagcccgggcacattcccggcacagtgaacatccccttcactgacttcttgtctcaagatggaagctgggtggaatggtacatgcgcgctcgacctgaggacgtgataagtgagggcagaggaaaaactcactag

SEQ ID NO: 48163 - DNA, 894 bp, Artificial Sequence
  derived and/or modified sequence
atggcttccccccaactgtgtagggctttagtgtctgcacaatgggttgcagaagcccttagggctccacgggctggtcagccgttacagctgctggacgcttcttggtatctgcctaaactgggccgtgatgcgagaagggaatttgaggaacgccacattccgggagccgcattttttgatattgaccagtgttcggatcgcaccagcccgtatgatcatatgctgcccggagctgagcatttcgcagaatacgcgggacggctcggtgttggggctgcaacgcacgttgtgatttatgacgcatccgaccaaggattgtattctgctcctcgagtctggtggatgtttcgtgcctttggccatcatgctgttagcttgctggatggcggactgaggcactggttacggcaaaaccttcctctgtcaagcggcaaatcccagccagccccagcagaatttcgggcacagctcgacccggctttcattaagacctatgaagacattaaggaaaacctagaaagtcgtcgtttccaagtggtggatagccgagctacaggcagattccgtgggacagaacccgaacctcgcgatggtattgagcctggccatattcccggaactgtgaatatccccttcacagactttctgtctcaggaagggctagagaagagccctgaggaaatcaggcacttattccaggaaaagaaggtggatctatccaagcccctcgtcgccacgtgcggctctggcgtgaccgcctgtcatgtggctctgggcgcatatttatgcggcaagccagacgtcccgatctacgacggatcatgggtggagtggtacatgcgagcgagacctgaggacgtcattagcgaaggtaggggcaaaacccactag

SEQ ID NO: 48164 - DNA, 894 bp, Artificial Sequence
  derived and/or modified sequence
atggccagtccacaactttgtcgcgctttggtgtcagcccagtgggttgccgaagctctgcgggctccacgagccggtcagccattgcaactgcttgatgcaagttggtacctccccaaactgggtcgagacgctaggcgggagtttgaagagcgccatattcccggtgctgcttttttcgatatcgaccaatgtagcgatcgtactagtccgtatgaccatatgctacctggcgctgagcacttcgccgaatacgctggcaggctaggcgttggagccgctacccacgtcgtcatatatgacgcctcagaccagggcttgtacagcgcccctcgagtctggtggatgttccgtgcgtttggacatcatgcagtcagcctcctggacggtggacttcggcattggcttaggcagaatctcccactgagttcagggaaatcgcaacccgcaccagcagagtttcgggctcagctggacccagcctttattaagacttacgaagatattaaggaaaatctggaatccagaagattccaagtggtggactctagggcaaccggcagatttaggggtactgagccagagccaagagatggaattgagcccggtcacatcccagggactgtgaatatcccctttaccgattttcttagccaggaaggactcgagaaatcaccagaggagatacggcacttgttccaagagaaaaaagttgacttgtccaaacctctggtagccacctgcgggagcggagtgactgcttgccatgtggctctcggggcttacctctgcggtaaaccagatgtgcccatctatgacggctcctgggtggaatggtatatgagagccaggccagaggacgtgataagcgagggtagaggcaagactcactag

SEQ ID NO: 48165 - DNA, 894 bp, Artificial Sequence
  derived and/or modified sequence
atggcttcaccccagctctgccgggctttggtgtcggcccagtgggtggccgaggccctgagagccccaagggctgggcagccactgcagcttttagacgccagctggtaccttccaaagctgggtagagatgctagaagagaatttgaggagcggcacattcctggtgctgcattcttcgatatagatcagtgttccgacaggacttccccatatgaccacatgctgcccggtgctgaacacttcgctgaatacgctggaaggctgggtgtgggggctgcaacccacgtggtgatttacgatgcatcagatcaaggcctgtatagcgctcctagggtgtggtggatgttcagagctttcggacatcacgcggtgagccttttggatggaggcttgagacactggctacgccagaatttgcccctctcctccggcaagtcccagcctgctcccgctgaattccgggcacaactcgaccctgcgttcatcaaaacgtatgaggatatcaaagagaatttggaatcgaggaggttccaggtcgtcgattcccgtgccactggccgatttcggggaaccgaacctgagccaagggatggaattgaaccaggacatattcccggaacggttaatattcctttcactgactttctgagccaggaagggctagagaagtcaccggaggaaattaggcatcttttccaggaaaaaaaagtcgatctctctaagcccttggttgcgacgtgtggcagcggcgtaacagcttgccacgttgcattgggtgcatatctttgcgggaaacccgatgtcccaatctacgatggctcgtgggtcgagtggtatatgagggctagaccagaagacgtgatttctgagggccgaggtaaaacacactag

SEQ ID NO: 48166 - DNA, 894 bp, Artificial Sequence
  derived and/or modified sequence
atggcttctcctcagctgtgtagggccctcgtcagcgctcagtgggtggctgaagcacttcgcgcacccagagccggacagcctctacagttactggatgcctcatggtatctgcctaaactggggagagacgctagacgggaatttgaagagcggcatatacccggtgccgcattttttgatatagaccagtgctccgacaggacttcaccctacgatcacatgctgcctggtgctgaacatttcgcggagtacgcagggcgtctgggagtgggcgctgctactcatgtggtgatctatgatgcaagcgaccagggactctactcggcacctagagtttggtggatgtttcgcgctttcgggcaccacgccgtgtcccttttggatggcggactcagacattggcttcggcagaatctcccgctctcctccggcaaaagtcagccagcacccgcagagttccgcgctcagcttgatccagctttcatcaagacgtacgaggatattaaggagaatctggagtcccggcgttttcaggtagtggactcgagggccacgggccgattccgcggtactgagcctgaaccacgcgacggcatagaacctgggcacattcccggaaccgtaaacatcccctttactgatttcttgagtcaggaaggtctggaaaagagccccgaggagataagacatctctttcaagagaaaaaagtagacttgagcaaacctctggttgctacatgtggctctggcgttaccgcttgccatgttgccttgggggcttacctgtgtgggaagcccgacgtgcccatctatgacggatcctgggtggagtggtacatgagagcgcgacccgaggacgtgatctccgagggaagggggaagacccattag

SEQ ID NO: 48167 - DNA, 894 bp, Artificial Sequence
  derived and/or modified sequence
atggctagcccgcagctgtgcagagccctcgtctcggctcagtgggtggcagaagcgcttagggccccacgggcaggacaaccactgcagctgctggatgccagctggtaccttcccaagctgggtagggacgcacgcagggaatttgaggagagacacattccaggtgccgctttttttgatatcgatcaatgctcagacagaacttccccctacgatcatatgctccctggagctgaacacttcgctgagtatgctgggagattgggcgtgggcgcagcgacccatgtcgttatctatgatgcttctgaccaagggttgtactcagctcccagagtgtggtggatgtttcgagccttcgggcaccatgccgtcagcctcctagatggcggactgagacactggctgcggcagaacttgccactttccagtggaaagagtcagcctgccccagccgaattccgcgctcagctcgatccagcttttattaaaacctatgaggacattaaagaaaacctggagtcaaggcgcttccaagtggtcgactcgcgagccacaggacgattcagggggacagagcccgagcccagagatggaattgaacccggtcatattcctgggacggtgaatattccctttacagacttcctatctcaggaaggcctggagaaaagtcctgaagaaatcaggcacttattccaggaaaagaaggtcgatttgagcaaaccgttagtcgctacctgcggcagcggtgttactgcttgccatgtagctctaggcgcatatctctgcgggaaacccgacgtgcccatttacgacggtagctgggtggagtggtatatgcgcgctcgtcccgaggacgtgatctctgaggggcgtggcaagacccactag

SEQ ID NO: 48168 - DNA, 738 bp, Artificial Sequence
  derived and/or modified sequence
atggcttcaccgcagctctgccgcgcactggtcagtgcccagtgggtcgctgaagcactacgcgctcctcgcgctggacagcccctgcagttattagacgcttcctggtacctacccaaactaggaagagatgccaggcgcgagtttgaggaacgccacattccgggtgccgcttttttcgacatcgaccagtgctcggatcggacatctccttatgatcacatgttgcccggagccgaacatttcgccgagtacgccggtcgcttgggagtcggcgctgctacgcatgtcgtgatatatgatgcttccgatcagggactgtattctgctccgcgagtgtggtggatgttcagagccttcggacatcacgccgtatccctgctggatggcggtctgcggcactggctcaggcagaatctccccctttcttcaggaaagtctcaacctgctcctgccgaatttcgggctcaactagacccagcattcattaaaacttacgaagatatcaaggaaaacctcgaatcaaggcgcttccaagtcgttgactcccgcgctaccggaaggttcagaggcaccgagcctgagccccctgcagttgggatagagcccggacacatccccggaaccgtcaatataccattcactgatttcctgtctcaggatgggtcgtgggtggagtggtatatgcgcgctagaccggaggatgtgatttccgaaggtaggggtaaaactcactag

SEQ ID NO: 48169 - DNA, 894 bp, Artificial Sequence
  derived and/or modified sequence
atggccagcccccagctgtgcagagccctggtgagcgcccagtgggtggccgaggccctgagagcccccagagccggccagcccctgcagctgctggacgccagctggtacctgcccaagctgggcagagacgccagaagagagttcgaggagagacacatccccggcgccgccttcttcgacatcgaccagtgcagcgacagaaccagcccctacgaccacatgctgcccggcgccgagcacttcgccgagtacgccggcagactgggcgtgggcgccgccacccacgtggtgatctacgacgccagcgaccagggcctgtacagcgcccccagagtgtggtggatgttcagagccttcggccaccacgccgtgagcctgctggacggcggcctgagacactggctgagacagaacctgcccctgagcagcggcaagagccagcccgcccccgccgagttcagagcccagctggaccccgccttcatcaagacctacgaggacatcaaggagaacctggagagcagaagattccaggtggtggacagcagagccaccggcagattcagaggcaccgagcccgagcccagagacggcatcgagcccggccacatccccggcaccgtgaacatccccttcaccgacttcctgagccaggagggcctggagaagagccccgaggagatcagacacctgttccaggagaagaaggtggacctgagcaagcccctggtggccacctgcggcagcggcgtgaccgcctgccacgtggccctgggcgcctacctgtgcggcaagcccgacgtgcccatctacgacggcagctgggtggagtggtacatgagagccagacccgaggacgtgatcagcgagggcagaggcaagacccactag

SEQ ID NO: 48170 - DNA, 738 bp, Artificial Sequence
  derived and/or modified sequence
atggccagcccccagctgtgcagagccctggtgagcgcccagtgggtggccgaggccctgagagcccccagagccggccagcccctgcagctgctggacgccagctggtacctgcccaagctgggcagagacgccagaagagagttcgaggagagacacatccccggcgccgccttcttcgacatcgaccagtgcagcgacagaaccagcccctacgaccacatgctgcccggcgccgagcacttcgccgagtacgccggcagactgggcgtgggcgccgccacccacgtggtgatctacgacgccagcgaccagggcctgtacagcgcccccagagtgtggtggatgttcagagccttcggccaccacgccgtgagcctgctggacggcggcctgagacactggctgagacagaacctgcccctgagcagcggcaagagccagcccgcccccgccgagttcagagcccagctggaccccgccttcatcaagacctacgaggacatcaaggagaacctggagagcagaagattccaggtggtggacagcagagccaccggcagattcagaggcaccgagcccgagccccccgccgtgggcatcgagcccggccacatccccggcaccgtgaacatccccttcaccgacttcctgagccaggacggcagctgggtggagtggtacatgagagccagacccgaggacgtgatcagcgagggcagaggcaagacccactag

SEQ ID NO: 48171 - protein, 532 aa, Artificial Sequence
  derived and/or modified sequence
MMMVRRGLLAWISRVVVLLVLLCCAISVLYMLACTPKGDEEQLALPRANSPTGKEGYQAVLQEWEEQHRNYVSSLKRQIAQLKEELQERSEQLRNGQYQASDAAGLGLDRSPPEKTQADLLAFLHSQVDKAEVNAGVKLATEYAAVPFDSFTLQKVYQLETGLTRHPEEKPVRKDKRDELVEAIESALETLNSPAENSPNHRPYTASDFIEGIYRTERDKGTLYELTFKGDHKHEFKRLILFRPFGPIMKVKNEKLNMANTLINVIVPLAKRVDKFRQFMQNFREMCIEQDGRVHLTVVYFGKEEINEVKGILENTSKAANFRNFTFIQLNGEFSRGKGLDVGARFWKGSNVLLFFCDVDIYFTSEFLNTCRLNTQPGKKVFYPVLFSQYNPGIIYGHHDAVPPLEQQLVIKKETGFWRDFGFGMTCQYRSDFINIGGFDLDIKGWGGEDVHLYRKYLHSNLIVVRTPVRGLFHLWHEKRCMDELTPEQYKMCMQSKAMNEASHGQLGMLVFRHEIEAHLRKQKQKTSSKKT

SEQ ID NO: 48172 - protein, 96 aa, Artificial Sequence
  derived and/or modified sequence
MMMVRRGLLAWISRVVVLLVLLCCAISVLYMLACTPKGDEEQLALPRANSPTGKEGYQAVLQEWEEQHRNYVSSLKRQIAQLKEELQERSEQLRNG

SEQ ID NO: 48173 - protein, 53 aa, Artificial Sequence
  derived and/or modified sequence
MMMVRRGLLAWISRVVVLLVLLCCAISVLYMLACTPKGDEEQLALPRANSPTG

SEQ ID NO: 48174 - protein, 104 aa, Artificial Sequence
  derived and/or modified sequence
MMMVRRGLLAWISRVVVLLVLLCCAISVLYMLACTPKGDEEQLALPRANSPTGKEGYQAVLQEWEEQHRNYVSSLKRQIAQLKEELQERSEQLRNGQYQASDAA

SEQ ID NO: 48175 - protein, 14 aa, Artificial Sequence
  derived and/or modified sequence
MMMVRRGLLAWISR

SEQ ID NO: 48176 - DNA, 3674 bp, Artificial Sequence
  derived and/or modified sequence
gggcttgttctgggatccgcagccttgctcaggctgtgcattggtgtggccccgaattgcacggagctgccttcctatttcaaggaaagacgccaaggtaattttgacccagaggagcaatgatgtagccacctcctaaccttcccttcttgaacccccaggtcccctcttgctgttggctgcacatcaggaaggctgtgatgggaatgaaggtgaaaacttggagatttcacttcagtcattgcttctgcctgcaagatcatcctttaaaagtagagaagctgctctgtgtggtggttaactccaagaggcagaactcgttctagaaggaaatggatgcaagcagctccgggggccccaaacgcatgcttcctgtggtctagcccagggaagcccttccgtgggggccccggctttgagggatgccaccggttctggacgcatggctgattcctgaatgatgatggttcgccgggggctgcttgcgtggatttcccgggtggtggttttgctggtgctcctctgctgtgctatctctgtcctgtacatgttggcctgcaccccaaaaggtgacgaggagcagctggcactgcccagggccaacagccccacggggaaggaggggtaccaggccgtccttcaggagtgggaggagcagcaccgcaactacgtgagcagcctgaagcggcagatcgcacagctcaaggaggagctgcaggagaggagtgagcagctcaggaatgggcagtaccaagccagcgatgctgctggcctgggtctggacaggagccccccagagaaaacccaggccgacctcctggccttcctgcactcgcaggtggacaaggcagaggtgaatgctggcgtcaagctggccacagagtatgcagcagtgcctttcgatagctttactctacagaaggtgtaccagctggagactggccttacccgccaccccgaggagaagcctgtgaggaaggacaagcgggatgagttggtggaagccattgaatcagccttggagaccctgaacagtcctgcagagaacagccccaatcaccgtccttacacggcctctgatttcatagaagggatctaccgaacagaaagggacaaagggacattgtatgagctcaccttcaaaggggaccacaaacacgaattcaaacggctcatcttatttcgaccattcggccccatcatgaaagtgaaaaatgaaaagctcaacatggccaacacgcttatcaatgttatcgtgcctctagcaaaaagggtggacaagttccggcagttcatgcagaatttcagggagatgtgcattgagcaggatgggagagtccatctcactgttgtttactttgggaaagaagaaataaatgaagtcaaaggaatacttgaaaacacttccaaagctgccaacttcaggaactttaccttcatccagctgaatggagaattttctcggggaaagggacttgatgttggagcccgcttctggaagggaagcaacgtccttctctttttctgtgatgtggacatctacttcacatctgaattcctcaatacgtgtaggctgaatacacagccagggaagaaggtattttatccagttcttttcagtcagtacaatcctggcataatatacggccaccatgatgcagtccctcccttggaacagcagctggtcataaagaaggaaactggattttggagagactttggatttgggatgacgtgtcagtatcggtcagacttcatcaatataggtgggtttgatctggacatcaaaggctggggcggagaggatgtgcacctttatcgcaagtatctccacagcaacctcatagtggtacggacgcctgtgcgaggactcttccacctctggcatgagaagcgctgcatggacgagctgacccccgagcagtacaagatgtgcatgcagtccaaggccatgaacgaggcatcccacggccagctgggcatgctggtgttcaggcacgagatagaggctcaccttcgcaaacagaaacagaagacaagtagcaaaaaaacatgaactcccagagaaggattgtgggagacactttttctttccttttgcaattactgaaagtggctgcaacagagaaaagacttccataaaggacgacaaaagaattggactgatgggtcagagatgagaaagcctccgatttctctctgttgggctttttacaacagaaatcaaaatctccgctttgcctgcaaaagtaacccagttgcaccctgtgaagtgtctgacaaaggcagaatgcttgtgagattataagcctaatggtgtggaggttttgatggtgtttacaacacactgagacctgttgttttgtgtgctcattgaaatattcatgatttaagagcagttttgtaaaaaattcattagcatgaaaggcaagcatatttctcctcatatgaatgagcctatcagcagggctctagtttctaggaatgctaaaatatcagaaggcaggagaggagataggcttattatgatactagtgagtacattaagtaaaataaaatggaccagaaaagaaaagaaaccataaatatcgtgtcatattttccccaagattaaccaaaaataatctgcttatctttttggttgtccttttaactgtctccgtttttttcttttatttaaaaatgcactttttttcccttgtgagttatagtctgcttatttaattaccactttgcaagccttacaagagagcacaagttggcctacatttttatattttttaagaagatactttgagatgcattatgagaactttcagttcaaagcatcaaattgatgccatatccaaggacatgccaaatgctgattctgtcaggcactgaatgtcaggcattgagacatagggaaggaatggtttgtactaatacagacgtacagatactttctctgaagagtattttcgaagaggagcaactgaacactggaggaaaagaaaatgacactttctgctttacagaaaaggaaactcattcagactggtgatatcgtgatgtacctaaaagtcagaaaccacattttctcctcagaagtagggaccgctttcttacctgtttaaataaaccaaagtataccgtgtgaaccaaacaatctcttttcaaaacagggtgctcctcctggcttctggcttccataagaagaaatggagaaaaaaatatatatatatatattgtgaaagatcaatccatctgccagaatctagtgggatggaagtttttgctacatgttatccaccccaggccaggtggaagtaactgaattattttttaaattaagcagttctactcgatcaccaagatgcttctgaaaattgcattttattaccatttcaaactattttttaaaaataaatacagttaacatagagtggtttcttcattcatgtgaaaattattagccagcaccagatgcatgagctaattatctctttgagtccttgcttctgtttgctcacagtaaactcattgtttaaaagcttcaagaacattcaagctgttggtgtgttaaaaaatgcattgtattgatttgtactggtagtttatgaaatttaattaaaacacaggccatgaatggaaggtggtattgcacagctaataaaatatgatttgtggatatg

SEQ ID NO: 48177 - DNA, 3872 bp, Artificial Sequence
  derived and/or modified sequence
ctccttaggtggaaaccctgggagtagagtactgacagcaaagaccgggaaagaccatacgtccccgggcaggggtgacaacaggtgtcatctttttgatctcgtgtgtggctgccttcctatttcaaggaaagacgccaaggtaattttgacccagaggagcaatgatgtagccacctcctaaccttcccttcttgaacccccagttatgccaggatttactagagagtgtcaactcaaccagcaagcggctccttcggcttaacttgtggttggaggagagaacctttgtggggctgcgttctcttagcagtgctcagaagtgacttgcctgagggtggaccagaagaaaggaaaggtcccctcttgctgttggctgcacatcaggaaggctgtgatgggaatgaaggtgaaaacttggagatttcacttcagtcattgcttctgcctgcaagatcatcctttaaaagtagagaagctgctctgtgtggtggttaactccaagaggcagaactcgttctagaaggaaatggatgcaagcagctccgggggccccaaacgcatgcttcctgtggtctagcccagggaagcccttccgtgggggccccggctttgagggatgccaccggttctggacgcatggctgattcctgaatgatgatggttcgccgggggctgcttgcgtggatttcccgggtggtggttttgctggtgctcctctgctgtgctatctctgtcctgtacatgttggcctgcaccccaaaaggtgacgaggagcagctggcactgcccagggccaacagccccacggggaaggaggggtaccaggccgtccttcaggagtgggaggagcagcaccgcaactacgtgagcagcctgaagcggcagatcgcacagctcaaggaggagctgcaggagaggagtgagcagctcaggaatgggcagtaccaagccagcgatgctgctggcctgggtctggacaggagccccccagagaaaacccaggccgacctcctggccttcctgcactcgcaggtggacaaggcagaggtgaatgctggcgtcaagctggccacagagtatgcagcagtgcctttcgatagctttactctacagaaggtgtaccagctggagactggccttacccgccaccccgaggagaagcctgtgaggaaggacaagcgggatgagttggtggaagccattgaatcagccttggagaccctgaacagtcctgcagagaacagccccaatcaccgtccttacacggcctctgatttcatagaagggatctaccgaacagaaagggacaaagggacattgtatgagctcaccttcaaaggggaccacaaacacgaattcaaacggctcatcttatttcgaccattcggccccatcatgaaagtgaaaaatgaaaagctcaacatggccaacacgcttatcaatgttatcgtgcctctagcaaaaagggtggacaagttccggcagttcatgcagaatttcagggagatgtgcattgagcaggatgggagagtccatctcactgttgtttactttgggaaagaagaaataaatgaagtcaaaggaatacttgaaaacacttccaaagctgccaacttcaggaactttaccttcatccagctgaatggagaattttctcggggaaagggacttgatgttggagcccgcttctggaagggaagcaacgtccttctctttttctgtgatgtggacatctacttcacatctgaattcctcaatacgtgtaggctgaatacacagccagggaagaaggtattttatccagttcttttcagtcagtacaatcctggcataatatacggccaccatgatgcagtccctcccttggaacagcagctggtcataaagaaggaaactggattttggagagactttggatttgggatgacgtgtcagtatcggtcagacttcatcaatataggtgggtttgatctggacatcaaaggctggggcggagaggatgtgcacctttatcgcaagtatctccacagcaacctcatagtggtacggacgcctgtgcgaggactcttccacctctggcatgagaagcgctgcatggacgagctgacccccgagcagtacaagatgtgcatgcagtccaaggccatgaacgaggcatcccacggccagctgggcatgctggtgttcaggcacgagatagaggctcaccttcgcaaacagaaacagaagacaagtagcaaaaaaacatgaactcccagagaaggattgtgggagacactttttctttccttttgcaattactgaaagtggctgcaacagagaaaagacttccataaaggacgacaaaagaattggactgatgggtcagagatgagaaagcctccgatttctctctgttgggctttttacaacagaaatcaaaatctccgctttgcctgcaaaagtaacccagttgcaccctgtgaagtgtctgacaaaggcagaatgcttgtgagattataagcctaatggtgtggaggttttgatggtgtttacaacacactgagacctgttgttttgtgtgctcattgaaatattcatgatttaagagcagttttgtaaaaaattcattagcatgaaaggcaagcatatttctcctcatatgaatgagcctatcagcagggctctagtttctaggaatgctaaaatatcagaaggcaggagaggagataggcttattatgatactagtgagtacattaagtaaaataaaatggaccagaaaagaaaagaaaccataaatatcgtgtcatattttccccaagattaaccaaaaataatctgcttatctttttggttgtccttttaactgtctccgtttttttcttttatttaaaaatgcactttttttcccttgtgagttatagtctgcttatttaattaccactttgcaagccttacaagagagcacaagttggcctacatttttatattttttaagaagatactttgagatgcattatgagaactttcagttcaaagcatcaaattgatgccatatccaaggacatgccaaatgctgattctgtcaggcactgaatgtcaggcattgagacatagggaaggaatggtttgtactaatacagacgtacagatactttctctgaagagtattttcgaagaggagcaactgaacactggaggaaaagaaaatgacactttctgctttacagaaaaggaaactcattcagactggtgatatcgtgatgtacctaaaagtcagaaaccacattttctcctcagaagtagggaccgctttcttacctgtttaaataaaccaaagtataccgtgtgaaccaaacaatctcttttcaaaacagggtgctcctcctggcttctggcttccataagaagaaatggagaaaaaaatatatatatatatattgtgaaagatcaatccatctgccagaatctagtgggatggaagtttttgctacatgttatccaccccaggccaggtggaagtaactgaattattttttaaattaagcagttctactcgatcaccaagatgcttctgaaaattgcattttattaccatttcaaactattttttaaaaataaatacagttaacatagagtggtttcttcattcatgtgaaaattattagccagcaccagatgcatgagctaattatctctttgagtccttgcttctgtttgctcacagtaaactcattgtttaaaagcttcaagaacattcaagctgttggtgtgttaaaaaatgcattgtattgatttgtactggtagtttatgaaatttaattaaaacacaggccatgaatggaaggtggtattgcacagctaataaaatatgatttgtggatatga

SEQ ID NO: 48178 - DNA, 4232 bp, Artificial Sequence
  derived and/or modified sequence
agatgcgctcggtcctcaccagcggcgttgtgcggcgaaccctgcggtgcttcgggaaggcggtcgttcctccctgctcccaccgttttccagcgtgtgcgctcttaccttctctggggaaaaaaggaaattttttattttttaacatttcatttcatgaaaccgttttttttaagtggtggcgctgaacacagtccttgcagaggggggcagcactttccctcctgaccccaacctggaaaccccagtgtgacttcagcgctgtcagagcattggaagcagagctgcgagttaggaagcggctcgctggcagctgggcacgtttctttcctgcgagatcggcttttttgatttgctctttttcacatgaaaatgttcagcttcatttttagacacctttagacatggttatcactgtttaaagccttgatttttttttaaacaaatagtttgcattttattcattgaaacagggagagaacaaataccatcctgctttttgggctgccttcctatttcaaggaaagacgccaaggtaattttgacccagaggagcaatgatgtagccacctcctaaccttcccttcttgaacccccagacataaagggagcagtaggcataaaatgtggggagctgaccatctgccggtccggtcctgaccttccactagtagtgagaccaatccagctcttgctgctgctgtggctttgtgaggaggtcccctcttgctgttggctgcacatcaggaaggctgtgatgggaatgaaggtgaaaacttggagatttcacttcagtcattgcttctgcctgcaagatcatcctttaaaagtagagaagctgctctgtgtggtggttaactccaagaggcagaactcgttctagaaggaaatggatgcaagcagctccgggggccccaaacgcatgcttcctgtggtctagcccagggaagcccttccgtgggggccccggctttgagggatgccaccggttctggacgcatggctgattcctgaatgatgatggttcgccgggggctgcttgcgtggatttcccgggtggtggttttgctggtgctcctctgctgtgctatctctgtcctgtacatgttggcctgcaccccaaaaggtgacgaggagcagctggcactgcccagggccaacagccccacggggaaggaggggtaccaggccgtccttcaggagtgggaggagcagcaccgcaactacgtgagcagcctgaagcggcagatcgcacagctcaaggaggagctgcaggagaggagtgagcagctcaggaatgggcagtaccaagccagcgatgctgctggcctgggtctggacaggagccccccagagaaaacccaggccgacctcctggccttcctgcactcgcaggtggacaaggcagaggtgaatgctggcgtcaagctggccacagagtatgcagcagtgcctttcgatagctttactctacagaaggtgtaccagctggagactggccttacccgccaccccgaggagaagcctgtgaggaaggacaagcgggatgagttggtggaagccattgaatcagccttggagaccctgaacagtcctgcagagaacagccccaatcaccgtccttacacggcctctgatttcatagaagggatctaccgaacagaaagggacaaagggacattgtatgagctcaccttcaaaggggaccacaaacacgaattcaaacggctcatcttatttcgaccattcggccccatcatgaaagtgaaaaatgaaaagctcaacatggccaacacgcttatcaatgttatcgtgcctctagcaaaaagggtggacaagttccggcagttcatgcagaatttcagggagatgtgcattgagcaggatgggagagtccatctcactgttgtttactttgggaaagaagaaataaatgaagtcaaaggaatacttgaaaacacttccaaagctgccaacttcaggaactttaccttcatccagctgaatggagaattttctcggggaaagggacttgatgttggagcccgcttctggaagggaagcaacgtccttctctttttctgtgatgtggacatctacttcacatctgaattcctcaatacgtgtaggctgaatacacagccagggaagaaggtattttatccagttcttttcagtcagtacaatcctggcataatatacggccaccatgatgcagtccctcccttggaacagcagctggtcataaagaaggaaactggattttggagagactttggatttgggatgacgtgtcagtatcggtcagacttcatcaatataggtgggtttgatctggacatcaaaggctggggcggagaggatgtgcacctttatcgcaagtatctccacagcaacctcatagtggtacggacgcctgtgcgaggactcttccacctctggcatgagaagcgctgcatggacgagctgacccccgagcagtacaagatgtgcatgcagtccaaggccatgaacgaggcatcccacggccagctgggcatgctggtgttcaggcacgagatagaggctcaccttcgcaaacagaaacagaagacaagtagcaaaaaaacatgaactcccagagaaggattgtgggagacactttttctttccttttgcaattactgaaagtggctgcaacagagaaaagacttccataaaggacgacaaaagaattggactgatgggtcagagatgagaaagcctccgatttctctctgttgggctttttacaacagaaatcaaaatctccgctttgcctgcaaaagtaacccagttgcaccctgtgaagtgtctgacaaaggcagaatgcttgtgagattataagcctaatggtgtggaggttttgatggtgtttacaacacactgagacctgttgttttgtgtgctcattgaaatattcatgatttaagagcagttttgtaaaaaattcattagcatgaaaggcaagcatatttctcctcatatgaatgagcctatcagcagggctctagtttctaggaatgctaaaatatcagaaggcaggagaggagataggcttattatgatactagtgagtacattaagtaaaataaaatggaccagaaaagaaaagaaaccataaatatcgtgtcatattttccccaagattaaccaaaaataatctgcttatctttttggttgtccttttaactgtctccgtttttttcttttatttaaaaatgcactttttttcccttgtgagttatagtctgcttatttaattaccactttgcaagccttacaagagagcacaagttggcctacatttttatattttttaagaagatactttgagatgcattatgagaactttcagttcaaagcatcaaattgatgccatatccaaggacatgccaaatgctgattctgtcaggcactgaatgtcaggcattgagacatagggaaggaatggtttgtactaatacagacgtacagatactttctctgaagagtattttcgaagaggagcaactgaacactggaggaaaagaaaatgacactttctgctttacagaaaaggaaactcattcagactggtgatatcgtgatgtacctaaaagtcagaaaccacattttctcctcagaagtagggaccgctttcttacctgtttaaataaaccaaagtataccgtgtgaaccaaacaatctcttttcaaaacagggtgctcctcctggcttctggcttccataagaagaaatggagaaaaaaatatatatatatatattgtgaaagatcaatccatctgccagaatctagtgggatggaagtttttgctacatgttatccaccccaggccaggtggaagtaactgaattattttttaaattaagcagttctactcgatcaccaagatgcttctgaaaattgcattttattaccatttcaaactattttttaaaaataaatacagttaacatagagtggtttcttcattcatgtgaaaattattagccagcaccagatgcatgagctaattatctctttgagtccttgcttctgtttgctcacagtaaactcattgtttaaaagcttcaagaacattcaagctgttggtgtgttaaaaaatgcattgtattgatttgtactggtagtttatgaaatttaattaaaacacaggccatgaatggaaggtggtattgcacagctaataaaatatgatttgtggatatga

SEQ ID NO: 48179 - DNA, 766 bp, Artificial Sequence
  derived and/or modified sequence
gcctgcctgtgtgtgctggaggtggcggtggatcttttattacccaacactccacttgcctttttagcctttcctctccctcttctctcctggcctcccagtggccgtcaggggtccctgcagacatcgcttacccacagtggtgcggtgtgagagttacaggggttcctgaccttcgctgtcccctcttgctgttggctgcacatcaggaaggctgtgatgggaatgaaggtgaaaacttggagatttcacttcagtcattgcttctgcctgcaagatcatcctttaaaagtagagaagctgctctgtgtggtggttaactccaagaggcagaactcgttctagaaggaaatggatgcaagcagctccgggggccccaaacgcatgcttcctgtggtctagcccagggaagcccttccgtgggggccccggctttgagggatgccaccggttctggacgcatggctgattcctgaatgatgatggttcgccgggggctgcttgcgtggatttcccgggtggtggttttgctggtgctcctctgctgtgctatctctgtcctgtacatgttggcctgcaccccaaaaggtgacgaggagcagctggcactgcccagggccaacagccccacggggaaggaggggtaccaggccgtccttcaggagtgggaggagcagcaccgcaactacgtgagcagcctgaagcggcagatcgcacagctcaaggaggagctgcaggagaggagtgagcagctcaggaatgggca

SEQ ID NO: 48180 - DNA, 646 bp, Artificial Sequence
  derived and/or modified sequence
agatgcgctcggtcctcaccagcggcgttgtgcggcgaaccctgcggtgcttcgggaaggcggtcgttcctccctgctcccaccgttttccagcctgccttcctatttcaaggaaagacgccaaggtaattttgacccagaggagcaatgatgtagccacctcctaaccttcccttcttgaacccccaggtcccctcttgctgttggctgcacatcaggaaggctgtgatgggaatgaaggtgaaaacttggagatttcacttcagtcattgcttctgcctgcaagatcatcctttaaaagtagagaagctgctctgtgtggtggttaactccaagaggcagaactcgttctagaaggaaatggatgcaagcagctccgggggccccaaacgcatgcttcctgtggtctagcccagggaagcccttccgtgggggccccggctttgagggatgccaccggttctggacgcatggctgattcctgaatgatgatggttcgccgggggctgcttgcgtggatttcccgggtggtggttttgctggtgctcctctgctgtgctatctctgtcctgtacatgttggcctgcaccccaaaaggtgacgaggagcagctggcactgcccagggccaacagccccacggggaa

SEQ ID NO: 48181 - DNA, 1990 bp, Artificial Sequence
  derived and/or modified sequence
ctgccttcctatttcaaggaaagacgccaaggtaattttgacccagaggagcaatgatgtagccacctcctaaccttcccttcttgaacccccaggtcccctcttgctgttggctgcacatcaggaaggctgtgatgggaatgaaggtgaaaacttggagatttcacttcagtcattgcttctgcctgcaagatcatcctttaaaagtagagaagctgctctgtgtggtggttaactccaagaggcagaactcgttctagaaggaaatggatgcaagcagctccgggggccccaaacgcatgcttcctgtggtctagcccagggaagcccttccgtgggggccccggctttgagggatgccaccggttctggacgcatggctgattcctgaatgatgatggttcgccgggggctgcttgcgtggatttcccgggtggtggttttgctggtgctcctctgctgtgctatctctgtcctgtacatgttggcctgcaccccaaaaggtgacgaggagcagctggcactgcccagggccaacagccccacggggaaggaggggtaccaggccgtccttcaggagtgggaggagcagcaccgcaactacgtgagcagcctgaagcggcagatcgcacagctcaaggaggagctgcaggagaggagtgagcagctcaggaatgggcagtaccaagccagcgatgctgctggcctgggtctggacaggagccccccagagaaaacccaggccgacctcctggccttcctgcactcgcaggtggacaaggcagaggtgaatgctggcgtcaagctggccacagagtatgcagcagtgcctttcgatagctttactctacagaaggtgtaccagctggagactggccttacccgccaccccgaggagaagcctgtgaggaaggacaagcgggatgagttggtggaagccattgaatcagccttggagaccctgaacagtcctgcagagaacagccccaatcaccgtccttacacggcctctgatttcatagaagggatctaccgaacagaaagggacaaagggacattgtatgagctcaccttcaaaggggaccacaaacacgaattcaaacggctcatcttatttcgaccattcggccccatcatgaaagtgaaaaatgaaaagctcaacatggccaacacgcttatcaatgttatcgtgcctctagcaaaaagggtggacaagttccggcagttcatgcagaatttcagggagatgtgcattgagcaggatgggagagtccatctcactgttgtttactttgggaaagaagaaataaatgaagtcaaaggaatacttgaaaacacttccaaagctgccaacttcaggaactttaccttcatccagctgaatggagaattttctcggggaaagggacttgatgttggagcccgcttctggaagggaagcaacgtccttctctttttctgtgatgtggacatctacttcacatctgaattcctcaatacgtgtaggctgaatacacagccagggaagaaggtattttatccagttcttttcagtcagtacaatcctggcataatatacggccaccatgatgcagtccctcccttggaacagcagctggtcataaagaaggaaactggattttggagagactttggatttgggatgacgtgtcagtatcggtcagacttcatcaatataggtgggtttgatctggacatcaaaggctggggcggagaggatgtgcacctttatcgcaagtatctccacagcaacctcatagtggtacggacgcctgtgcgaggactcttccacctctggcatgagaagcgctgcatggacgagctgacccccgagcagtacaagatgtgcatgcagtccaaggccatgaacgaggcatcccacggccagctgggcatgctggtgttcaggcacgagatagaggctcaccttcgcaaacagaaacagaagacaagtagcaaaaaaacatga

SEQ ID NO: 48182 - DNA, 792 bp, Artificial Sequence
  derived and/or modified sequence
ggcctcccagtggccgtcaggggtccctgcagacatcgcttacccacagtggtgcggtgtgagagttacaggggttcctgaccttcgctctgccttcctatttcaaggaaagacgccaaggtaattttgacccagaggagcaatgatgtagccacctcctaaccttcccttcttgaacccccaggtcccctcttgctgttggctgcacatcaggaaggctgtgatgggaatgaaggtgaaaacttggagatttcacttcagtcattgcttctgcctgcaagatcatcctttaaaagtagagaagctgctctgtgtggtggttaactccaagaggcagaactcgttctagaaggaaatggatgcaagcagctccgggggccccaaacgcatgcttcctgtggtctagcccagggaagcccttccgtgggggccccggctttgagggatgccaccggttctggacgcatggctgattcctgaatgatgatggttcgccgggggctgcttgcgtggatttcccgggtggtggttttgctggtgctcctctgctgtgctatctctgtcctgtacatgttggcctgcaccccaaaaggtgacgaggagcagctggcactgcccagggccaacagccccacggggaaggaggggtaccaggccgtccttcaggagtgggaggagcagcaccgcaactacgtgagcagcctgaagcggcagatcgcacagctcaaggaggagctgcaggagaggagtgagcagctcaggaatgggcagtaccaagccagcgatgctgct

SEQ ID NO: 48183 - DNA, 2012 bp, Artificial Sequence
  derived and/or modified sequence
acaggggttcctgaccttcgctctgccttcctatttcaaggaaagacgccaaggtaattttgacccagaggagcaatgatgtagccacctcctaaccttcccttcttgaacccccaggtcccctcttgctgttggctgcacatcaggaaggctgtgatgggaatgaaggtgaaaacttggagatttcacttcagtcattgcttctgcctgcaagatcatcctttaaaagtagagaagctgctctgtgtggtggttaactccaagaggcagaactcgttctagaaggaaatggatgcaagcagctccgggggccccaaacgcatgcttcctgtggtctagcccagggaagcccttccgtgggggccccggctttgagggatgccaccggttctggacgcatggctgattcctgaatgatgatggttcgccgggggctgcttgcgtggatttcccgggtggtggttttgctggtgctcctctgctgtgctatctctgtcctgtacatgttggcctgcaccccaaaaggtgacgaggagcagctggcactgcccagggccaacagccccacggggaaggaggggtaccaggccgtccttcaggagtgggaggagcagcaccgcaactacgtgagcagcctgaagcggcagatcgcacagctcaaggaggagctgcaggagaggagtgagcagctcaggaatgggcagtaccaagccagcgatgctgctggcctgggtctggacaggagccccccagagaaaacccaggccgacctcctggccttcctgcactcgcaggtggacaaggcagaggtgaatgctggcgtcaagctggccacagagtatgcagcagtgcctttcgatagctttactctacagaaggtgtaccagctggagactggccttacccgccaccccgaggagaagcctgtgaggaaggacaagcgggatgagttggtggaagccattgaatcagccttggagaccctgaacagtcctgcagagaacagccccaatcaccgtccttacacggcctctgatttcatagaagggatctaccgaacagaaagggacaaagggacattgtatgagctcaccttcaaaggggaccacaaacacgaattcaaacggctcatcttatttcgaccattcggccccatcatgaaagtgaaaaatgaaaagctcaacatggccaacacgcttatcaatgttatcgtgcctctagcaaaaagggtggacaagttccggcagttcatgcagaatttcagggagatgtgcattgagcaggatgggagagtccatctcactgttgtttactttgggaaagaagaaataaatgaagtcaaaggaatacttgaaaacacttccaaagctgccaacttcaggaactttaccttcatccagctgaatggagaattttctcggggaaagggacttgatgttggagcccgcttctggaagggaagcaacgtccttctctttttctgtgatgtggacatctacttcacatctgaattcctcaatacgtgtaggctgaatacacagccagggaagaaggtattttatccagttcttttcagtcagtacaatcctggcataatatacggccaccatgatgcagtccctcccttggaacagcagctggtcataaagaaggaaactggattttggagagactttggatttgggatgacgtgtcagtatcggtcagacttcatcaatataggtgggtttgatctggacatcaaaggctggggcggagaggatgtgcacctttatcgcaagtatctccacagcaacctcatagtggtacggacgcctgtgcgaggactcttccacctctggcatgagaagcgctgcatggacgagctgacccccgagcagtacaagatgtgcatgcagtccaaggccatgaacgaggcatcccacggccagctgggcatgctggtgttcaggcacgagatagaggctcaccttcgcaaacagaaacagaagacaagtagcaaaaaaacatga

SEQ ID NO: 48184 - DNA, 1599 bp, Artificial Sequence
  derived and/or modified sequence
atgatgatggtgagaagaggcctgctggcctggatcagcagagtggtggtgctgctggtgctgctgtgctgcgccatcagcgtgctgtacatgctggcctgcacccccaagggcgacgaggagcagctggccctgcccagagccaacagccccaccggcaaggagggctaccaggccgtgctgcaggagtgggaggagcagcacagaaactacgtgagcagcctgaagagacagatcgcccagctgaaggaggagctgcaggagagaagcgagcagctgagaaacggccagtaccaggccagcgacgccgccggcctgggcctggacagaagcccccccgagaagacccaggccgacctgctggccttcctgcacagccaggtggacaaggccgaggtgaacgccggcgtgaagctggccaccgagtacgccgccgtgcccttcgacagcttcaccctgcagaaggtgtaccagctggagaccggcctgaccagacaccccgaggagaagcccgtgagaaaggacaagagagacgagctggtggaggccatcgagagcgccctggagaccctgaacagccccgccgagaacagccccaaccacagaccctacaccgccagcgacttcatcgagggcatctacagaaccgagagagacaagggcaccctgtacgagctgaccttcaagggcgaccacaagcacgagttcaagagactgatcctgttcagacccttcggccccatcatgaaggtgaagaacgagaagctgaacatggccaacaccctgatcaacgtgatcgtgcccctggccaagagagtggacaagttcagacagttcatgcagaacttcagagagatgtgcatcgagcaggacggcagagtgcacctgaccgtggtgtacttcggcaaggaggagatcaacgaggtgaagggcatcctggagaacaccagcaaggccgccaacttcagaaacttcaccttcatccagctgaacggcgagttcagcagaggcaagggcctggacgtgggcgccagattctggaagggcagcaacgtgctgctgttcttctgcgacgtggacatctacttcaccagcgagttcctgaacacctgcagactgaacacccagcccggcaagaaggtgttctaccccgtgctgttcagccagtacaaccccggcatcatctacggccaccacgacgccgtgccccccctggagcagcagctggtgatcaagaaggagaccggcttctggagagacttcggcttcggcatgacctgccagtacagaagcgacttcatcaacatcggcggcttcgacctggacatcaagggctggggcggcgaggacgtgcacctgtacagaaagtacctgcacagcaacctgatcgtggtgagaacccccgtgagaggcctgttccacctgtggcacgagaagagatgcatggacgagctgacccccgagcagtacaagatgtgcatgcagagcaaggccatgaacgaggccagccacggccagctgggcatgctggtgttcagacacgagatcgaggcccacctgagaaagcagaagcagaagaccagcagcaagaagacctag

SEQ ID NO: 48185 - DNA, 291 bp, Artificial Sequence
  derived and/or modified sequence
atgatgatggtgagaagaggcctgctggcctggatcagcagagtggtggtgctgctggtgctgctgtgctgcgccatcagcgtgctgtacatgctggcctgcacccccaagggcgacgaggagcagctggccctgcccagagccaacagccccaccggcaaggagggctaccaggccgtgctgcaggagtgggaggagcagcacagaaactacgtgagcagcctgaagagacagatcgcccagctgaaggaggagctgcaggagagaagcgagcagctgagaaacggctag

SEQ ID NO: 48186 - DNA, 162 bp, Artificial Sequence
  derived and/or modified sequence
atgatgatggtgagaagaggcctgctggcctggatcagcagagtggtggtgctgctggtgctgctgtgctgcgccatcagcgtgctgtacatgctggcctgcacccccaagggcgacgaggagcagctggccctgcccagagccaacagccccaccggctag

SEQ ID NO: 48187 - DNA, 315 bp, Artificial Sequence
  derived and/or modified sequence
atgatgatggtgagaagaggcctgctggcctggatcagcagagtggtggtgctgctggtgctgctgtgctgcgccatcagcgtgctgtacatgctggcctgcacccccaagggcgacgaggagcagctggccctgcccagagccaacagccccaccggcaaggagggctaccaggccgtgctgcaggagtgggaggagcagcacagaaactacgtgagcagcctgaagagacagatcgcccagctgaaggaggagctgcaggagagaagcgagcagctgagaaacggccagtaccaggccagcgacgccgcctag

SEQ ID NO: 48188 - DNA, 45 bp, Artificial Sequence
  derived and/or modified sequence
atgatgatggtgagaagaggcctgctggcctggatcagcagatag

SEQ ID NO: 48189 - DNA, 1599 bp, Artificial Sequence
  derived and/or modified sequence
atgatgatggtgagacgcggacttctggcatggataagccgggtggtcgtcttattagttctgttgtgttgtgccattagcgtgctttatatgctcgcgtgcacgcccaagggtgacgaggagcagctggccctcccccgtgctaatagtcccaccggaaaagagggttatcaagcagtgttacaagagtgggaggaacagcacagaaactacgtgtcctccctgaaaagacagattgctcaactgaaggaggaactgcaggagcgctctgagcaacttcggaatggccaataccaggctagcgatgcagcgggcctcggactggaccggagcccacccgagaaaacccaggcggatctgctcgccttcttgcattcccaggtggataaggctgaagtcaatgcgggtgtgaaactagccacggagtatgctgctgtgcctttcgactcattcactctccagaaggtgtatcagctggagactgggcttacaagacatcctgaggagaagcccgttcggaaagacaagcgagacgagctggtcgaggcaattgagagcgcactggagactttaaacagtccggccgagaattctccaaatcacaggccatacacagcttcggatttcattgagggcatctaccggactgagcgtgataagggtacactgtatgagctaactttcaagggtgaccacaagcacgagttcaaaaggcttattttgttcaggcccttcgggcccatcatgaaagtgaaaaacgagaagctaaacatggcaaacactctgatcaacgttatcgtgccccttgcaaagagggtcgacaagttccggcagtttatgcagaattttcgggaaatgtgtatcgaacaggacggacgtgtccatctgacagtggtctactttggcaaggaagagattaatgaagttaaggggattcttgagaatacctctaaggccgcaaatttccgtaactttacatttatccagctgaacggggaattttctcgtgggaaaggtctcgacgtgggagctcgcttttggaaaggctcaaatgttctgttgttcttttgtgacgtcgatatatattttacaagcgaattcctgaacacatgccgcctaaatactcagcccggcaagaaggtgttctatccggttttgttttcccagtataatcctggcataatttacggacaccacgacgctgtacctcctctggaacagcagctggttatcaagaaggagactgggttttggcgagactttgggtttggaatgacatgtcaataccgcagcgactttatcaatattggcggattcgatcttgacattaaaggctggggcggagaagacgtgcacctgtaccgtaaatacttgcattccaatttgattgtagtgcgaactccggtccgaggcctgttccacctgtggcacgagaaaaggtgtatggatgaattaaccccagaacagtacaaaatgtgtatgcaatctaaagcaatgaatgaagccagccacggacagcttgggatgctggtattcaggcacgagatagaggcccacttgcgaaagcaaaagcagaaaactagctccaaaaaaacatag

SEQ ID NO: 48190 - DNA, 1599 bp, Artificial Sequence
  derived and/or modified sequence
atgatgatggtgcggaggggcctcttggcttggatttcccgagtggttgttctgcttgtactgttatgctgcgctatctctgtcctgtatatgctggcctgcacccctaagggtgatgaagagcagctggccctgcctcgggctaacagccccaccggaaaggagggatatcaggccgtgctgcaggagtgggaggagcagcataggaactacgtgtcctcactcaaacggcagatcgcgcaattaaaagaagaactgcaggaaagatccgaacaactcagaaatggacagtatcaggcatcagacgctgctggactgggattagaccggtctcctccagaaaaaacacaggcagatttactggcttttctgcacagtcaagtggataaggccgaagttaacgcaggagtgaaattggctactgagtacgcagcggtgcccttcgactccttcacccttcagaaggtctaccaactagaaacgggcctgacccgacatcccgaagaaaagcccgtgcgaaaggacaaaagggacgaactggttgaggctattgaatctgcgcttgagacacttaacagtccggccgagaattcgcctaatcataggccatacaccgcttcagattttattgagggaatctacaggaccgaacgagacaaggggactctgtatgagctaacttttaagggagatcacaaacacgagttcaagagattgattttgttccggccattcggcccaatcatgaaggttaagaatgagaagcttaatatggccaataccctgattaatgttatcgtgcccctggccaaaagggtggataaatttagacagtttatgcagaatttccgggaaatgtgcatagagcaggatggcagggtgcaccttacagttgtgtatttcggcaaggaagagatcaacgaagtgaagggcattcttgagaatacgagtaaggctgctaattttagaaattttacattcatccagctgaatggggagttcagcagaggaaaggggttggacgtgggcgcaaggttctggaaaggctccaatgtcctgctctttttctgcgacgtggacatatactttacttccgagttcctaaacacttgcaggctcaatacccagcctggaaagaaggtgttttatcccgtgctcttctcgcagtacaatcctgggataatttacggtcatcatgacgccgtgcccccactcgagcaacagctggtcattaaaaaggaaaccggtttctggcgggatttcggtttcggcatgacgtgtcagtaccgtagcgactttatcaatatcggcggcttcgatctagacataaagggttggggaggggaggacgtccacctgtatcggaagtacctacactccaatttgatcgtggtgcggacacctgtacgaggactctttcacctctggcacgagaagagatgtatggatgaactgactccagagcagtataagatgtgcatgcagagcaaagctatgaatgaggcttctcacggacagctgggaatgctggtgttcaggcatgagattgaagcgcacctgaggaaacagaaacagaaaacatcttcaaaaaagacatag

SEQ ID NO: 48191 - DNA, 1599 bp, Artificial Sequence
  derived and/or modified sequence
atgatgatggtgaggagagggctattggcatggatttctagggtagtggtcctccttgtgcttctgtgctgcgccatttccgtgctgtacatgctggcttgcaccccgaaaggtgacgaggaacagctggctctacccagggcaaacagcccaacggggaaggaggggtaccaggcagtcttgcaggaatgggaagagcagcacagaaattatgtgtcatctctgaagcggcagattgctcaactcaaggaggagctccaagaacgatccgagcagctgaggaacgggcagtaccaggcaagtgacgccgctgggctgggtttggacagaagcccacctgagaagacccaagccgacttgctggcctttctccattcgcaagttgacaaggccgaggtaaatgcaggcgtcaaacttgcgaccgagtacgcagccgtgccatttgatagtttcacactgcaaaaggtgtaccagctcgagacgggcctaacccgccaccccgaggagaagcccgtgcggaaggataaaagagatgaactggtggaggccatcgagagcgccctggaaaccctgaacagtcctgccgagaactcacccaaccatcgcccctatactgccagtgacttcatagagggcatctatcgtacagagcgggataaaggaacactgtacgagttgacctttaaaggggaccataagcatgaattcaagagactgatcttgttccggccctttgggcccataatgaaagttaagaatgagaagctgaatatggctaacaccctgataaacgtaattgtacccttggccaagcgggtggacaagttcagacaattcatgcagaacttccgggagatgtgcatagagcaagacggtcgagttcatttgacggtggtgtacttcggaaaagaggagattaacgaagtgaaagggatcctggaaaatacttcaaaagctgctaacttccgaaattttactttcatccagctgaacggcgagttcagccggggaaagggactcgacgtgggggctcgtttctggaaaggctcaaatgtgctcctatttttttgcgacgtagacatatatttcacatccgaatttttaaatacctgcaggctcaacacacagccaggtaaaaaagttttttatcctgtgctgttctcacaatataaccctgggattatttatggtcaccacgatgctgtgccaccgctggaacagcagctcgtaatcaaaaaggaaaccggtttctggagagacttcggattcggaatgacgtgccagtatagaagcgacttcattaatatcggtgggttcgatttggacatcaaaggctggggcggagaggacgtgcacctatatcgcaagtacctgcactcgaacctgattgtggtgaggactccggtgcgcggtctcttccacctgtggcacgagaaacgctgtatggatgagctgacccccgaacaatacaaaatgtgtatgcagtcaaaggcgatgaacgaggcttctcatggacagctggggatgttggtgtttcgccacgagatcgaagctcacttgcggaaacagaaacagaagaccagcagtaagaagacatag

SEQ ID NO: 48192 - DNA, 291 bp, Artificial Sequence
  derived and/or modified sequence
atgatgatggttcgtcgcgggctgctggcatggatctctcgagtggtggtcctgctcgtcttgttgtgctgcgcgatctcggtgctgtacatgctggcatgcacccccaaaggtgacgaggaacagctggctctgccccgggctaatagccctacagggaaggaaggataccaagccgttctccaggagtgggaggaacaacacagaaattacgtaagctcccttaaacggcaaattgcccagctgaaagaggaactccaagagcgtagcgagcaactccgaaacggctag

SEQ ID NO: 48193 - DNA, 162 bp, Artificial Sequence
  derived and/or modified sequence
atgatgatggtacggagagggttgctcgcatggatcagccgggttgtggtgctattggtgttgctctgttgcgccatatcagtcctgtatatgctcgcttgtacacctaagggagacgaggagcagctggctctgccccgagcaaactccccaacaggatag

SEQ ID NO: 48194 - DNA, 1599 bp, Artificial Sequence
  derived and/or modified sequence
atgatgatggtgaggcgcggtctcctggcctggatttcgagagtcgttgttcttctggtccttctgtgctgtgctatctctgttctgtatatgctagcctgcacacctaagggagatgaggagcaactggcactaccacgcgcaaactctcccaccggcaaagagggctaccaggcagtactccaagagtgggaagaacaacatcgtaattatgtgagtagtctcaagaggcagatcgcacagctgaaagaggagctgcaggagaggagtgaacaattacgaaacggacagtaccaggctagcgacgcagccggccttggcctcgatcgatcaccccctgaaaagactcaagctgacctgttagccttccttcactcacaggtcgataaggccgaagtgaacgccggtgtgaaactggctacagagtacgctgcagtgccgttcgactccttcacactgcagaaggtctaccagctcgaaaccgggctaactaggcaccctgaggaaaaacccgtcaggaaggataagcgcgacgaactcgtcgaggccatcgagtccgccctggaaacactgaactcccctgccgaaaactcacctaatcaccgtccctacaccgcgtcagatttcatagaaggaatttaccgcactgaacgagacaaggggacattgtacgagctcaccttcaaaggggaccacaagcatgaatttaagcgcttaatcctgtttcgaccgtttggcccaatcatgaaggtcaaaaatgagaagctgaatatggccaacactctcattaacgtgattgtcccactggcgaagcgtgttgacaaatttaggcagtttatgcagaatttcagagaaatgtgtattgagcaagacggtcgggtacacctgacggtggtttattttggcaaggaggaaattaatgaggtgaaagggattctcgaaaacacctccaaggccgccaacttcagaaatttcaccttcatccagcttaatggggagttcagccgtgggaagggcctggacgtcggcgccagattttggaaaggcagcaacgtgttactgttcttttgtgatgtggacatctacttcacatcagagttcctcaacacatgcaggcttaatacccagcccgggaaaaaagtgttctatccagtgctcttctctcagtacaaccctggaatcatttacggacatcatgatgctgtcccacctctggagcaacagttggtgataaaaaaggagacaggcttctggagggactttggcttcgggatgacatgtcagtaccggtccgattttataaatataggcggattcgacctggacattaagggctggggcggtgaggacgtgcacctgtatcgaaagtacctacactccaatctgattgtcgtcaggacccctgtgcgtggcctgtttcatctatggcacgagaaacggtgtatggatgaattaacgcccgagcagtataaaatgtgcatgcaatcaaaagcaatgaacgaagccagtcacggacagttgggtatgctcgtgtttcgacatgagattgaggcacacctgcggaagcagaagcagaagaccagctccaagaagacttag

SEQ ID NO: 48195 - DNA, 315 bp, Artificial Sequence
  derived and/or modified sequence
atgatgatggttagacggggactcttggcctggatttctcgcgtcgttgttctgctggttctgttgtgctgtgccatcagtgtgctgtacatgctcgcgtgtacaccaaagggggacgaggagcaattagctctcccccgcgcaaactccccaaccggaaaagaaggctaccaagcagtccttcaggaatgggaagagcagcaccgaaattacgttagcagtttaaagagacaaatcgcacaactcaaggaagagctccaggaacgctcggaacaattgcgcaacggtcagtaccaggctagcgatgcggcctag

SEQ ID NO: 48196 - DNA, 45 bp, Artificial Sequence
  derived and/or modified sequence
atgatgatggtccggagaggactcctcgcctggataagtagatag

SEQ ID NO: 48197 - DNA, 1599 bp, Artificial Sequence
  derived and/or modified sequence
atgatgatggtccggagaggcctgttggcctggatatcccgtgtggttgtgctgctggtactgctgtgctgtgctatctctgtactctacatgcttgcttgcacccccaagggggatgaagaacaacttgcccttccaagagccaattcacctacgggaaaggaagggtaccaggcagtactgcaagagtgggaagagcagcaccgcaattacgtatcttccttgaagagacaaattgctcaactaaaggaagaactacaggaaaggagtgaacagctgcggaacggccagtatcaagccagcgatgcagccgggttaggacttgaccgctcaccacccgaaaaaacccaggccgatctactggcttttctccactcacaggttgacaaggctgaggtgaatgccggagtgaagttagcaacggagtacgccgcagttccctttgatagcttcaccctgcagaaagtgtaccaactggagaccggcctcacacgccatccagaagagaagcctgtgcggaaggacaaaagggacgagctagttgaggcaatcgagtccgccctggagacactgaacagtccagctgaaaattctcccaaccacaggccatatactgcgagtgactttattgaagggatctaccggacagagagagacaaggggacactgtacgaattgaccttcaagggtgaccacaagcatgagtttaaacggctcatcctgtttcgtcccttcggcccaattatgaaggtgaaaaacgagaaactgaatatggcaaatacacttattaacgtaatagtgccgttggccaagcgggtggacaaatttcggcagtttatgcaaaatttccgtgagatgtgtatcgagcaggacggtcgggtgcatctgaccgttgtgtacttcggcaaggaggagattaatgaggtgaaagggatcctagagaacacatcaaaagcggccaattttagaaattttacattcatacagttgaacggcgaattttctaggggtaagggcttggatgtgggagcgcggttctggaagggcagcaatgtcttgttgtttttctgtgacgttgatatttactttacatccgaattcctcaatacatgccgactgaacactcagccgggaaaaaaggtcttttatcccgtgctgttcagtcagtacaatccaggaattatatatggtcatcacgacgcagtaccgcctctggagcagcagttagtgataaagaaagaaacgggcttttggcgtgatttcgggttcggcatgacctgtcaatacagatccgattttattaatatcggtggctttgatcttgatattaaagggtggggaggggaggacgtccacctctatcgaaagtatctgcattccaacttaatcgtggtcagaactcctgtgagaggtctcttccacctatggcacgaaaagagatgcatggacgagcttacccccgagcaatacaaaatgtgcatgcagagtaaggcgatgaacgaagccagccatgggcagctggggatgctggtcttccggcatgaaattgaagctcacctacgcaaacaaaagcagaagacatccagcaaaaaaacatag

SEQ ID NO: 48198 - DNA, 1599 bp, Artificial Sequence
  derived and/or modified sequence
atgatgatggtgagaagaggcctgctggcctggatcagccgggtggtggtgctgctggtgctgctgtgctgtgccatctctgtgctgtacatgctggcctgcacccccaagggagatgaggagcagctggccctgccccgggccaacagccccaccgggaaggagggctaccaggccgtgctgcaggagtgggaggagcagcacagaaattatgtgagcagcctgaagaggcagatcgcccagctgaaggaggagctgcaggagaggtctgagcagctgagaaatggccagtaccaggccagtgatgctgctggcctgggcctggacaggagccccccagagaagacccaggccgacctgctggccttcctgcacagccaggtggacaaggccgaggtgaatgccggcgtgaagctggccacagaatatgctgctgtgccctttgacagcttcaccctgcagaaggtgtaccagctggagaccggcctgaccaggcaccctgaggagaagcctgtgaggaaggacaagagagatgagctggtggaggccatcgagagcgccctggagaccctgaacagccctgctgagaacagccccaaccaccggccctacacagccagtgacttcatcgagggcatctacagaacagagcgggacaagggcaccctgtatgagctgaccttcaagggggaccacaagcatgagttcaagaggctcatcctcttccggcccttcggccccatcatgaaggtgaagaatgagaagctgaacatggccaacaccctcatcaacgtcatcgtgcccctggccaagagggtggacaagttccggcagttcatgcagaacttccgggagatgtgcatcgagcaggacggccgggtgcacctgactgtggtgtactttgggaaggaggagatcaatgaggtgaagggcatcctggagaacaccagcaaggccgccaacttcaggaacttcaccttcatccagctgaatggagagttcagccggggcaagggcctggatgtgggcgcccgcttctggaagggcagcaatgtgctgctcttcttctgtgatgtggacatctacttcaccagcgagttcctgaacacctgccgcctgaacacccagcccgggaagaaggtgttctaccctgtgctcttcagccagtacaaccctggcatcatctacggccaccatgatgctgtgccccccctggagcagcagctggtgatcaagaaggagaccggcttctggagggactttggatttggcatgacctgccagtacagaagtgacttcatcaacatcggcggctttgacctggacatcaagggctggggcggagaagatgtgcacctgtacaggaagtacctgcacagcaacctgattgtggtgaggacccctgtgcggggcctcttccacctgtggcatgagaagcgctgcatggatgagctgaccccagagcagtacaagatgtgcatgcagagcaaggccatgaatgaggccagccacggccagctgggcatgctggtgttcagacatgaaattgaggcccacctgaggaagcagaagcagaagaccagcagcaagaagacctag

SEQ ID NO: 48199 - DNA, 291 bp, Artificial Sequence
  derived and/or modified sequence
atgatgatggtgagaagaggcctgctggcctggatcagccgggtggtggtgctgctggtgctgctgtgctgtgccatctctgtgctgtacatgctggcctgcacccccaagggagatgaggagcagctggccctgccccgggccaacagccccaccgggaaggagggctaccaggccgtgctgcaggagtgggaggagcagcacagaaattatgtgagcagcctgaagaggcagatcgcccagctgaaggaggagctgcaggagaggtctgagcagctgagaaatggatag

SEQ ID NO: 48200 - DNA, 162 bp, Artificial Sequence
  derived and/or modified sequence
atgatgatggtgagaagaggcctgctggcctggatcagccgggtggtggtgctgctggtgctgctgtgctgtgccatctctgtgctgtacatgctggcctgcacccccaagggagatgaggagcagctggccctgccccgggccaacagccccaccggctag

SEQ ID NO: 48201 - DNA, 315 bp, Artificial Sequence
  derived and/or modified sequence
atgatgatggtgagaagaggcctgctggcctggatcagccgggtggtggtgctgctggtgctgctgtgctgtgccatctctgtgctgtacatgctggcctgcacccccaagggagatgaggagcagctggccctgccccgggccaacagccccaccgggaaggagggctaccaggccgtgctgcaggagtgggaggagcagcacagaaattatgtgagcagcctgaagaggcagatcgcccagctgaaggaggagctgcaggagaggtctgagcagctgagaaatggccagtaccaggccagtgatgctgcctag

SEQ ID NO: 48202 - DNA, 45 bp, Artificial Sequence
  derived and/or modified sequence
atgatgatggtgagaagaggcctgctggcctggatcagcaggtag

SEQ ID NO: 48203 - DNA, 1599 bp, Artificial Sequence
  derived and/or modified sequence
atgatgatggtgcggcggggcctgctggcctggatcagccgggtggtcgttctgctggtgttgctgtgttgcgccataagcgttctttacatgctcgcctgcactccaaaaggcgacgaagagcagctcgccctaccacgcgctaactcacccaccgggaaggaggggtaccaagctgtgttacaggaatgggaggaacagcacagaaactacgtgagttcattaaaacggcagatcgcccaactcaaggaagagctgcaagaaagatccgagcagcttcgaaacggacaatatcaggcctccgatgcagccgggctggggttggatcgcagtcctccagaaaagactcaggccgacttgttggcttttctgcatagccaggtggataaggctgaagtcaacgccggtgttaagcttgcaacagaatacgctgccgtcccattcgacagtttcactttacaaaaagtgtatcaactcgagaccgggttaacccggcaccccgaggaaaagcccgtgcgtaaggacaaacgcgatgaacttgtcgaagccatcgaatctgcgcttgaaacactcaatagccccgccgaaaatagccccaatcatcgcccctacactgcaagtgactttatcgaaggcatatatcgcacggagagggacaagggcaccctgtatgagttaactttcaagggcgatcataagcatgagtttaaaaggttgatcctttttaggccctttggtccaattatgaaggtgaagaatgagaagttgaacatggccaacacattaattaatgtgattgtgccgctagctaaaagagtcgacaagttccgccagttcatgcaaaattttcgagagatgtgcattgaacaggatggtagggtacacctgaccgtggtgtattttggaaaagaggagattaatgaggtcaagggtatccttgaaaatacaagtaaggccgcaaacttccgaaattttaccttcatccagttgaatggtgagttctctcggggcaaaggcctggatgttggagcgagattttggaagggaagtaatgttctgctctttttttgtgacgtcgacatctattttacgagcgagttcctcaatacgtgcaggttgaacacacagcccgggaaaaaggtgttctacccggtcctgttctcccagtacaatcctggtataatctacggacatcacgatgcagtgccgcccctcgagcagcagctggtgataaagaaagagacgggtttctggcgagactttggttttgggatgacatgccaatatcgaagtgattttattaacatcggaggatttgatcttgatattaagggttggggcggtgaggacgtgcatttgtatagaaaatatctgcatagcaatttgattgtggtacgtactccagtgcggggcctgtttcacctctggcacgaaaagaggtgcatggacgaactgactccggaacagtacaaaatgtgtatgcagtcaaaggccatgaatgaggcttctcacggccagctgggtatgttggtcttccgccatgagattgaagctcacttacgcaagcaaaagcagaaaaccagcagcaagaagacctag

SEQ ID NO: 48204 - DNA, 1599 bp, Artificial Sequence
  derived and/or modified sequence
atgatgatggtgcggcggggcctgctggcctggatcagccgggtggtcgtgctcctggtattactgtgttgtgctatttccgtgttgtacatgctagcttgtacacctaagggcgacgaagagcagctcgcactccccagggccaacagcccaaccgggaaggagggctaccaggccgtccttcaggagtgggaggagcagcaccggaattacgtctccagcctcaagcgacagattgctcaattgaaagaggagctacaagagcgttccgagcagcttagaaatggccagtatcaagcatcggatgctgcaggacttggtctggacaggtctccccccgagaagacccaggccgatcttctcgctttcctacactcacaggtagataaagccgaggtcaacgctggagtgaagctggcgacagaatatgcagccgtaccctttgattctttcacactgcaaaaagtttaccagttggagactggcctcacccgacatcccgaagagaagcccgtcagaaaggataagcgcgacgaattggtcgaggcaattgagtcagctctcgagacattgaactcccccgccgaaaattcacctaatcaccgaccatacacagcttccgatttcattgagggcatctaccggacagagcgcgataaagggaccctgtacgagctgacgttcaagggcgatcacaagcacgaatttaaacgtctgattctgtttaggccattcggtccaatcatgaaggttaaaaacgagaagcttaatatggccaacacactgatcaacgtcatcgtgcccttggctaagagggtggataaatttagacagttcatgcagaattttcgagagatgtgcattgagcaagacggccgggtccacctcacggtggtttactttgggaaagaagagattaatgaagtgaaaggaattctcgagaacacttcgaaggccgctaattttagaaattttacctttatccagttgaacggggaattttcacgcgggaaaggcctggacgtgggtgcccggttctggaaaggatctaacgtcttgctgttcttttgcgatgtggacatctactttacttcggagttcctcaacacttgccgactcaatacacagcccggtaaaaaggtcttctaccctgtgctgttttctcaatacaatcccgggatcatctacggacatcacgacgccgttccacccctcgaacaacaactggttatcaaaaaagagaccggcttctggagggattttggctttgggatgacgtgtcaatatcgtagtgactttatcaatatcgggggattcgacttggacatcaaaggctggggtggggaggatgtccacttgtatcgaaaatacttgcacagtaatctcatcgtggtgcggactcccgtgcgcggactgttccacctgtggcacgaaaagcgctgtatggatgagttaactccagagcagtacaagatgtgcatgcagtcaaaagcaatgaatgaggcctctcacgggcagttgggcatgctggtatttaggcatgaaattgaagcccacctgcggaagcaaaaacagaagacttcctcgaagaagacttag

SEQ ID NO: 48205 - DNA, 1599 bp, Artificial Sequence
  derived and/or modified sequence
atgatgatggtgcggcggggcctgctggcctggatcagccgggtggtcgtattattggtgctgctgtgttgtgcaatctcggtactgtacatgctggcatgtacaccgaagggggacgaagagcagctcgcactcccccgcgctaactctccaacgggcaaggagggctaccaagctgtcctgcaggaatgggaggagcaacaccgaaactatgtttcttcacttaaaaggcagattgcgcagctgaaggaggaactgcaggagcgtagcgaacaactcagaaacggtcagtatcaggcaagtgatgctgctggcctcggactcgataggagtcctcctgaaaaaacacaagcggatttactggctttcctccactcccaggtggataaggccgaggtcaacgcaggagttaagctggcgacagaatacgcggctgtccctttcgactctttcacacttcaaaaggtctaccagttagaaactggtctcacccgacaccctgaggagaaacccgtcagaaaggataaacgggatgaacttgttgaagccatcgaatctgcacttgagactcttaactccccagccgaaaacagccctaaccaccggccctatactgcaagcgatttcattgaaggcatctaccgcactgagagggataagggcactctgtacgagctgacctttaagggggaccacaaacacgagtttaagcgcctcatcctcttccggccattcgggccaattatgaaagtgaagaatgaaaaactcaatatggccaatacccttattaacgttatagtgcccctggcaaaacgggtggataaattccgacagtttatgcagaatttccgcgagatgtgcatagaacaggatgggcgcgttcatctaacagtggtgtattttggcaaagaggaaattaacgaggtcaagggcattctggagaataccagcaaggccgctaatttccgcaatttcacgtttattcagctgaacggggagttctcccgcgggaagggcttagacgtgggagccaggttttggaaagggagcaatgtgttgctctttttctgcgacgtggatatatatttcacaagcgagtttctcaatacgtgtaggcttaacacccagccaggcaagaaagtgttttacccagtgttgttctcacagtacaatcctgggataatatacggccatcatgacgctgtccctcctctggagcagcagctcgtgattaagaaggaaactggtttctggcgggatttcggattcgggatgacgtgtcagtacaggagtgatttcatcaacatcgggggtttcgatctggatattaaaggttgggggggcgaggatgttcacctatatagaaagtacctgcatagcaatcttattgtggtaagaactccagtgaggggcttgtttcacctgtggcacgagaaacgttgtatggacgaattgaccccagagcagtataagatgtgcatgcagtcaaaggcaatgaacgaggcctctcacggccagttagggatgcttgtgttcaggcacgaaattgaggcacacctgcgaaagcagaagcagaagacatctagcaaaaagacttag

SEQ ID NO: 48206 - DNA, 291 bp, Artificial Sequence
  derived and/or modified sequence
atgatgatggtgcggcggggcctgctggcctggatcagccgggtggtcgtgctgttagtgctcttgtgctgtgccattagcgtgctctacatgttagcctgtacgcccaagggagacgaagaacaactggcattaccccgcgccaatagcccaactggtaaggaagggtaccaggctgttctacaggagtgggaagagcagcaccgtaattatgtctcatccttaaagcgtcaaattgcccagctgaaggaggagttacaggagaggtccgagcaattgagaaacggctag

SEQ ID NO: 48207 - DNA, 162 bp, Artificial Sequence
  derived and/or modified sequence
atgatgatggtgcggcggggcctgctggcctggatcagccgggtggtggttctgctggtactcctgtgctgtgccatttccgtgctgtatatgttggcatgcacccccaagggtgacgaggaacagttggccctccccagggctaatagccctacaggctag

SEQ ID NO: 48208 - DNA, 1599 bp, Artificial Sequence
  derived and/or modified sequence
atgatgatggtgcggcggggcctgctggcctggatcagccgggtggttgtgcttctggtgctcctgtgctgcgccatctctgtcctgtacatgctggcgtgtacccccaagggcgacgaggagcagttagctctgccgcgggccaactctcccactggcaaggaaggctatcaggccgttctgcaggagtgggaagaacagcaccggaactatgtgagttcactgaagaggcagatcgctcagctcaaggaagagctgcaagagcgctctgaacaactgcgaaatggtcagtatcaggcaagtgacgcggcagggctgggccttgacagaagtccgcccgagaaaacacaggcagacttgctggcatttcttcattcgcaggttgacaaggccgaggtcaatgctggcgtcaaattagctacggaatatgccgctgtgccttttgactccttcaccttacaaaaggtttaccagctggaaacgggactgacacgccaccctgaggaaaagccggtgcggaaggataagagggatgaactggtagaggccatcgaatcagccttggaaacactgaacagcccagcggaaaacagcccaaaccaccgaccatacactgccagtgactttattgagggaatctatagaaccgaacgggacaagggtaccctctatgagctgacctttaagggtgatcacaagcacgagtttaagcgacttattctcttccgtccatttgggcccattatgaaggtcaaaaacgagaagctcaacatggctaacaccctgattaatgtgattgtcccccttgcgaagcgcgttgacaaattccggcagtttatgcagaattttagagagatgtgtatcgaacaggatggccgcgtgcacctcaccgtcgtctacttcggaaaagaggaaatcaacgaggttaaaggcatcctggagaacacatcgaaggctgccaacttccggaactttactttcatccagctgaatggcgagttctcaagaggcaaaggcctagatgtgggtgcgcggttttggaagggctctaatgtgctgctcttcttctgtgacgtggatatttactttacctctgagttcctgaacacatgtagactcaacacacagcccggcaagaaggtgttctatcccgtgttgttctcccagtacaatccggggatcatctatggacaccatgatgcagtgccacccctggagcagcaactggtgatcaagaaggaaacgggattctggagagattttggctttggaatgacctgccaatatcgcagcgacttcatcaatataggtgggttcgatttagacataaaggggtggggcggtgaagatgttcacttgtacaggaaatacctgcacagcaatctgattgttgtgcggacacctgtgcgcggactgttccatttgtggcatgaaaaacgttgtatggacgaattgacgcccgagcagtataagatgtgcatgcaaagtaaggccatgaatgaagccagtcatggccaactagggatgttggtgtttcggcacgaaattgaagctcacctgcgcaagcaaaaacaaaagacctcctccaagaaaacctag

SEQ ID NO: 48209 - DNA, 315 bp, Artificial Sequence
  derived and/or modified sequence
atgatgatggtgcggcggggcctgctggcctggatcagccgggtggttgtgctgctagtgctcttatgttgtgcaatttccgtactatacatgctggcctgcactccaaagggtgacgaggagcagttggctctgccccgcgctaacagccctaccggtaaggaggggtaccaggcagttctacaggaatgggaagagcagcatagaaattatgttagctccctgaagcgacagattgctcagctgaaggaagagctacaggagcgttccgagcagcttagaaacggtcagtatcaggcatccgacgctgcttag

SEQ ID NO: 48210 - DNA, 45 bp, Artificial Sequence
  derived and/or modified sequence
atgatgatggtgcggcggggcctgctggcctggatcagccggtag

SEQ ID NO: 48211 - DNA, 1599 bp, Artificial Sequence
  derived and/or modified sequence
atgatgatggtgcggcggggcctgctggcctggatcagccgggtggtagtcctccttgtgttactctgttgtgcaatctccgtgctatacatgctggcctgcacacctaagggcgacgaggaacagctcgccctccccagagccaacagccctacgggcaaagagggctatcaggcagtgttgcaagaatgggaggagcagcacagaaattatgtctcctccctaaagcgccagatcgcgcagctgaaggaggaactccaggagagatccgaacagttacggaacggccagtaccaggcgtccgacgctgccggcctgggcttagacaggagccccccagagaaaactcaggcggacctgctcgcgtttctgcatagccaggtcgacaaagcggaggtgaacgcaggtgtaaagctggccactgagtatgcagccgtcccctttgacagttttactctccagaaagtgtaccagttagaaacaggtctgactagacatcctgaggagaaacccgtccgcaaagataagcgggatgagctggtagaggccatcgagtctgccctagagaccctgaatagtccagcagagaactcacctaaccatagaccctacaccgcctcagactttatcgaggggatctacagaaccgaaagggacaagggcaccctgtatgagcttacttttaagggtgaccataagcacgagttcaagcgattgatcctttttcgccctttcggcccaatcatgaaggtgaaaaacgaaaaactgaacatggcaaacacgttgatcaatgtcattgtgcctctcgccaagagagttgacaaatttaggcagttcatgcagaattttagggaaatgtgcattgaacaggatgggagagttcatctaaccgttgtgtactttggaaaagaggaaatcaacgaggtgaagggtatacttgagaacacttccaaagctgccaacttccgtaattttacgttcatccaacttaacggggaattttcacgcggcaaaggactggatgtcggagcgaggttctggaaagggtccaatgtgttgttatttttctgtgacgttgatatatacttcacctcggaattcctgaacacatgtcgtctgaacactcagcctgggaagaaagtgttttacccagttctttttagccagtacaacccaggaatcatctacggtcaccacgacgctgtgcccccgctggagcagcaactggtcattaagaaggaaacggggttttggcgtgattttggctttggaatgacctgccagtacaggtccgattttatcaatatcggagggtttgacctcgacattaagggctggggaggagaagacgtccacttgtacagaaagtacctccatagtaatctgattgtggtgagaactcctgtccggggtttgttccacctgtggcatgagaagagatgcatggacgaattaaccccggagcaatacaagatgtgcatgcagtcaaaagccatgaatgaggcaagtcacggccagctgggcatgctcgtcttccggcacgaaattgaagcccacctgagaaaacaaaagcagaagacctcttcgaagaaaacctag

SEQ ID NO: 48212 - DNA, 1599 bp, Artificial Sequence
  derived and/or modified sequence
atgatgatggtgcggcgtgggctgctcgcttggattagtcgggtagttgtgttgctagtcctcctatgttgcgcaatctctgttttgtacatgctagcctgtacccctaaaggagatgaggaacaactggctctacctagggcaaatagtcctacaggcaaggaaggctaccaggctgtgttgcaagagtgggaagaacagcaccgcaactacgtttccagtctaaagcgacaaatcgctcaattgaaagaagagctccaagagcgtagcgaacagctccggaatggacagtaccaggccagcgacgcggcaggcctgggtctggatcgctcacccccagagaaaacacaggctgacctgctggcctttctgcattcacaggttgacaaggctgaagtgaatgctggcgtgaaattagctacagaatacgctgccgtgccatttgactccttcactctgcagaaggtgtaccaacttgagaccggcctcacgagacacccagaagaaaaaccggtgcggaaggataagcgggatgagctggtggaagccattgaaagcgctttggaaaccctgaactccccagcagagaactccccgaaccacagaccttatactgcaagtgacttcatcgagggcatatatcgcactgaaagagacaaaggtaccctttatgagctcacctttaaaggcgaccataagcatgaatttaagaggctcatcctgtttaggcccttcggccctataatgaaggtgaaaaatgagaaactgaatatggccaataccttgattaacgtgattgtgccactggctaaacgggtcgataaattcagacaattcatgcagaattttcgggaaatgtgtatcgagcaggatggacgggtgcacctgacggtggtctattttggaaaagaagaaatcaacgaagtcaaaggtatcctagagaatacttctaaggcagctaacttcaggaacttcacttttatccaattgaacggtgagttctcacgcggaaaggggctcgacgtcggggctcgattttggaaaggaagcaacgtgcttctttttttttgtgatgtcgatatctattttacctccgaatttctaaacacctgtcgccttaacactcagcccggtaaaaaggttttctacccagtgctctttagccaatacaacccaggtattatttatggccaccacgacgccgtccctcctctcgagcaacagctggtgatcaaaaaggaaactggattttggagggattttgggtttggaatgacttgccaatatcgtagcgatttcatcaatattggaggctttgacctggatattaaaggctggggcggagaggatgtccatctatacaggaagtaccttcattccaatctgattgtggtgcgcacacctgtcaggggactatttcatctttggcacgagaagaggtgcatggacgaactcacacccgagcagtataagatgtgcatgcagtctaaagctatgaatgaagcctcccacggacagctggggatgctggtgtttcggcacgaaatcgaggcccaccttagaaagcagaagcagaaaacctcgtccaaaaagacctag

SEQ ID NO: 48213 - DNA, 1599 bp, Artificial Sequence
  derived and/or modified sequence
atgatgatggtgcggagggggttgctcgcgtggatttctcgcgtagtggtacttcttgttctactgtgctgcgccatctcggtgctctacatgctcgcctgcacccccaagggcgacgaagaacagcttgcactgccccgtgccaattcgcctactggtaaggagggttaccaggcagtcctgcaggaatgggaggagcagcaccggaactatgtgtccagccttaagcgccaaatcgcacagcttaaagaagagctgcaagaaaggagtgagcagctacgaaatggccagtatcaggcttctgacgccgctggcctgggtcttgaccgttcaccaccagagaagactcaagcagacctcttggccttcctccacagccaggtagataaagccgaagtgaatgccggagtgaagctcgctactgagtatgccgcagtgccttttgatagttttaccctccagaaagtgtaccaacttgaaaccggtctcactcgtcaccccgaggaaaaacccgtgaggaaggataaaagggacgagctggttgaagccatagagagcgccctggaaactctcaactcccccgctgaaaacagtcctaatcacagaccttacactgcctcagattttatagagggtatttatagaacagagagggacaagggcacactttacgagttgaccttcaaaggtgaccataaacacgagtttaaacgtttgattttatttagaccttttggtcctatcatgaaggtaaaaaacgaaaagctgaacatggcaaataccctaattaatgtgattgtacctctggcaaagcgcgtggataagttccggcagttcatgcagaactttagagaaatgtgcatagaacaggatggaagggtgcacttaaccgtggtgtattttgggaaggaggagatcaatgaggtgaaaggcattttggagaacactagtaaagcagccaattttcggaactttacctttattcaactaaacggcgagttcagcaggggcaaggggctcgacgtgggagctaggttctggaagggttctaacgtgctgctttttttttgtgacgtagatatatacttcacttccgaattcctcaacacttgcaggctgaacacacagcctggaaagaaagttttctatccagtgctgttcagtcagtacaatcctggtataatttatgggcatcacgacgcagtcccgcctttggagcaacagttggtgatcaaaaaggaaaccggattttggcgggacttcggctttggcatgacttgccagtacagatccgatttcattaatatcggcggtttcgatctggacataaaggggtggggaggcgaagatgtgcatctatatcggaagtatctccacagcaatcttatagtggtgcgtacccccgtcaggggccttttccacctctggcacgagaaaaggtgtatggatgagttaaccccggagcaatataagatgtgtatgcagagtaaagccatgaacgaagcgtcccacggccagctggggatgctggtctttcgccatgagattgaagcacatctgagaaagcagaagcagaaaacatccagtaagaaaacatag

SEQ ID NO: 48214 - DNA, 1599 bp, Artificial Sequence
  derived and/or modified sequence
atgatgatggtgaggagaggactcctcgcctggattagccgagtcgtggttttattggtgttgctttgttgtgctatcagcgtgttatacatgcttgcctgtacacccaagggcgacgaggaacaactggccctaccaagggccaattcaccgaccggtaaggaaggctaccaggctgtacttcaagaatgggaagagcagcatcggaactacgtgagcagcttgaaaagacaaatcgcccagttgaaggaggagcttcaagagagatccgagcagttacggaatgggcaatatcaagcttcggacgcagccggtcttggactagaccgctccccacctgagaagacgcaagctgatttgctggcgtttttacattcacaggtagacaaggctgaggtcaatgccggtgtcaagttggctaccgaatacgccgctgtgcctttcgattccttcacgctgcagaaagtttaccagctggagaccggactcactcgccatcccgaagaaaaacccgttaggaaagacaagagggatgagttggtcgaagccatcgagtctgccctcgaaacactgaattccccggctgagaactctccaaatcaccgtccctacaccgcttctgactttatagaaggcatctatcggactgagcgggacaaagggactctgtatgagctgactttcaagggggaccacaaacacgagttcaagagactcatcctgtttaggccctttggtccgatcatgaaagtaaagaacgaaaagctcaatatggccaacacccttatcaacgtaatagtgccactggccaaacgagtagataaattccgtcagtttatgcaaaattttagagaaatgtgtattgaacaggacgggagagtgcatcttaccgtggtttacttcgggaaagaggagatcaacgaggtgaaaggcattttagaaaacacttctaaagccgcaaattttcgtaatttcacatttattcaactcaacggcgagttcagcagaggaaaagggctggacgtcggcgcacgcttctggaaaggatctaatgtcttgttgtttttctgcgacgtggatatctatttcacctcagaattcctgaacacatgtagactgaatacgcagcccggaaagaaagtcttttatcctgtgctgttctcccagtataacccaggcatcatatatggccaccacgacgcagtgcctccactggaacagcagctggtgattaagaaagagactggcttttggagggatttcggcttcggcatgacctgtcagtatcggagcgacttcatcaatattggcggattcgacctggacatcaaggggtggggaggggaagatgtccatctttaccggaagtatttacacagcaacttaatcgtagtgaggacacccgtaagagggctctttcacctgtggcacgagaaacgttgcatggacgagctcacgccggagcagtataaaatgtgcatgcagagcaaggctatgaatgaagcctcccatggacagctcggcatgttggtctttcgacacgagatagaagcccacctcagaaagcagaagcaaaaaactagttcaaaaaagacgtag

SEQ ID NO: 48215 - DNA, 291 bp, Artificial Sequence
  derived and/or modified sequence
atgatgatggtcagaagagggctcctcgcctggatttccagggtggtggtcctcctggtcctcctgtgctgtgcaatatccgtgctgtatatgctggcatgcaccccgaagggcgatgaagaacagctggccttacccagggctaatagcccaacggggaaggaggggtatcaagcggtcctgcaggagtgggaggagcaacaccggaattatgtttcttctcttaaacgacagattgcacagctgaaagaggagctccaggaaaggagtgaacaactgcgtaacgggtag

SEQ ID NO: 48216 - DNA, 162 bp, Artificial Sequence
  derived and/or modified sequence
atgatgatggtaagaagggggcttctggcttggatcagcagagtggtcgtgctgcttgtcctgctttgctgtgccatctctgtgttatatatgctggcttgtaccccaaagggcgacgaagaacaattagctctgcctagagcaaacagccctacgggttag

SEQ ID NO: 48217 - DNA, 1599 bp, Artificial Sequence
  derived and/or modified sequence
atgatgatggtgagacgcggtctgctggcctggattagcagggtggtggtgctgctggtgctgctgtgctgtgctattagtgtgctgtacatgttggcttgcactccaaagggagatgaagagcagctggctttaccccgagctaacagtcctaccggtaaagaggggtaccaggctgttttacaagagtgggaagagcagcaccgcaattatgtttcatccctaaagaggcaaatcgctcagcttaaagaggaactgcaagagagaagcgagcaactgcggaatggacaataccaggcgagtgacgccgcaggattgggcttagatagatcaccccctgagaaaactcaggccgacttgttagcctttctccattcacaagtggacaaggccgaggtcaacgcgggagtgaaattggccaccgaatacgcagcagtccccttcgactcgttcacccttcagaaagtataccaacttgagacagggctcacaagacatccagaagagaagccagtgcggaaagacaaaagagacgagttggttgaagccatcgagagtgccctcgagacactgaactctcctgccgaaaattcgccaaaccatcgaccatataccgcgagtgattttatcgagggcatatatcggactgagcgagacaagggcacactgtacgaactaacttttaagggcgaccacaagcacgagttcaaacggttaatcctttttcgcccatttggcccaatcatgaaggtaaagaacgagaagttaaatatggctaatacactgatcaacgtgatcgtgccgctggctaagcgagttgacaaattccgacaatttatgcagaatttccgggagatgtgcatcgaacaggatggacgtgttcacctgactgttgtgtacttcggcaaggaagagattaacgaagtgaagggtatattagagaatacaagcaaagccgctaactttcggaacttcacttttatccagctgaacggcgagttttcccgcggaaaggggctcgatgtcggtgccaggttctggaagggttccaacgttcttctattcttctgtgacgtcgatatctacttcacctctgaattcttaaacacatgcagactgaacacacaacctggcaaaaaggtgttctaccctgtgctgttttcacaatataacccagggatcatatatggccatcatgacgcagtgccccctctagagcagcagctggtaatcaagaaagagactggattttggcgagatttcgggtttggaatgacatgccagtatcggagcgactttataaatattggcggatttgacctagacatcaaaggatgggggggtgaggacgtccatctgtacagaaagtatcttcactccaatctcattgttgtgcggactcctgtgagaggattgttccacctctggcacgagaagcgctgtatggatgaactgaccccagagcagtacaagatgtgtatgcagtctaaggcgatgaacgaagcctcacatggccaattaggcatgctggtttttcgacatgagatcgaggcccacttgagaaagcagaaacagaagaccagtagtaagaaaacgtag

SEQ ID NO: 48218 - DNA, 315 bp, Artificial Sequence
  derived and/or modified sequence
atgatgatggtgaggcggggattgctcgcatggatttcaagagtcgtcgttctcctcgttctgctgtgctgtgccatcagcgttttgtatatgctggcttgtacacccaagggagatgaggagcagctcgctctcccgcgagctaatagccccacaggcaaagagggttaccaggccgtgctgcaggagtgggaggagcaacatcgtaactacgtgtctagcctcaaacgtcagatcgcccagctgaaagaggaactgcaggagcggtcagaacagctgcgaaatggacagtaccaggcttccgacgccgcatag

SEQ ID NO: 48219 - DNA, 45 bp, Artificial Sequence
  derived and/or modified sequence
atgatgatggtgaggagggggctgctcgcgtggatttctcgatag

SEQ ID NO: 48220 - DNA, 1599 bp, Artificial Sequence
  derived and/or modified sequence
atgatgatggtccggagaggcttgctagcttggatcagcagagttgtagtgctcttggtccttttgtgttgtgccatctcagttctgtacatgttagcctgcactcctaaaggagatgaagaacagttggcactccccagagccaattcaccaaccgggaaagagggttatcaggccgtccttcaagaatgggaggaacagcaccggaattatgtgtcgagccttaagcgacaaatcgctcagctgaaagaggagctccaggagcggtctgaacagcttaggaacgggcagtaccaggccagtgacgccgcaggcctaggactcgatcgaagtccccctgagaaaactcaggccgacctgctggcatttctgcattcacaggtcgacaaagcagaagttaatgccggagtaaagctcgcaacggaatacgctgctgtgccatttgattcttttaccctccagaaggtctatcaactggaaaccgggttaacgcggcacccagaagaaaaacctgtgcggaaggacaagcgtgacgagctagttgaggctatcgagagtgccctcgagactctcaactcacccgctgaaaactcccctaatcaccggccttacactgcctctgattttatagaaggcatctaccgtaccgaaagagacaagggaactctgtacgaacttacgtttaaaggcgaccacaaacatgagtttaagagacttatactttttcgccctttcggtcccatcatgaaggtcaaaaacgagaagctgaatatggctaatacactcataaacgtgatcgtccccctggctaagcgagtcgacaaattccggcagttcatgcagaactttcgcgagatgtgtattgaacaggacggaagagtgcacttgaccgtcgtgtactttggcaaagaggagatcaacgaggtgaagggaatccttgagaacacctccaaggctgccaatttccggaactttaccttcatccagctcaatggtgagtttagcagaggaaagggcctggacgtgggtgccaggttttggaaggggtctaatgtgctcttgtttttttgcgatgtggacatttacttcacctccgaattcttgaatacatgccggctgaatacgcagcctggcaagaaggtgttttatcctgtgctgttttctcagtacaatccaggaattatctacgggcatcacgacgctgtgcccccattggaacagcagctagtcataaaaaaggaaacaggcttttggcgcgacttcggatttggaatgacatgccaatataggtcagacttcattaacatcggaggattcgatttagacatcaagggctggggcggtgaagacgtgcacctgtacagaaagtacctgcattccaacctcattgtagttcgaacaccagtgaggggcctattccacctctggcacgagaagaggtgtatggacgagcttaccccggaacagtataagatgtgcatgcaatcaaaggccatgaacgaggccagtcacggtcagctaggtatgcttgtgtttaggcacgagattgaggctcatttgaggaaacagaagcagaagacctcttcgaagaagacatag

SEQ ID NO: 48221 - protein, 435 aa, Artificial Sequence
  derived and/or modified sequence
MSASAVYVLDLKGKVLICRNYRGDVDMSEVEHFMPILMEKEEEGMLSPILAHGGVRFMWIKHNNLYLVATSKKNACVSLVFSFLYKVVQVFSEYFKELEEESIRDNFVIIYELLDELMDFGYPQTTDSKILQEYITQEGHKLETGAPRPPATVTNAVSWRSEGIKYRKNEVFLDVIESVNLLGKYPGVGWLGHTVSANGNVLRSEIVGSIKMRVFLSGMPELRLGLNDKVLFDNTGRGKSKSVELEDVKFHQCVRLSRFENDRTISFIPPDGEFELMSYRLNTHVKPLIWIESVIEKHSHSRIEYMIKAKSQFKRRSTANNVEIHIPVPNDADSPKFKTTVGSVKWVPENSEIVWSIKSFPGGKEYLMRAHFGLPSVEAEDKEGKPPISVKFEIPYFTTSGIQVRYLKIIEKSGYQALPWVRYITQNGDYQLRTQ

SEQ ID NO: 48222 - DNA, 2391 bp, Artificial Sequence
  derived and/or modified sequence
attcctgacagcacctcccggaccggacataacggtccccgcgcggctccccgaaccggaagtggaggtgagctgtcgcgggcggcgcccggccttgctcaacgcccagcagtccccaccgtcgctgccgccgccaccgccctcggccgctgccgaggcctcctgcagccatcatgtccgccagcgccgtctacgtgctggacctgaagggcaaggtgctcatctgccggaactaccgtggcgacgtggacatgtcagaggtggagcacttcatgcccatcctgatggagaaggaggaggaggggatgctgtcgcccatcctggcccacgggggggtccgtttcatgtggatcaaacacaacaacctgtatctggttgccacatccaagaagaacgcgtgcgtgtcgctggtcttttctttcctctataaggtggtgcaggtgttttccgagtacttcaaggagctggaggaggagagcatccgggacaactttgttatcatctacgagctgctggacgagctcatggacttcggctacccccagaccaccgacagcaagatcctgcaggagtacatcactcaggaaggccacaagctggaaacaggggccccgcggccaccagccaccgtcaccaacgcggtgtcctggcggtccgaaggcatcaagtatcggaagaatgaggtgttcttggacgtcatcgagtctgtcaacctcttgggtaaatacccaggagtgggatggctgggtcacacggtcagcgccaacggcaatgtcctgcgcagcgagatcgtgggctccatcaagatgcgagtcttcctctcgggcatgcccgagctgcgcctgggcctcaacgacaaggtcctctttgacaacacgggccgcggcaaaagcaaatccgtggagctggaggatgtgaagttccaccagtgtgtgcggctatcacgcttcgagaatgaccgcaccatctccttcatcccacccgacggcgagttcgagctcatgtcctaccgtctcaacacccacgtcaagcctttgatatggatcgagtcggtgatcgagaagcactcccacagccgcatcgagtacatgatcaaggccaaaagccagttcaagcggcggtcaacagccaacaacgtggagatccacattcccgtgcccaatgatgccgactcacccaagttcaagacgacggtggggagcgttaagtgggtccccgagaacagcgagatcgtgtggtccatcaagtccttcccgggcggcaaggagtacctgatgcgggcccacttcggcctgcctagtgtggaggccgaagacaaggagggcaagcccccgatcagtgtcaagttcgagatcccttacttcactacctccggcatccaggtgcgctacctgaagatcattgagaagagtgggtaccaggccctgccctgggtgcgttatatcacgcagaatggagattaccagctccggacccagtgaggggctgtcgcagccaacaccccggcctcggggctcctggtggcagcaccaggggacacacctgccaaacccaccagatggaggggccctccctggtctctggccaccctcccagcctctgcccagggacccctgccttccccaggccatctgctctgccgtcgacactcgtctcagaagcccctttcccagaagaggctggtcttcaagaagtctcgtttctttgcccctgaagtcagtttcaggggaaggatgtgaaatttttccgtgtagaggttacagccttttatgctgttgagctcccaggtaccaaaaagcttggccaacgcttgccagccagccagctgcaggtggcatctgccacgaaggaagcgccagcctcgccaggccagcaggggcgtcgttttgttgccattttgttgaacgttatgggtttatgggtgttcctggaacttgtctttgtgcattcgttgctgtttgtgttaccctcactgtccccatgtcccacccacgtcctacggcactcaggaagcacttggtgaggacgagccctcacccttcttgtcttccttcccggcagcgcccgcagcgggccatttacacgtcgaggctggcacctggcgcgctcgggggccactgtagcgtctgcctgctccctggactcgcaggcctcgcctgtggcgccttcccagggccagcctgggtcacgagatgctgtcactcagccagatcagtattgacccaccaggggaggtggggtttggtgagagacgccagcctcagactttttcccactgagggtccagagagcggggccacgtgtcacccacgtctgcgcttggtcacccgtcctccccaccctgtgtgtgtttatgtcatagttacattaaattccattcattgaatactc

SEQ ID NO: 48223 - DNA, 1308 bp, Artificial Sequence
  derived and/or modified sequence
atgagcgcatctgcagtgtacgtgctggacctgaaagggaaggttctgatctgccgcaattaccggggcgatgttgacatgtccgaagttgaacacttcatgccaatcctcatggagaaagaagaggaaggcatgttgtcccccattctagcgcatggcggagtgaggtttatgtggattaaacataacaatctctacctcgtggccacatcaaagaagaacgcttgcgtgagcctggttttcagcttcttgtataaggtggtccaggtattctctgaatatttcaaggagctggaagaggagtcgatcagagataattttgtcattatctatgagctattggacgagctgatggatttcggctacccccagactactgacagcaagatactgcaggagtacatcacccaggaaggccacaaattagagaccggggcccctaggcctcctgccactgttaccaacgcagtctcatggcgtagcgagggaataaagtacagaaagaatgaagtctttctggatgtgattgagtccgtgaacctgctgggaaaataccccggtgtgggctggctggggcatacagtgagcgccaacggtaacgtgttgcggtccgagattgtgggatcaattaagatgcgtgtcttcctgtcgggtatgcccgaacttcgcctggggctcaatgacaaagtgttgtttgacaacacaggcaggggcaaatcaaagtccgtggagctcgaggatgttaaattccaccaatgcgtaagactgagcagatttgagaacgatagaactatctcctttatcccaccggacggtgaatttgagctgatgtcataccgacttaacacccacgtgaagccactgatctggatcgagtctgtgattgaaaagcactctcatagtaggatcgagtacatgattaaagctaagagccagttcaaaaggcggagcactgctaataatgtcgaaatccacatccccgtgccgaacgatgcagacagtcccaaatttaaaactaccgtcggcagtgttaaatgggtcccagagaatagcgagatagtctggtctatcaaaagtttccccggcgggaaagagtacctgatgcgcgcacacttcggcttgccttcagtggaagccgaggacaaagagggcaagccgccgatctccgtcaaattcgaaataccttacttcaccacatccgggatacaagtgaggtacttgaagataattgagaagtctggataccaggccctgccatgggtgcgctacattactcagaatggcgactatcagctgcggacacagtag

SEQ ID NO: 48224 - DNA, 1308 bp, Artificial Sequence
  derived and/or modified sequence
atgtctgccagcgctgtgtatgtgctggacctgaagggcaaggtgctgatctgcaggaactacagaggagatgtggacatgtctgaggtggagcacttcatgcccatcctgatggagaaggaggaggagggcatgctgagccccatcctggcccacggcggcgtgcgcttcatgtggatcaagcacaacaacctgtacctggtggccaccagcaagaagaatgcctgtgtgtccctggtgttctccttcctgtacaaggtggtgcaggtgttcagcgagtacttcaaggagctggaggaggagagcatccgggacaactttgtgatcatctatgagctgctggatgagctgatggactttggctacccccagaccacagacagcaagatcctgcaggagtacatcacccaggagggccacaagctggagaccggggccccccggcccccagccaccgtgaccaatgctgtgtcctggaggtctgagggcatcaagtacaggaagaatgaggtgttcctggatgtgattgagagcgtgaacctgctgggcaagtacccaggagtgggctggctgggccacacagtgtctgccaatggaaatgtgctgcggtctgagatcgtgggcagcatcaagatgagggtcttcctgagcggcatgcctgagctgcggctgggcctgaatgacaaggtgctgtttgacaacacaggccggggcaagagcaagtctgtggagctggaggatgtgaagttccaccagtgtgtgcggctgagcagatttgaaaatgacaggaccatctccttcatccccccagatggagaatttgagctgatgagctaccgcctgaacacccacgtgaagcccctcatctggattgaatctgtgattgagaagcacagccacagcagaattgagtacatgatcaaggccaagagccagttcaagagaagaagcacagccaacaacgtggagatccacatccctgtgcccaatgatgctgacagccccaagttcaagaccaccgtgggctctgtgaagtgggtgcctgaaaattctgaaattgtgtggagcatcaagagcttccctgggggcaaggagtacctgatgagggcccacttcggcctgcccagcgtggaggccgaggacaaggagggcaagccacccatctctgtgaagtttgagatcccctacttcaccaccagcggcatccaggtgcgctacctgaagatcatcgagaagagcggctaccaggccctgccctgggtgcgctacatcacccagaatggagactaccagctgcggacccagtag

SEQ ID NO: 48225 - DNA, 1308 bp, Artificial Sequence
  derived and/or modified sequence
atgagcgccagcgccgtgtacgtgctggacctgaagggcaaggtgctgatctgtaggaattaccggggagacgtcgacatgtcagaagtcgagcacttcatgccaattctaatggaaaaggaagaggaaggcatgttgtccccaatactggcccatgggggcgtgaggtttatgtggatcaaacacaataacctttacctcgttgccacatcgaaaaagaacgcgtgtgtcagcctggtattttccttcttgtacaaagtggtgcaagtcttctccgaatactttaaagagctcgaagaggagtcgataagggataacttcgtgatcatatacgagctgctcgacgagctaatggatttcggatacccacagaccacagattccaagattctgcaagagtatatcacccaggaaggtcacaagctcgaaacaggagcccctagaccccctgctaccgtgacaaacgcggtgagctggcgttccgagggaatcaaatacaggaaaaacgaggtcttcctggacgttatcgagagtgtcaatctgctgggtaaataccctggagttgggtggctcgggcacacggtatccgctaacggtaatgtgctgaggtctgagattgtgggttctattaaaatgagagttttcttgtcagggatgccagagctcaggctagggctgaatgataaagttttgtttgacaacaccggccggggaaaaagcaagtcggtcgagcttgaggacgtcaagtttcaccagtgcgtccggctctctcgattcgagaatgatcggacaatcagttttattcccccagatggcgaatttgagttgatgtcctatagactgaatactcatgtcaaacccttgatctggatcgaatccgttatagagaagcacagtcattctcgcatcgaatacatgatcaaagctaagagtcaattcaaaagaaggagcaccgccaacaatgtggaaatccacatccctgtcccaaacgacgcagatagccctaaattcaagactaccgtggggtccgtaaagtgggtgccagagaactctgagatagtgtggtcaattaaaagcttcccaggtggtaaagagtatctgatgcgcgcccacttcggcttaccgagcgtagaggccgaggacaaggagggcaagcccccaatttccgttaagtttgagattccgtacttcaccacatccgggatacaggtccgatacctgaaaatcattgagaaaagcggctatcaggcgcttccatgggtgcggtatattactcagaacggcgactatcagctccgcacccaatag

SEQ ID NO: 48226 - DNA, 1308 bp, Artificial Sequence
  derived and/or modified sequence
atgtccgcctcagccgtctatgttttggatctcaaaggtaaggtactgatctgccgtaattatcgcggtgatgtggacatgtctgaggtggagcacttcatgcctattttgatggaaaaggaagaggaaggcatgctgtctccaatcttggctcatggcggagtcagattcatgtggataaaacacaataatctctatctggtggctacatcgaaaaaaaatgcatgcgtcagtttggtatttagtttcctgtacaaggtcgttcaggtgtttagcgagtacttcaaagaattggaagaggaaagcatccgggacaactttgtgattatttacgagttgttagacgagctgatggatttcggatatccacaaactaccgattccaagatactccaggaatacattacccaggaaggtcataaactcgagacaggcgcaccgaggcctcctgccaccgtcactaatgccgtgtcatggcgatcagaggggattaagtaccgcaagaatgaagtgttcctggacgtgatcgagagcgtgaatctgctgggcaaatacccgggtgtaggatggcttggacacaccgtctccgcaaatgggaacgtccttagatccgaaatagtagggtctattaaaatgagggtgtttctttcgggcatgcccgagctgcgtctgggtctgaacgacaaggttctctttgataataccggccgaggaaagtctaaatctgtggagcttgaggacgtgaagtttcaccagtgtgtgagactgagcagatttgagaacgaccgcactatcagcttcattcctccagacggcgagttcgaactgatgtcgtaccggctaaatactcacgtaaaaccactgatctggattgagtctgtgatcgagaagcatagccattcccggatcgagtatatgatcaaagccaagtcgcagtttaaaagacgttcgaccgccaacaacgtggagatccatatccccgtccctaacgacgccgattcccccaaatttaagactactgttggcagtgtgaagtgggtacctgaaaactcagagatcgtatggagtataaaatcctttcccggaggtaaggagtatcttatgagagcgcacttcggactgccctctgtggaggcagaggacaaagaaggaaaacccccaatcagtgtaaaattcgaaatcccgtacttcaccacttctggcatccaggtacgatacctgaagattattgagaaatctggttatcaggcactgccctgggtgcggtacattactcagaacggcgactaccagctcaggacacagtag

SEQ ID NO: 48227 - DNA, 1308 bp, Artificial Sequence
  derived and/or modified sequence
atgagcgccagcgccgtgtacgtgctggacctgaagggcaaggtgctgatctgcagaaactacagaggcgacgtggacatgagcgaggtggagcacttcatgcccatcctgatggagaaggaggaggagggcatgctgagccccatcctggcccacggcggcgtgagattcatgtggatcaagcacaacaacctgtacctggtggccaccagcaagaagaacgcctgcgtgagcctggtgttcagcttcctgtacaaggtggtgcaggtgttcagcgagtacttcaaggagctggaggaggagagcatcagagacaacttcgtgatcatctacgagctgctggacgagctgatggacttcggctacccccagaccaccgacagcaagatcctgcaggagtacatcacccaggagggccacaagctggagaccggcgcccccagaccccccgccaccgtgaccaacgccgtgagctggagaagcgagggcatcaagtacagaaagaacgaggtgttcctggacgtgatcgagagcgtgaacctgctgggcaagtaccccggcgtgggctggctgggccacaccgtgagcgccaacggcaacgtgctgagaagcgagatcgtgggcagcatcaagatgagagtgttcctgagcggcatgcccgagctgagactgggcctgaacgacaaggtgctgttcgacaacaccggcagaggcaagagcaagagcgtggagctggaggacgtgaagttccaccagtgcgtgagactgagcagattcgagaacgacagaaccatcagcttcatcccccccgacggcgagttcgagctgatgagctacagactgaacacccacgtgaagcccctgatctggatcgagagcgtgatcgagaagcacagccacagcagaatcgagtacatgatcaaggccaagagccagttcaagagaagaagcaccgccaacaacgtggagatccacatccccgtgcccaacgacgccgacagccccaagttcaagaccaccgtgggcagcgtgaagtgggtgcccgagaacagcgagatcgtgtggagcatcaagagcttccccggcggcaaggagtacctgatgagagcccacttcggcctgcccagcgtggaggccgaggacaaggagggcaagccccccatcagcgtgaagttcgagatcccctacttcaccaccagcggcatccaggtgagatacctgaagatcatcgagaagagcggctaccaggccctgccctgggtgagatacatcacccagaacggcgactaccagctgagaacccagtag

SEQ ID NO: 48228 - protein, 1068 aa, Artificial Sequence
  derived and/or modified sequence
SLKDELSDVSQGGSKATTPASTANSDVATIPTDTPLKEENEGFVKVTDAPNKSEISKHIEVQVAQETRNVSTGSAENEEKSEVQAIIESTPELDMDKDLSGYKGSSTPTKGIENKAFDRNTESLFEELSSAGSGLIGDVDEGADLLGMGREVENLILENTQLLETKNALNIVKNDLIAKVDELTCEKDVLQGELEAVKQAKLKLEEKNRELEEELRKARAEAEDARQKAKDDDDSDIPTAQRKRFTRVEMARVLMERNQYKERLMELQEAVRWTEMIRASRENPAMQEKKRSSIWQFVPTRFSRLFSSSSNTTKKPEPPVNLKYNAPTSHVTPSVKKRSSTLSQLPGDKSKAFDFLSEETEASLASRREQKREQYRQVKAHVQKEDGRVQAFGWSLPQKYKQVTNGQGENKMKNLPVPVYLRPLDEKDTSMKKLWCAVGVNLSGGKTRDGGSVVGASVFYKDVAGLDTEGSKQRSASQSSLDKLDQELKEQQKELKNQEELSSLVWICTSTHSATKVLIIDAVQPGNILDSFTVCNSHVLCIASVPGARETDYPAGEDLSESGQVDKASLCGSMTSNSSAETDSLLGGITVVGCSAEGVTGAATSPSTNGASPVMDKPPEMEAENSEVDENVPTAEEATEATEGNAGSAEDTVDISQTGVYTEHVFTDPLGVQIPEDLSPVYQSSNDSDAYKDQISVLPNEQDLVREEAQKMSSLLPTMWLGAQNGCLYVHSSVAQWRKCLHSIKLKDSILSIVHVKGIVLVALADGTLAIFHRGVDGQWDLSNYHLLDLGRPHHSIRCMTVVHDKVWCGYRNKIYVVQPKAMKIEKSFDAHPRKESQVRQLAWVGDGVWVSIRLDSTLRLYHAHTYQHLQDVDIEPYVSKMLGTGKLGFSFVRITALMVSCNRLWVGTGNGVIISIPLTETNKTSGVPGNRPGSVIRVYGDENSDKVTPGTFIPYCSMAHAQLCFHGHRDAVKFFVAVPGQVISPQSSSSGTDLTGDKAGPSAQEPGSQTPLKSMLVISGGEGYIDFRMGDEGGESELLGEDLPLEPSVTKAERSHLIVWQVMYGNE

SEQ ID NO: 48229 - protein, 1311 aa, Artificial Sequence
  derived and/or modified sequence
MELEDGVVYQEEPGGSGAVMSERVSGLAGSIYREFERLIGRYDEEVVKELMPLVVAVLENLDSVFAQDQEHQVELELLRDDNEQLITQYEREKALRKHAEEKFIEFEDSQEQEKKDLQTRVESLESQTRQLELKAKNYADQISRLEEREAELKKEYNALHQRHTEMIHNYMEHLERTKLHQLSGSDQLESTAHSRIRKERPISLGIFPLPAGDGLLTPDAQKGGETPGSEQWKFQELSQPRSHTSLKDELSDVSQGGSKATTPASTANSDVATIPTDTPLKEENEGFVKVTDAPNKSEISKHIEVQVAQETRNVSTGSAENEEKSEVQAIIESTPELDMDKDLSGYKGSSTPTKGIENKAFDRNTESLFEELSSAGSGLIGDVDEGADLLGMGREVENLILENTQLLETKNALNIVKNDLIAKVDELTCEKDVLQGELEAVKQAKLKLEEKNRELEEELRKARAEAEDARQKAKDDDDSDIPTAQRKRFTRVEMARVLMERNQYKERLMELQEAVRWTEMIRASRENPAMQEKKRSSIWQFVPTRFSRLFSSSSNTTKKPEPPVNLKYNAPTSHVTPSVKKRSSTLSQLPGDKSKAFDFLSEETEASLASRREQKREQYRQVKAHVQKEDGRVQAFGWSLPQKYKQVTNGQGENKMKNLPVPVYLRPLDEKDTSMKLWCAVGVNLSGGKTRDGGSVVGASVFYKDVAGLDTEGSKQRSASQSSLDKLDQELKEQQKELKNQEELSSLVWICTSTHSATKVLIIDAVQPGNILDSFTVCNSHVLCIASVPGARETDYPAGEDLSESGQVDKASLCGSMTSNSSAETDSLLGGITVVGCSAEGVTGAATSPSTNGASPVMDKPPEMEAENSEVDENVPTAEEATEATEGNAGSAEDTVDISQTGVYTEHVFTDPLGVQIPEDLSPVYQSSNDSDAYKDQISVLPNEQDLVREEAQKMSSLLPTMWLGAQNGCLYVHSSVAQWRKCLHSIKLKDSILSIVHVKGIVLVALADGTLAIFHRGVDGQWDLSNYHLLDLGRPHHSIRCMTVVHDKVWCGYRNKIYVVQPKAMKIEKSFDAHPRKESQVRQLAWVGDGVWVSIRLDSTLRLYHAHTYQHLQDVDIEPYVSKMLGTGKLGFSFVRITALMVSCNRLWVGTGNGVIISIPLTETNKTSGVPGNRPGSVIRVYGDENSDKVTPGTFIPYCSMAHAQLCFHGHRDAVKFFVAVPGQVISPQSSSSGTDLTGDKAGPSAQEPGSQTPLKSMLVISGGEGYIDFRMGDEGGESELLGEDLPLEPSVTKAERSHLIVWQVMYGNE

SEQ ID NO: 48230 - DNA, 3207 bp, Artificial Sequence
  derived and/or modified sequence
agcctgaaggacgagctgagcgacgtgagccagggcggcagcaaggccaccacccccgccagcaccgccaacagcgacgtggccaccatccccaccgacacccccctgaaggaggagaacgagggcttcgtgaaggtgaccgacgcccccaacaagagcgagatcagcaagcacatcgaggtgcaggtggcccaggagaccagaaacgtgagcaccggcagcgccgagaacgaggagaagagcgaggtgcaggccatcatcgagagcacccccgagctggacatggacaaggacctgagcggctacaagggcagcagcacccccaccaagggcatcgagaacaaggccttcgacagaaacaccgagagcctgttcgaggagctgagcagcgccggcagcggcctgatcggcgacgtggacgagggcgccgacctgctgggcatgggcagagaggtggagaacctgatcctggagaacacccagctgctggagaccaagaacgccctgaacatcgtgaagaacgacctgatcgccaaggtggacgagctgacctgcgagaaggacgtgctgcagggcgagctggaggccgtgaagcaggccaagctgaagctggaggagaagaacagagagctggaggaggagctgagaaaggccagagccgaggccgaggacgccagacagaaggccaaggacgacgacgacagcgacatccccaccgcccagagaaagagattcaccagagtggagatggccagagtgctgatggagagaaaccagtacaaggagagactgatggagctgcaggaggccgtgagatggaccgagatgatcagagccagcagagagaaccccgccatgcaggagaagaagagaagcagcatctggcagttcgtgcccaccagattcagcagactgttcagcagcagcagcaacaccaccaagaagcccgagccccccgtgaacctgaagtacaacgcccccaccagccacgtgacccccagcgtgaagaagagaagcagcaccctgagccagctgcccggcgacaagagcaaggccttcgacttcctgagcgaggagaccgaggccagcctggccagcagaagagagcagaagagagagcagtacagacaggtgaaggcccacgtgcagaaggaggacggcagagtgcaggccttcggctggagcctgccccagaagtacaagcaggtgaccaacggccagggcgagaacaagatgaagaacctgcccgtgcccgtgtacctgagacccctggacgagaaggacaccagcatgaagaagctgtggtgcgccgtgggcgtgaacctgagcggcggcaagaccagagacggcggcagcgtggtgggcgccagcgtgttctacaaggacgtggccggcctggacaccgagggcagcaagcagagaagcgccagccagagcagcctggacaagctggaccaggagctgaaggagcagcagaaggagctgaagaaccaggaggagctgagcagcctggtgtggatctgcaccagcacccacagcgccaccaaggtgctgatcatcgacgccgtgcagcccggcaacatcctggacagcttcaccgtgtgcaacagccacgtgctgtgcatcgccagcgtgcccggcgccagagagaccgactaccccgccggcgaggacctgagcgagagcggccaggtggacaaggccagcctgtgcggcagcatgaccagcaacagcagcgccgagaccgacagcctgctgggcggcatcaccgtggtgggctgcagcgccgagggcgtgaccggcgccgccaccagccccagcaccaacggcgccagccccgtgatggacaagccccccgagatggaggccgagaacagcgaggtggacgagaacgtgcccaccgccgaggaggccaccgaggccaccgagggcaacgccggcagcgccgaggacaccgtggacatcagccagaccggcgtgtacaccgagcacgtgttcaccgaccccctgggcgtgcagatccccgaggacctgagccccgtgtaccagagcagcaacgacagcgacgcctacaaggaccagatcagcgtgctgcccaacgagcaggacctggtgagagaggaggcccagaagatgagcagcctgctgcccaccatgtggctgggcgcccagaacggctgcctgtacgtgcacagcagcgtggcccagtggagaaagtgcctgcacagcatcaagctgaaggacagcatcctgagcatcgtgcacgtgaagggcatcgtgctggtggccctggccgacggcaccctggccatcttccacagaggcgtggacggccagtgggacctgagcaactaccacctgctggacctgggcagaccccaccacagcatcagatgcatgaccgtggtgcacgacaaggtgtggtgcggctacagaaacaagatctacgtggtgcagcccaaggccatgaagatcgagaagagcttcgacgcccaccccagaaaggagagccaggtgagacagctggcctgggtgggcgacggcgtgtgggtgagcatcagactggacagcaccctgagactgtaccacgcccacacctaccagcacctgcaggacgtggacatcgagccctacgtgagcaagatgctgggcaccggcaagctgggcttcagcttcgtgagaatcaccgccctgatggtgagctgcaacagactgtgggtgggcaccggcaacggcgtgatcatcagcatccccctgaccgagaccaacaagaccagcggcgtgcccggcaacagacccggcagcgtgatcagagtgtacggcgacgagaacagcgacaaggtgacccccggcaccttcatcccctactgcagcatggcccacgcccagctgtgcttccacggccacagagacgccgtgaagttcttcgtggccgtgcccggccaggtgatcagcccccagagcagcagcagcggcaccgacctgaccggcgacaaggccggccccagcgcccaggagcccggcagccagacccccctgaagagcatgctggtgatcagcggcggcgagggctacatcgacttcagaatgggcgacgagggcggcgagagcgagctgctgggcgaggacctgcccctggagcccagcgtgaccaaggccgagagaagccacctgatcgtgtggcaggtgatgtacggcaacgagtag

SEQ ID NO: 48231 - DNA, 3936 bp, Artificial Sequence
  derived and/or modified sequence
atggagctggaggacggcgtggtgtaccaggaggagcccggcggcagcggcgccgtgatgagcgagagagtgagcggcctggccggcagcatctacagagagttcgagagactgatcggcagatacgacgaggaggtggtgaaggagctgatgcccctggtggtggccgtgctggagaacctggacagcgtgttcgcccaggaccaggagcaccaggtggagctggagctgctgagagacgacaacgagcagctgatcacccagtacgagagagagaaggccctgagaaagcacgccgaggagaagttcatcgagttcgaggacagccaggagcaggagaagaaggacctgcagaccagagtggagagcctggagagccagaccagacagctggagctgaaggccaagaactacgccgaccagatcagcagactggaggagagagaggccgagctgaagaaggagtacaacgccctgcaccagagacacaccgagatgatccacaactacatggagcacctggagagaaccaagctgcaccagctgagcggcagcgaccagctggagagcaccgcccacagcagaatcagaaaggagagacccatcagcctgggcatcttccccctgcccgccggcgacggcctgctgacccccgacgcccagaagggcggcgagacccccggcagcgagcagtggaagttccaggagctgagccagcccagaagccacaccagcctgaaggacgagctgagcgacgtgagccagggcggcagcaaggccaccacccccgccagcaccgccaacagcgacgtggccaccatccccaccgacacccccctgaaggaggagaacgagggcttcgtgaaggtgaccgacgcccccaacaagagcgagatcagcaagcacatcgaggtgcaggtggcccaggagaccagaaacgtgagcaccggcagcgccgagaacgaggagaagagcgaggtgcaggccatcatcgagagcacccccgagctggacatggacaaggacctgagcggctacaagggcagcagcacccccaccaagggcatcgagaacaaggccttcgacagaaacaccgagagcctgttcgaggagctgagcagcgccggcagcggcctgatcggcgacgtggacgagggcgccgacctgctgggcatgggcagagaggtggagaacctgatcctggagaacacccagctgctggagaccaagaacgccctgaacatcgtgaagaacgacctgatcgccaaggtggacgagctgacctgcgagaaggacgtgctgcagggcgagctggaggccgtgaagcaggccaagctgaagctggaggagaagaacagagagctggaggaggagctgagaaaggccagagccgaggccgaggacgccagacagaaggccaaggacgacgacgacagcgacatccccaccgcccagagaaagagattcaccagagtggagatggccagagtgctgatggagagaaaccagtacaaggagagactgatggagctgcaggaggccgtgagatggaccgagatgatcagagccagcagagagaaccccgccatgcaggagaagaagagaagcagcatctggcagttcgtgcccaccagattcagcagactgttcagcagcagcagcaacaccaccaagaagcccgagccccccgtgaacctgaagtacaacgcccccaccagccacgtgacccccagcgtgaagaagagaagcagcaccctgagccagctgcccggcgacaagagcaaggccttcgacttcctgagcgaggagaccgaggccagcctggccagcagaagagagcagaagagagagcagtacagacaggtgaaggcccacgtgcagaaggaggacggcagagtgcaggccttcggctggagcctgccccagaagtacaagcaggtgaccaacggccagggcgagaacaagatgaagaacctgcccgtgcccgtgtacctgagacccctggacgagaaggacaccagcatgaagctgtggtgcgccgtgggcgtgaacctgagcggcggcaagaccagagacggcggcagcgtggtgggcgccagcgtgttctacaaggacgtggccggcctggacaccgagggcagcaagcagagaagcgccagccagagcagcctggacaagctggaccaggagctgaaggagcagcagaaggagctgaagaaccaggaggagctgagcagcctggtgtggatctgcaccagcacccacagcgccaccaaggtgctgatcatcgacgccgtgcagcccggcaacatcctggacagcttcaccgtgtgcaacagccacgtgctgtgcatcgccagcgtgcccggcgccagagagaccgactaccccgccggcgaggacctgagcgagagcggccaggtggacaaggccagcctgtgcggcagcatgaccagcaacagcagcgccgagaccgacagcctgctgggcggcatcaccgtggtgggctgcagcgccgagggcgtgaccggcgccgccaccagccccagcaccaacggcgccagccccgtgatggacaagccccccgagatggaggccgagaacagcgaggtggacgagaacgtgcccaccgccgaggaggccaccgaggccaccgagggcaacgccggcagcgccgaggacaccgtggacatcagccagaccggcgtgtacaccgagcacgtgttcaccgaccccctgggcgtgcagatccccgaggacctgagccccgtgtaccagagcagcaacgacagcgacgcctacaaggaccagatcagcgtgctgcccaacgagcaggacctggtgagagaggaggcccagaagatgagcagcctgctgcccaccatgtggctgggcgcccagaacggctgcctgtacgtgcacagcagcgtggcccagtggagaaagtgcctgcacagcatcaagctgaaggacagcatcctgagcatcgtgcacgtgaagggcatcgtgctggtggccctggccgacggcaccctggccatcttccacagaggcgtggacggccagtgggacctgagcaactaccacctgctggacctgggcagaccccaccacagcatcagatgcatgaccgtggtgcacgacaaggtgtggtgcggctacagaaacaagatctacgtggtgcagcccaaggccatgaagatcgagaagagcttcgacgcccaccccagaaaggagagccaggtgagacagctggcctgggtgggcgacggcgtgtgggtgagcatcagactggacagcaccctgagactgtaccacgcccacacctaccagcacctgcaggacgtggacatcgagccctacgtgagcaagatgctgggcaccggcaagctgggcttcagcttcgtgagaatcaccgccctgatggtgagctgcaacagactgtgggtgggcaccggcaacggcgtgatcatcagcatccccctgaccgagaccaacaagaccagcggcgtgcccggcaacagacccggcagcgtgatcagagtgtacggcgacgagaacagcgacaaggtgacccccggcaccttcatcccctactgcagcatggcccacgcccagctgtgcttccacggccacagagacgccgtgaagttcttcgtggccgtgcccggccaggtgatcagcccccagagcagcagcagcggcaccgacctgaccggcgacaaggccggccccagcgcccaggagcccggcagccagacccccctgaagagcatgctggtgatcagcggcggcgagggctacatcgacttcagaatgggcgacgagggcggcgagagcgagctgctgggcgaggacctgcccctggagcccagcgtgaccaaggccgagagaagccacctgatcgtgtggcaggtgatgtacggcaacgagtag

SEQ ID NO: 48232 - DNA, 3207 bp, Artificial Sequence
  derived and/or modified sequence
tcactgaaagacgagctttcggatgtgtcccagggcggctctaaggccacaacgcctgcgtctacagctaacagcgacgtcgccacaattccaacggatacacctctcaaagaggagaatgaaggtttcgtgaaagttaccgacgccccgaataagtcagagatctccaaacacatcgaagtacaggtggctcaggaaacccggaatgtctctacaggcagcgctgaaaatgaggaaaaaagcgaagttcaggccatcattgaatccactccagagctggacatggataaagacctgtccggctacaaagggtctagtacccccacaaaggggattgaaaacaaggcgtttgatcgtaacaccgaaagtttgttcgaggaactctccagcgcaggcagcggactgattggcgacgtagatgagggcgctgacttgctcgggatggggagggaagtagagaacctgatattagagaatacacagctgttggagactaagaacgcactgaacattgtgaagaatgatctgattgccaaggtggacgagctaacttgtgagaaggacgtactacaaggggaacttgaggcggttaagcaggccaaactcaagcttgaggaaaaaaatcgggagctagaagaagaactccgcaaggcccgcgctgaagctgaggacgcccgccagaaagccaaggacgacgatgactcagatatccccacagctcaacggaagaggtttacacgggtggagatggctcgcgtgcttatggaacggaatcagtataaggaacgtctcatggagctacaggaggccgttagatggactgaaatgatcagggcctcgagggagaaccccgccatgcaggagaagaaacgaagcagtatctggcagttcgtccccacccgctttagtagactgttctcctcttctagcaataccactaagaaaccagagccccctgtgaacctgaaatataacgctcccaccagccacgtgaccccatcggtgaagaagcgcagtagtacgctatcgcagcttccaggcgacaagtctaaggccttcgatttcctgagcgaggagacagaggccagcttagcatctcgccgggagcaaaaacgcgagcaataccgacaggtgaaagctcacgtgcagaaggaagacgggcgcgtccaggcctttggttggtctttgcctcagaaatataaacaggtgacgaacggacaaggtgaaaataaaatgaaaaatttgcctgtgccagtatatcttcgccctttagacgagaaggacaccagtatgaaaaagctctggtgcgctgtaggcgttaacctctcaggaggaaagacccgtgacggagggtcagtggtcggcgctagtgtgttttacaaggatgttgccggccttgacactgaggggtctaaacagcgatctgcctctcaatcttctctagataaattggatcaggaactcaaggaacagcagaaggaattgaaaaaccaggaggagctcagcagcctggtgtggatctgtacatccacacacagtgcaacaaaagttctcatcattgacgccgtacagccaggtaacatccttgatagcttcaccgtgtgtaactcacatgtactgtgtatcgcaagcgtgccaggggctcgggagacggactatccagcaggggaagacctgtcagaaagcggacaagtagacaaggccagcctgtgtggcagtatgacaagcaactcctcggctgagacggattccctgcttggcggtatcacagttgtcggatgcagcgcagaaggagtcaccggagctgcgacaagccccagtaccaatggggcaagtcccgtgatggacaaaccccccgaaatggaggccgagaatagtgaggtggacgagaatgttcccacagctgaggaggccaccgaagccacagaaggcaatgccggcagcgccgaagacactgtagatattagccagacaggggtctatacagagcacgtattcactgatcctctgggggtccaaatccctgaagacctgagtcccgtgtatcaaagctctaacgacagcgatgcctacaaagatcagatttccgtgctgcctaacgagcaggatctagtgcgagaagaggctcagaaaatgagcagtctactgcctactatgtggttgggagcccagaacggctgtctttacgttcactcaagtgtcgcccagtggcgcaaatgtctacactcaattaagttgaaagatagcatcctgagtattgtgcacgttaaaggcatcgtactggtggcactggccgacggaaccctcgcgatctttcacaggggagtggacgggcagtgggatttgtcgaattaccacttactggatttggggcgcccacatcattcaatacgatgcatgaccgtggtgcatgataaggtgtggtgtggctacaggaataagatctacgttgtgcagcctaaggcaatgaagattgagaagagtttcgacgctcatcctcggaaggagtcacaagtgcgccaacttgcctgggtgggggacggcgtgtgggtgagcattcgactcgattcaacactgcgactgtaccacgcccacacctaccagcaccttcaggacgtggatattgagccttatgtttcaaaaatgctgggcacagggaaactcgggttctcttttgtccggataaccgcattaatggtgtcgtgcaacagactatgggtggggaccggtaatggcgtgatcatctcaataccgctgaccgaaactaataagacatctggggttccggggaaccgacccggatccgtcattcgcgtttatggagacgagaactctgataaagtaacacccgggactttcatcccctactgttctatggcacatgcccagttgtgcttccacggacatagggacgctgtcaaattctttgtcgccgtgcctggtcaggtcatatcaccccagagtagcagtagcggaacagacttgacgggggataaagcggggccttctgctcaggagcctggctcacagactcctctaaagtccatgttggtgatcagcggaggggaaggttatatagacttccgtatgggggatgaaggcggagaatccgagctattaggcgaggatttgccactcgagccatccgtgacgaaagcggagcgcagccatctgatcgtgtggcaggtgatgtacgggaatgagtag

SEQ ID NO: 48233 - DNA, 3936 bp, Artificial Sequence
  derived and/or modified sequence
atggagctggaagacggcgtcgtctatcaagaggagcccggaggatccggcgcggtaatgtccgagcgagtgtctgggcttgcaggctcaatctatcgggagtttgaacgactcattgggaggtatgacgaggaggtggtcaaagagctgatgcctctggttgtagcggtgctggagaacctggacagtgtcttcgcacaggaccaggagcatcaggttgagctcgaattgttacgtgacgataatgagcagctgattacccagtatgagcgagagaaggcgctcaggaagcacgctgaggagaagtttattgagtttgaggactctcaggaacaagaaaagaaggacctacagaccagagtagaaagtctggaatctcagactcgacagctagagttgaaggccaagaactatgcggatcagatctccaggttagaagagcgagaggccgagctcaaaaaagagtataacgccctccaccagagacacacagagatgatacacaattacatggagcatcttgaacgaacaaaactccaccagctcagcggtagcgatcagttggagagtaccgcacactcgagaattaggaaggaaaggcctatatcacttggtatttttccgcttcctgctggcgatgggttacttactcccgatgctcagaagggcggtgaaacccccgggtcggagcagtggaagtttcaggaactaagccagcctaggtcccataccagcctcaaggacgaactgtccgatgtcagccaagggggctcaaaggctaccacgcctgctagcacagctaactctgatgtggctactatcccgacggatactccactgaaggaagaaaacgaaggatttgtaaaggtaaccgacgcgccaaacaaatctgaaatatctaagcacatagaggttcaggtcgcgcaagagacacgtaatgtctccaccggatctgccgagaacgaagagaagtccgaagtccaggctatcatcgagtccacgccagaactggatatggataaggacttaagcggatacaaagggagtagcacacctaccaaagggatcgagaataaggcattcgaccgtaatacagagtcattgtttgaggaactctcatccgctggtagcgggttaatcggcgatgtggatgagggtgccgatctgttgggtatggggcgcgaagtcgaaaaccttatcttggaaaacactcaattattggaaacaaagaatgccctaaatatcgtcaagaacgatttaatcgccaaggtagacgagctgacctgtgaaaaagacgtgctgcagggagaactagaagcagtgaagcaggccaaacttaaactcgaggagaaaaaccgcgagctagaggaagaactgagaaaggcaagagctgaagctgaggatgcacgccagaaggctaaagatgacgatgacagtgacatcccaaccgcgcagagaaagagatttacacgggtcgagatggctagggtgctcatggagaggaaccagtataaagaaagattgatggagctgcaggaagccgtgaggtggactgagatgatacgggcgtctcgggaaaaccccgccatgcaggagaaaaagcggagctccatttggcaattcgttcctaccaggttttcccgcttgttctcttctagctctaatacgaccaagaagcctgaacctcccgtgaatttgaagtataatgctcctactagtcacgtgacccctagtgtgaagaagcgatcaagcacactgagccaactgcctggcgacaagagtaaggcattcgatttcctctcggaagaaacagaagccagtctagccagtagacgcgaacaaaagcgcgaacagtatcggcaggtgaaggcccatgtccagaaggaagatggtcgcgtgcaggccttcggctggagcctacctcaaaagtataagcaagtcacaaacggacaaggagagaacaagatgaaaaaccttcctgtgccagtctaccttagacctctggatgaaaaagatacttctatgaagttatggtgtgccgtcggtgtaaacctctcaggaggcaagactagggatggcggcagcgtggtgggggccagtgtgttctataaggacgtcgccggcctggatacagaaggaagtaagcaacgatccgcgtcccagtcaagtctcgataagttagaccaagaactcaaggagcagcagaaggagctgaagaaccaggaggagttgagcagcttagtatggatctgtacttccactcatagtgctaccaaagtgcttattatcgatgcggttcaaccaggaaacattctggatagctttactgtttgcaacagccacgtcctgtgcatagccagcgtgcccggggcacgtgaaacggactaccccgccggtgaagatctgtccgaatccgggcaggtcgataaggctagcttatgcggttctatgacaagcaattcgagcgcagagaccgattccctgctgggaggtatcacagtcgtcggttgtagcgccgagggcgtcaccggtgccgccacttctccttcaactaacggcgcctccccagtgatggacaagccaccagagatggaggctgagaattccgaggtcgatgaaaacgtgcctaccgcagaagaagcaacagaagctacagaaggtaacgctggctctgcagaagatacggtagacatatcccagacgggggtttacactgaacacgtctttacggatccgctcggggtccagatccccgaggatctctcacccgtctatcagagctccaacgattcagacgcttataaggaccagatatccgttctgcccaacgaacaggacttggtcagagaagaggctcagaaaatgagcagcctacttcctacgatgtggctgggtgctcagaacgggtgcctttacgttcactcctctgtggctcagtggaggaagtgcctgcattctattaagttgaaagattcaattctttctattgtgcacgtgaaaggcatcgtcctggttgctctcgcagacggcacgctcgccatttttcatcgaggagttgacggccagtgggatttgtcgaactaccacctccttgatctgggcagaccgcatcactccatcagatgcatgaccgtggtacatgacaaggtttggtgcgggtaccgcaacaagatctatgttgtgcagccaaaggcaatgaagattgaaaagtcatttgacgcacacccaagaaaggagagtcaagttagacaactcgcttgggtcggtgacggagtctgggtatctatcagacttgattcgacgctgcgtttgtaccacgcacatacgtaccaacacctacaagatgtggacatcgagccttacgtctcaaagatgctgggaaccggtaaactcggattcagctttgtgagaattaccgccctgatggtgtcctgcaaccgactgtgggttggcaccgggaacggggtgattatctcaatccccctgactgaaaccaacaaaacctcaggggtgccaggcaaccgaccgggttctgtgatccgggtgtacggggatgagaatagcgacaaggtcactcctggaacatttatcccctattgttctatggcccatgcccagctttgctttcatggccatcgagatgcagtgaagttcttcgtcgccgtaccaggccaggtgatttccccccagtcctcttccagcggtactgatctgactggagacaaagcaggtccaagtgcccaggagcccggatctcagaccccgctaaagagtatgctggttatctccggaggcgagggctacattgactttcgaatgggagacgagggaggtgaatccgagcttctgggcgaggatctcccgctagaaccatccgtgacgaaagccgagcgaagtcacctcatcgtttggcaagtgatgtatgggaacgaatag

SEQ ID NO: 48234 - DNA, 3207 bp, Artificial Sequence
  derived and/or modified sequence
agcctgaaggatgagctgagtgatgtgtcccagggcggcagcaaggccaccaccccagccagcacagccaacagtgatgtggccaccatccccacagacacccccctgaaggaggagaatgaaggatttgtgaaggtgacagatgcccccaacaagtctgagatcagcaagcacatcgaggtgcaggtggcccaggagaccagaaatgtgtccacaggcagcgcagaaaatgaggagaagtctgaggtgcaggccatcatcgagagcaccccagagctggacatggacaaggacctgagcggctacaagggcagcagcacccccaccaagggcatcgagaacaaggcctttgacaggaacacagagagcctgtttgaggagctgagcagcgctggcagcggcctgattggagatgtggatgagggcgctgacctgctgggcatgggccgggaggtggagaacctgatcctggagaacacccagctgctggagaccaagaatgccctgaacatcgtgaagaatgacctgattgccaaggtggatgagctgacctgtgagaaggatgtgctgcagggcgagctggaggccgtgaagcaggccaagctgaagctggaggagaagaaccgggagctggaggaggagctgaggaaggcccgggcagaggctgaagatgcccggcagaaggccaaggatgatgatgacagcgacatccccacagcccagaggaagcgcttcaccagggtggagatggcccgggtgctgatggagaggaaccagtacaaggagcggctgatggagctgcaggaggccgtgcgctggacagagatgatccgggccagccgggagaacccagccatgcaggagaagaagaggagcagcatctggcagtttgtgcccacccgcttcagccgcctcttcagcagcagcagcaacaccaccaagaagccagagccccctgtgaacctgaagtacaatgcccccaccagccacgtgacccccagcgtgaagaagaggagcagcaccctgagccagctgcccggggacaagagcaaggcctttgacttcctgtctgaggagacagaggccagcctggccagcagaagagagcagaagcgggagcagtaccggcaggtgaaggcccacgtgcagaaggaggatggccgggtgcaggccttcggctggagcctgccccagaagtacaagcaggtgaccaacggccagggcgagaacaagatgaagaacctgcctgtgcctgtgtacctgcggcccctggatgagaaggacacctccatgaagaagctgtggtgtgctgtgggcgtgaacctgagcggcggcaagaccagagatggcggctctgtggtgggcgcctctgtgttctacaaggatgtggccggcctggacacagagggcagcaagcagaggtctgccagccagagcagcctggacaagctggaccaggagctgaaggagcagcagaaggagctgaagaaccaggaggagctgagcagcctggtgtggatctgcaccagcacccacagcgccaccaaggtgctgatcattgatgctgtgcagcccggcaacatcctggacagcttcaccgtgtgcaacagccacgtgctgtgcatcgcctctgtgcctggggcccgggagacagactacccagctggggaggacctgtctgagagcggccaggtggacaaggccagcctgtgtggctccatgaccagcaacagcagcgctgagacagacagcctgctgggcggcatcaccgtggtgggctgcagcgctgagggcgtgactggagctgccaccagccccagcaccaatggagccagccctgtgatggacaagcccccagagatggaggccgagaacagcgaggtggatgaaaatgtgcccacagctgaggaggccacagaggccacagagggcaatgccggcagcgctgaggacacagtggacatcagccagacaggagtgtacacagagcacgtgttcacagaccccctgggcgtgcagatccctgaggacctgagccctgtgtaccagagcagcaatgacagtgatgcctacaaggaccagatctctgtgctgcccaatgagcaggacctggtgcgggaggaggcccagaagatgagcagcctgctgcccaccatgtggctgggcgcccagaatggctgcctgtatgtgcacagctctgtggcccagtggaggaagtgcctgcacagcatcaagctgaaggacagcatcctgagcatcgtgcacgtgaagggcatcgtgctggtggccctggctgatggcaccctggccatcttccacagaggagtggatggccagtgggacctgagcaactaccacctgctggacctgggccggccccaccacagcatccgctgcatgacagtggtgcatgacaaggtgtggtgtggctacagaaacaagatctacgtggtgcagcccaaggccatgaagattgagaagagctttgatgcccaccccaggaaggagagccaggtgcggcagctggcctgggtgggagatggagtgtgggtgtccatccggctggacagcaccctgcggctgtaccacgcccacacctaccagcacctgcaggatgtggacatcgagccctacgtgtccaagatgctgggcaccgggaagctgggcttctcctttgtgcgcatcacagccctgatggtgtcctgcaaccggctgtgggtgggcactggaaatggagtcatcatcagcatccccctgacagagaccaacaagaccagcggcgtgcccggcaacagacctggcagcgtcatccgggtgtatggagatgaaaattctgacaaggtgaccccaggcaccttcatcccctactgcagcatggcccacgcccagctgtgcttccacggccacagagatgctgtgaagttctttgtggccgtgcccggccaggtgatcagcccccagagcagcagcagcggcacagacctgaccggggacaaggccggccccagcgcccaggagcccggcagccagacccccctgaagtccatgctggtgatcagcggcggggagggctacatcgacttcaggatgggagatgagggcggggagagcgagctgctgggggaggacctgcccctggagcccagcgtgaccaaggccgagaggagccacctgattgtgtggcaggtgatgtatggaaatgaatag

SEQ ID NO: 48235 - DNA, 3936 bp, Artificial Sequence
  derived and/or modified sequence
atggagctggaggatggagtggtgtaccaggaggagcccggcggcagcggggctgtgatgtctgagcgggtgtctggcctggccggcagcatctaccgggagtttgagcggctgattggccgctatgatgaggaggtggtgaaggagctgatgcccctggtggtggccgtgctggagaacctggacagcgtgtttgcccaggaccaggagcaccaggtggagctggagctgctgagagatgacaatgagcagctgatcacccagtatgagcgggagaaggccctgaggaagcatgctgaggagaagttcatcgagtttgaggacagccaggagcaggagaagaaggacctgcagaccagggtggagagcctggagagccagacccggcagctggagctgaaggccaagaactatgctgaccagatcagccggctggaggagcgggaggccgagctgaagaaggagtacaatgccctgcaccagaggcacacagagatgatccacaactacatggagcacctggagaggaccaagctgcaccagctgagcggcagtgaccagctggagagcacagcccacagccgcatcaggaaggagcggcccatcagcctgggcatcttccccctgcctgctggagatggcctgctgaccccagatgcccagaagggcggggagaccccaggcagcgagcagtggaagttccaggagctgagccagcccaggagccacaccagcctgaaggatgagctgagtgatgtgtcccagggcggcagcaaggccaccaccccagccagcacagccaacagtgatgtggccaccatccccacagacacccccctgaaggaggagaatgaaggatttgtgaaggtgacagatgcccccaacaagtctgagatcagcaagcacatcgaggtgcaggtggcccaggagaccagaaatgtgtccacaggcagcgcagaaaatgaggagaagtctgaggtgcaggccatcatcgagagcaccccagagctggacatggacaaggacctgagcggctacaagggcagcagcacccccaccaagggcatcgagaacaaggcctttgacaggaacacagagagcctgtttgaggagctgagcagcgctggcagcggcctgattggagatgtggatgagggcgctgacctgctgggcatgggccgggaggtggagaacctgatcctggagaacacccagctgctggagaccaagaatgccctgaacatcgtgaagaatgacctgattgccaaggtggatgagctgacctgtgagaaggatgtgctgcagggcgagctggaggccgtgaagcaggccaagctgaagctggaggagaagaaccgggagctggaggaggagctgaggaaggcccgggcagaggctgaagatgcccggcagaaggccaaggatgatgatgacagcgacatccccacagcccagaggaagcgcttcaccagggtggagatggcccgggtgctgatggagaggaaccagtacaaggagcggctgatggagctgcaggaggccgtgcgctggacagagatgatccgggccagccgggagaacccagccatgcaggagaagaagaggagcagcatctggcagtttgtgcccacccgcttcagccgcctcttcagcagcagcagcaacaccaccaagaagccagagccccctgtgaacctgaagtacaatgcccccaccagccacgtgacccccagcgtgaagaagaggagcagcaccctgagccagctgcccggggacaagagcaaggcctttgacttcctgtctgaggagacagaggccagcctggccagcagaagagagcagaagcgggagcagtaccggcaggtgaaggcccacgtgcagaaggaggatggccgggtgcaggccttcggctggagcctgccccagaagtacaagcaggtgaccaacggccagggcgagaacaagatgaagaacctgcctgtgcctgtgtacctgcggcccctggatgagaaggacacctccatgaagctgtggtgtgctgtgggcgtgaacctgagcggcggcaagaccagagatggcggctctgtggtgggcgccagcgtcttctacaaggatgtggccggcctggacacagagggcagcaagcagaggtctgccagccagagcagcctggacaagctggaccaggagctgaaggagcagcagaaggagctgaagaaccaggaggagctgagcagcctggtgtggatctgcaccagcacccacagcgccaccaaggtgctgatcattgatgctgtgcagcccggcaacatcctggacagcttcaccgtgtgcaacagccacgtgctgtgcatcgcctctgtgcctggggcccgggagacagactacccagctggggaggacctgtctgagagcggccaggtggacaaggccagcctgtgtggctccatgaccagcaacagcagcgctgagacagacagcctgctgggcggcatcaccgtggtgggctgcagcgctgagggcgtgactggagctgccaccagccccagcaccaacggggccagccctgtgatggacaagcccccagagatggaggctgaaaattctgaggtggatgaaaatgtgcccacagctgaggaggccacagaggccacagagggcaatgccggcagcgcagaagatactgtggacatcagccagacaggagtgtacacagaacatgtgttcacagaccccctgggcgtgcagatccctgaggacctgagccctgtgtaccagagcagcaatgacagtgatgcctacaaggaccagatctctgtgctgcccaatgagcaggacctggtgcgggaggaggcccagaagatgagcagcctgctgcccaccatgtggctgggcgcccagaatggctgcctgtatgtgcacagctctgtggcccagtggaggaagtgcctgcacagcatcaagctgaaggacagcatcctgagcatcgtgcacgtgaagggcatcgtgctggtggccctggctgatggcaccctggccatcttccaccggggcgtggatggccagtgggacctgagcaactaccacctgctggacctgggccggccccaccacagcatccgctgcatgacagtggtgcatgacaaggtgtggtgtggctacagaaacaagatctacgtggtgcagcccaaggccatgaagattgagaagagctttgatgcccaccccaggaaggagagccaggtgcggcagctggcctgggtgggagatggagtgtgggtgtccatccggctggacagcaccctgcggctgtaccacgcccacacctaccagcacctgcaggatgtggacatcgagccctacgtgtccaagatgctgggcaccgggaagctgggcttctcctttgtgcgcatcacagccctgatggtgtcctgcaaccggctgtgggtgggcactggaaatggagtcatcatcagcatccccctgacagagaccaacaagaccagcggcgtgcccggcaaccggcccggcagcgtcatccgggtgtatggagatgagaacagcgacaaggtgaccccaggcaccttcatcccctactgcagcatggcccacgcccagctgtgcttccacggccacagagatgctgtgaagttctttgtggccgtgcccggccaggtgatcagcccccagagcagcagcagcggcacagacctgactggagacaaggccggccccagcgcccaggagcccggcagccagacccccctgaagtccatgctggtgatctctggaggagagggctacatcgacttcaggatgggagatgaaggaggagagagcgagctgctgggggaggacctgcccctggagcccagcgtgaccaaggccgagaggagccacctgattgtgtggcaggtgatgtatggaaatgaatag

SEQ ID NO: 48236 - DNA, 3207 bp, Artificial Sequence
  derived and/or modified sequence
agcctgaaggacgagctgagcgacgtgagccagggcggcagcaaggccactactcctgcctcgactgctaattcggatgtggccaccatcccgacagacaccccgctgaaggaagagaacgaaggctttgttaaggttactgacgctccaaataaaagcgagatctccaagcacattgaagtccaggtcgcccaggaaaccaggaatgtgtcaactggttcagccgaaaacgaggagaaatcagaagtgcaagccatcattgaatctaccccagagttggacatggacaaggacctgtccgggtacaagggaagctcaacacctaccaaaggtatcgagaacaaagccttcgaccgcaacacagagagcctattcgaggagcttagctccgctggaagcggtctgataggcgatgtggacgaaggagctgacttacttggaatgggacgggaagttgagaatttgattcttgaaaacactcaactgttagaaactaagaacgctctaaatatcgtgaagaacgacctaattgccaaggttgacgaattgacatgtgagaaagacgttctccagggagagcttgaagccgtcaagcaggctaagcttaagttggaggaaaaaaatcgagaactggaagaagagctcaggaaagctcgtgcggaagcagaagatgcccgccaaaaagcaaaggacgatgacgacagcgacattccaacagcccagagaaagagatttacccgggtcgagatggccagagtactgatggagaggaatcagtacaaggaaagactgatggagctgcaagaagccgtccggtggacagaaatgattcgggctagccgagagaatcctgcaatgcaagagaagaaacgctcctctatatggcaatttgttcctactaggttcagtcgcctgttctcctcttcgtctaatacaactaagaaacctgaaccccctgtgaatttgaagtacaacgccccaacttcccatgttacgcctagcgtgaaaaagcgttcctcgactctcagccaactgcccggagataaaagtaaggccttcgacttcctttccgaagaaaccgaagctagcttggcaagcagacgcgaacagaaaagagagcaataccgtcaagtgaaagcccacgttcagaaggaggacggtagggtgcaggccttcggttggagcctcccgcagaaatataaacaagtgaccaacgggcaaggggagaacaaaatgaagaatctgccagtgcccgtttatctcaggcctttggatgaaaaggatacgagtatgaaaaaactgtggtgtgcagtcggggtgaacctcagcggcgggaaaacgcgcgatggcgggagcgtggtgggggccagtgtcttttacaaggacgttgctgggctcgatacagagggctcaaaacagaggtccgcttctcagagctctctggataagctcgaccaagaactcaaggagcagcagaaggagctgaagaaccaagaggagcttagcagccttgtatggatttgcacatcaactcactcggctaccaaggtgctaatcatcgacgctgtccagcccggaaacatcctggactcctttactgtgtgcaattctcacgtgctttgcattgcgtctgtgccaggcgctcgcgaaacagactacccagcgggcgaagatttgtcggaatcaggccaggtggataaagcgtcactctgtgggtccatgacatccaactcctccgctgaaacggattccctcctgggtggcatcaccgtcgtcggttgctcggctgaaggtgtgacaggtgccgcaaccagtccgtcaaccaacggggcaagtcctgtgatggataagcccccggagatggaggcagaaaacagcgaagttgacgaaaatgttcctaccgctgaggaggcaactgaggccaccgaaggaaatgccggttcagctgaggacactgttgatatctctcagacgggggtttatactgaacacgttttcaccgaccctctgggagtgcagatccccgaagacttaagtccagtctaccagagtagtaatgacagcgacgcctataaagaccagatttccgttctgccgaatgaacaggacctggtgcgcgaggaggcacagaagatgtcttcacttcttccaactatgtggcttggcgcccagaacgggtgtctttatgttcattcatcagtggcacagtggcgaaagtgccttcactcgatcaaacttaaggatagcatccttagcatcgttcacgttaagggcatcgtgttggtggcgttagccgatgggaccctcgcaattttccaccggggtgttgatggccagtgggatctgtcaaattatcacttgctcgacctcggaaggccacaccatagtatcagatgtatgacagtcgttcatgataaggtgtggtgcgggtacagaaataagatctatgtggtacaacccaaggcaatgaaaatcgagaaaagcttcgacgcacaccccaggaaggaatctcaggttcggcagttggcctgggtcggtgatggcgtttgggtgtcaattcgtctggatagcacccttcggctctatcacgctcacacgtatcagcacctgcaggatgtggatatcgagccctatgtctccaagatgttgggtacaggtaaattgggcttcagtttcgtccggatcaccgctcttatggtctcttgtaataggctctgggtgggcaccggaaatggtgtgattatatctattccactgactgagaccaacaagacatcaggggtacccggcaatcgcccagggagtgtgatccgggtgtacggggatgagaattccgataaagtcactcccggaaccttcatcccctactgttcaatggcccatgctcaattgtgttttcatggacacagagatgcagtgaagttttttgttgccgtgcccggccaagttatttctcctcagagctcttcttccggcactgatctgacaggcgacaaagcgggacctagcgctcaggagccagggagtcaaacacccctgaagagcatgttagtgatctccggcggcgagggctacatcgatttccgcatgggcgacgaaggcggcgaatcagaactactgggggaggaccttccgctagagccatccgtaactaaagccgagcgcagccatcttattgtctggcaggtgatgtacggcaacgaatag

SEQ ID NO: 48237 - DNA, 3936 bp, Artificial Sequence
  derived and/or modified sequence
atggagctggaggacggcgtggtgtaccaggaggagcccggcggctctggggccgtcatgtctgaacgcgttagcgggcttgctggtagtatctatcgggaatttgagaggctaattgggagatacgacgaggaagtagtgaaggagctgatgccactggtggtagctgttctggaaaacctggattctgtgtttgcccaagatcaggaacatcaggtcgaactcgagcttttgcgcgacgacaacgagcaactgatcacacagtacgaaagagaaaaagccctcaggaagcacgcagaggaaaagtttattgagttcgaagactcgcaggagcaggaaaagaaagatctgcagacgagagtcgagtccctcgagtcacaaacaagacagctcgaactcaaggctaagaattatgcagatcagatctctcggctggaagagcgagaagccgaattaaaaaaggagtataatgccctccaccagcgccacacggaaatgatccataactatatggaacacctggaacgtaccaagctacatcagctgagtgggagcgatcagctggagagcacagcccattccaggatcagaaaagaacgcccaatttcgctgggcattttcccccttcccgctggcgacgggcttctgactcctgatgcccagaagggaggcgaaactccaggcagtgagcagtggaaatttcaagagttgagccagccaaggagccacacctccctgaaagacgaactgtccgacgtgtcgcagggaggctcgaaagccacaacacctgcaagtactgctaattcggacgttgcaacaattcccacagacactcccctgaaagaggaaaatgaggggttcgttaaagttacagacgctccaaataagagcgagatcagcaaacatatagaagtccaggtggctcaggagacgagaaacgtctccaccgggagcgcagagaatgaggaaaagagcgaggtgcaagccatcattgaatccacgcccgagctcgatatggacaaggatctgtccggttataaagggtcctctaccccaaccaagggaattgaaaacaaggcctttgataggaatactgagagcctgtttgaagaactcagcagcgctggtagcggactgattggcgacgttgacgaaggggcagacctcctgggcatggggcgtgaggtcgaaaatcttattctggagaacacccagctcctcgagactaagaatgccctgaacatcgtgaagaatgatctcattgccaaagtggatgagctgacatgcgagaaggatgtcctccagggcgagctcgaggcggtaaaacaggctaagctgaaactcgaggaaaaaaacagggagttggaggaggagcttaggaaggcaagggcagaagccgaggacgccagacagaaggcaaaggacgatgatgattctgacatacccactgcacagaggaaacgctttactcgagtcgagatggccagggtgctcatggagagaaaccagtacaaggaaaggcttatggagctccaggaggccgtgcggtggactgagatgatcagggcgtcacgtgagaaccccgcgatgcaagaaaaaaagaggtcgagcatttggcaattcgtccccacacggtttagtcgcctgttctcaagctcttctaatacgaccaagaagccagaaccacccgtaaacctgaagtacaatgctcccactagccacgtgacacccagtgtcaagaagaggtcaagcacattgtctcagctgcccggcgataaaagtaaggctttcgacttcctctccgaggaaacagaggcatccctggccagtagacgcgagcagaagcgcgagcagtacaggcaggtcaaggcacatgtgcaaaaggaagacggccgcgtccaggccttcggttggagtctccctcaaaaatacaaacaggtcacaaacgggcagggagaaaacaagatgaaaaatctccctgtgcctgtttatttgagaccccttgacgagaaggatacgagtatgaagttatggtgtgctgtgggcgtgaacctgagcgggggaaagacaagagatgggggaagcgtggtcggcgcgtctgttttttataaagatgtggctggactggacaccgaaggctcaaagcagagaagtgcgagtcaatcttccctggataaactggaccaggagttgaaagagcaacagaaagaactcaaaaatcaggaggagctctctagcctggtctggatttgcacctcaacacatagcgccacgaaagtgctaataatcgacgccgtgcagccaggcaatattctggactccttcaccgtgtgcaatagtcacgtgctgtgcatcgcatccgttcctggagcacgcgagacagactatcccgctggggaagacctgagcgaatctggtcaggtagacaaagcatcgctctgcggctctatgacaagcaatagttctgccgaaactgactctctgctgggcgggatcacagtggttggctgttctgcagagggggttactggtgccgccacttctccgtcgacgaacggggctagtcccgtgatggacaagccacctgagatggaggcagagaattctgaggtcgacgaaaatgtgccgactgcagaagaagctactgaagccaccgagggcaatgctgggagcgccgaggataccgtagatatttcccaaaccggcgtgtacaccgaacacgtgttcacagacccactcggcgttcaaatcccagaagacctcagcccagtgtatcagtcctcgaacgattcagatgcatacaaagatcagatcagcgtcctgcctaatgaacaggacctggtccgcgaggaagctcagaaaatgtccagcctgttgcccactatgtggttgggcgctcagaatggctgcttgtacgtccattcatcagttgcccagtggaggaaatgcctccattctatcaaactgaaggacagtatcctttcgatcgtgcacgtgaagggcatcgtcttagttgccctcgccgacggcacactcgcaatttttcatcggggagtggacgggcagtgggacttatcgaactaccatctgctggatctggggaggcctcaccattctattagatgcatgaccgtggtgcacgataaggtgtggtgtggctaccgtaacaaaatctacgtggtgcagcccaaagcaatgaagattgagaaatctttcgatgcacacccacggaaagaatctcaagtgcgccagctcgcttgggtgggagacggcgtatgggtctccatcagactcgatagcacacttcgactgtaccatgctcacacctaccaacatctccaggacgtcgacatcgagccttacgtatcaaaaatgttgggtaccggcaagcttggcttcagttttgtgcgtattacggccctgatggtgagctgtaacagactctgggtcggcactgggaatggagtgattatctcgatccccctcacggagaccaacaagactagcggagttcccggcaacaggccaggcagcgtcattagagtatatggtgacgagaactcagacaaagtaaccccgggcacattcatcccctattgttctatggctcacgcccagctgtgttttcatgggcatagggatgcagtgaagttttttgttgccgtacccggtcaagttatctcaccacagtcaagcagttcgggcaccgatctgaccggggataaagcgggaccttctgcccaggagccagggagtcagactccactcaagagcatgctggtcatctctggcggtgaaggctatattgactttcgtatgggagacgaaggaggtgagagtgaacttctcggggaggatcttcctctggaaccctccgtgaccaaagctgagaggtcccatttgatcgtgtggcaggtgatgtacggcaacgagtag

SEQ ID NO: 48238 - DNA, 3207 bp, Artificial Sequence
  derived and/or modified sequence
agtttgaaggacgagctgagcgacgtgtcgcaaggcggaagcaaggctactacccccgcatcaactgccaattccgacgtggccacgatccctactgacactcccttgaaagaggagaacgaggggttcgtgaaagtgacagacgccccaaataaatcggagatctcaaaacatattgaggtgcaggtggcacaagagacaaggaacgtctccaccggatctgccgaaaacgaagaaaagtctgaagtgcaggccatcatcgagagtaccccagaactggacatggataaggacttatcaggctataagggctcatctacccctactaaaggaatcgagaacaaggcttttgatcggaatactgagagtttatttgaggagctatccagtgctggatcaggactaataggcgatgtggacgaaggcgctgacctgctcgggatggggagggaggttgagaatttaattctggagaatactcaactcctagaaaccaaaaacgctttgaacatcgtcaaaaacgatctgatcgccaaggtggatgagctgacatgtgaaaaggatgtccttcagggagaactggaggccgtgaagcaggccaagctgaagctagaggagaagaacagggaattggaagaggaattaagaaaggctagggctgaagccgaagatgcacgtcaaaaagcaaaggatgacgatgattcagacattcctactgcccagaggaagcgcttcacccgtgtggagatggcacgtgttctgatggaaagaaaccagtataaggagcgacttatggagctacaagaggccgtgcgctggactgaaatgattcgggcttcccgcgagaaccccgctatgcaggagaagaagcgaagttcgatatggcagtttgtgcccacacgatttagtaggctattctcgagctcttccaatactaccaagaagccagaacccccagtcaacttgaaatataacgcgccaacgagccacgtcactccctccgttaaaaagagaagctccacactttcccaactgccaggtgacaaatctaaagcttttgatttcctgagcgaagaaaccgaagcttcattggcttccagacgagagcaaaagcgtgaacagtacaggcaggtgaaggctcacgttcagaaggaggatggcagggtccaggcctttggatggtctctcccccaaaaatataagcaggtgacaaacggacagggagaaaacaaaatgaagaaccttccagtgcccgtttatctcagaccgctagacgagaaggacaccagcatgaagaaactgtggtgtgctgtcggagtgaacctatcaggaggtaagactcgcgacggcggtagcgtcgtgggagcatccgttttctacaaagacgtggccggattggataccgagggtagcaagcaaaggagtgcatctcaatcaagtctcgacaagctagatcaagagttgaaggagcagcagaaggagctcaagaatcaggaggagttgtcttcattggtatggatttgtacttctacgcatagcgctacaaaagttttgatcattgatgcggtgcagccaggcaacatactggattctttcaccgtgtgcaactcccacgtgctgtgtatcgcttcagtccccggtgcgcgtgagaccgactaccccgctggggaagacttatcagaatccggccaggtcgataaggcttcgttatgtggcagtatgacaagcaacagtagcgccgagacagactcactgctcggaggaataacagtggtgggttgcagcgctgaaggcgtgactggcgcagcaaccagcccttccaccaacggggcttcacccgtaatggataagccacccgagatggaggcagagaatagtgaagtggacgagaacgtccctaccgccgaggaggctacagaagcaacagagggcaatgccggttcggccgaggatactgtcgacatcagccagaccggcgtatataccgagcacgtgtttacagatccactgggtgtccaaattcccgaagatctttctccagtgtaccaatccagtaacgacagtgatgcctacaaggaccagatctcagtactgcctaacgaacaggacttagtgcgtgaggaggcccagaaaatgtcttcgctgctaccaacgatgtggttgggcgctcagaatggctgcctgtacgtgcacagtagtgtggcacaatggcgtaaatgcctgcactcaatcaaactgaaggactccatattgagcatagtgcatgttaagggtatcgtcctggtagccctcgccgacgggactttggctatctttcacagaggtgtggatgggcaatgggatctctccaattatcatttgttggacttggggagaccacatcactccattagatgtatgactgtggtgcatgacaaagtgtggtgtgggtaccgcaacaagatttacgttgtacagcctaaggccatgaagatcgaaaagtcattcgacgcccacccaagaaaagagagtcaggttcgccagctggcgtgggtgggggatggcgtctgggtatcaatccgcctcgactcaacactgagactttatcacgcacacacctaccagcacttacaagatgtagacatcgaaccgtacgtcagtaaaatgctgggaacaggaaaactcggcttttcatttgttcgaataaccgccctgatggtgtcttgcaatcggttgtgggtagggactgggaacggggttatcataagtattcccctgaccgagactaataagacctcaggggtgccagggaaccgacccggatccgtgatccgcgtctacggcgatgagaacagcgacaaggtgacccctggcacatttatcccctattgcagtatggcccacgctcagctctgttttcatggccaccgggacgccgtaaagtttttcgtagctgtgcccggacaagtaatttctccccagagttcctcatcaggaaccgatctgaccggggacaaagcaggcccatcagcccaggagcccggaagccagactcccttaaaatctatgctcgtgatctctggcggagagggatacatagattttcgcatgggggatgaaggaggcgagagcgaactgctgggagaggacctgcccttagagcctagcgtcaccaaggctgagcgctctcacctgattgtgtggcaggtgatgtacgggaacgaatag

SEQ ID NO: 48239 - DNA, 3936 bp, Artificial Sequence
  derived and/or modified sequence
atggaactggaagacggggttgtgtaccaggaagaacctggagggtccggggctgtcatgagcgagcgggtatctggcctcgctggctcgatataccgggaattcgagcggcttattggcaggtatgacgaggaagtggtcaaggagttgatgccgcttgtggtcgccgtcctggaaaacttggactctgtgtttgcccaggatcaggagcatcaggttgaactagaactactgcgggacgataacgaacaactgatcacacaatatgaacgcgagaaggcactgaggaagcacgctgaagaaaaattcatcgagttcgaagattctcaggaacaggagaaaaaagacctgcaaacccgggtcgaatctctggagagtcagacgcgccagctggagctgaaagctaagaactacgccgaccagattagccgcctcgaagagcgagaggctgagctcaaaaaggaatacaatgccctgcatcaacgccacactgaaatgattcataactatatggagcatctggaacggacaaaactccatcagctttcgggctctgatcaactggagtccactgcccacagtcggattagaaaagaacgccctatctccctgggcatcttccccttgcctgccggagacggcttactgacacccgacgcccaaaaaggcggtgaaacccccggtagtgagcaatggaagttccaggaactaagccaaccccgaagccataccagcttaaaggatgaactatccgatgtgagtcaaggcggtagcaaggcaactacgcccgcatcaacggctaactccgatgtggctacaattcccaccgacactccactaaaggaggagaatgaaggatttgttaaagtgactgacgcaccaaataagagtgagataagcaagcatatcgaggttcaggtagctcaggaaactcgcaacgtttccactgggagcgcggaaaacgaggagaagtccgaagtgcaggccattattgagtctacacccgaattagacatggataaggacctttcaggttacaaaggaagttctactcctactaaagggattgagaataaagccttcgaccgcaacaccgagagcctctttgaggaactgagctcagccggatccggcctcattggagacgtagatgagggcgcagacctcctcggtatgggtagagaggtggagaatctgattctcgagaatacccaactcctggaaaccaagaatgcactgaatattgttaagaacgacctcatagcgaaggtggacgagctgacatgtgagaaggatgttctgcagggtgaactcgaagccgttaagcaggccaagttaaaactggaggagaagaatcgggaactcgaagaagaattacggaaggcacgtgccgaagctgaggatgctcgtcagaaggcgaaagatgacgacgactcagacatcccaaccgcccagagaaagagatttaccagggtggaaatggctcgagtcctgatggaaaggaaccagtacaaggagagacttatggagctgcaggaggccgtgaggtggacagaaatgatccgcgcttcccgagagaacccggctatgcaagaaaaaaaacgctctagcatctggcagtttgttcccacacgtttctcacggcttttcagctctagctctaacaccacaaaaaagccagaaccccctgtaaacctgaagtataacgcacctaccagccatgtgaccccaagcgttaaaaagagaagcagcactctctcacagctgccaggcgataagagtaaggctttcgactttcttagcgaagagaccgaagctagtctggccagcagaagagaacagaaaagggagcagtataggcaggttaaagctcacgtgcaaaaggaggacggcagagttcaggcctttggctggtccttgccacagaagtacaagcaggttactaacggtcagggcgagaacaaaatgaaaaatttgcccgtgcccgtttacttgcgacccctcgacgagaaggatacctctatgaaactgtggtgtgctgtcggggtcaacctgagcgggggaaaaacacgggatgggggttctgttgtaggtgccagcgtgttctacaaggatgtggccggtctggatactgaaggcagcaagcaacggtccgcctcccaatccagcctggacaagttggaccaggagctgaaagaacaacagaaagagctaaagaaccaggaagagcttagttcgctggtatggatttgcacatcgacccatagcgcgactaaagtcctcatcatcgacgcagtgcaaccaggaaatatcctggactcttttacagtgtgcaactcacatgtgctgtgtatcgcttcagtgccgggtgcacgagagactgactaccctgccggtgaagatctgtcagaaagcggccaggtcgacaaggcgagcttatgcggtagcatgacctccaattcctcagccgagactgattccctgctaggcggtatcaccgttgtggggtgttctgcggaaggcgtgaccggcgctgcgacctccccttcaaccaacggggcatctcctgtgatggataagccacccgagatggaggcggaaaattctgaagtcgacgagaatgtgccaacggctgaagaggcaaccgaggctactgaagggaatgccggtagcgccgaagatacagtagatattagccagaccggggtctacacggagcatgtctttaccgatccccttggggttcagatacctgaagacctctcacctgtgtaccagtcatccaatgattccgatgcatacaaggaccaaatatccgtgttaccgaatgagcaagatctggttagggaggaggcccagaaaatgtcaagcctgctgcctacgatgtggttgggggctcagaacggctgtctctatgtgcactcgtctgtagcccagtggagaaaatgtctacacagcattaagctcaaagactcaatcctgagcattgtgcatgttaagggaattgtactcgtagcattggccgacgggacactggcgatctttcaccgcggagtcgatgggcaatgggaccttagcaattaccatttgctggacctgggcagacctcatcatagtattcgttgcatgaccgttgtccacgacaaggtgtggtgcgggtaccgcaataagatttatgttgtccagcccaaagcgatgaaaatcgagaaaagtttcgatgcccaccctaggaaagagagccaagtccgccagctagcctgggtgggggatggagtttgggtgtctattaggttggactctacactccgtttatatcacgcccacacctaccaacacctgcaagatgtcgacattgaaccttacgtatccaagatgttgggtaccggtaaattaggattctcttttgtgagaattaccgctctgatggtttcttgtaatcgactgtgggtggggacaggaaatggagtgatcatttctattcccctgaccgagaccaacaagacaagcggagtcccgggtaacagacccggttccgtgattcgggtgtacggcgacgagaattccgacaaagtgacccccggtacctttattccgtactgcagtatggcccacgcccagctgtgttttcatggacaccgggatgcagtgaaattcttcgtggccgtgcccggacaggtgatcagtccccaatctagttcgtcaggaacagatctaaccggcgacaaggccggaccttccgcacaagagcctgggtcacagacccctttgaagagtatgctggtgatctcgggcggtgaggggtatattgatttcagaatgggcgacgaaggaggcgagtcagagctcctgggagaggatttacctctggaaccgtcagtcaccaaagccgaaagaagtcacctgatcgtttggcaggtaatgtacggaaacgagtag

SEQ ID NO: 48240 - DNA, 7305 bp, Artificial Sequence
  derived and/or modified sequence
tcccttaaggatgagctttctgatgttagccaaggcggatctaaagctaccactccagcatcaacagctaattcagatgtggcaacaattcctactgatactcccttaaaggaagaaaacgaaggatttgtgaaggttacagatgcgccaaataaatcagagataagcaaacacattgaagtacaggtagcccaggaaactagaaatgtatctactggctctgctgaaaatgaagaaaagtcagaagttcaagcaatcatcgaatctactcctgagctggatatggacaaagatctcagtggatataaaggttcaagcactcccaccaaaggcatagagaacaaagcttttgatcgcaatacagaatctctctttgaagaactgtcttcagctggctcaggcctaataggagatgtggatgaaggagcagatttactaggaatgggtcgggaagttgagaatcttatattagaaaatacacaactgttggaaaccaaaaatgctttgaacatagtgaagaatgatttgatagcaaaagtggatgaactgacctgtgagaaagatgtgctgcaaggggaattggaggctgtgaagcaagccaaactgaaactagaggaaaagaacagagaattggaggaagagcttaggaaagctcgggcagaagctgaagatgcaaggcaaaaagcaaaagatgacgatgatagtgatattcccacagcccagaggaaacggtttactagagtagaaatggcccgtgttctcatggagcgaaaccagtataaagagagattgatggagcttcaggaagctgttcgatggacagagatgattcgggcatcacgagaaaatccagccatgcaggaaaaaaaaaggtcaagcatttggcagtttgtgccaactcgtttcagccgacttttcagctcctcaagtaacacgactaagaagcctgaaccacctgttaatctgaagtacaatgcacccacgtctcatgttactccgtccgtcaagaaaagaagcagcaccttatctcagctccctggggataagtccaaagcctttgatttccttagtgaagaaactgaagctagtttagcctcacgcagagaacaaaagagagagcagtatcgtcaggtaaaagcacatgttcagaaggaagacggtagagtgcaggcttttggctggagtctgcctcagaagtacaaacaggtaaccaatggtcaaggtgaaaataagatgaaaaatttacctgtgcctgtctatctcagacctctggatgaaaaagatacatcaatgaagaagctgtggtgtgctgttggagtcaatttatctggtgggaagaccagagatggtggttctgttgttggagcaagtgtattttacaaggatgttgctggtttggatacagaaggcagtaaacagcgaagtgcctctcagagtagtttagataagttagatcaggaacttaaggaacagcagaaggagttaaaaaatcaagaagaattatccagtctagtttggatctgtaccagcactcattcggctacaaaagttcttattattgatgctgttcaacctggcaacatcctagacagtttcactgtttgcaactctcatgttctgtgcattgcaagtgtgccaggtgcacgagaaacagactaccctgcaggagaagatctttcagaatctggtcaggtagacaaagcatctttatgtggaagtatgacaagcaacagctcagcagagacagacagcctgttaggaggcatcacagtggttggttgttctgcagaaggtgtgacgggagctgccacttcccctagtacaaatggtgcttctccagtgatggataaaccaccagaaatggaagcagaaaatagtgaggttgatgaaaatgttccaacagcagaagaagcaactgaagctacagaagggaatgcggggtcagctgaagacacagtggacatctcccaaactggcgtctacacagagcatgtctttacagatcctttgggagttcagatcccagaagacctctccccagtgtatcagtcgagcaatgactcagatgcatataaagatcaaatatcagtactgccaaatgaacaagacttggtgagagaagaagcccagaaaatgagtagtcttttaccaactatgtggcttggagctcaaaatggctgtttgtatgtccattcatctgtagcccagtggaggaaatgtctccattccattaaacttaaagattcgattctcagtattgtacacgtgaagggaatcgtgttagtagccctggctgacggcacccttgcaatctttcacagaggagtggatgggcagtgggatttgtcaaactatcacctcttagaccttggacggcctcatcattccatccgttgcatgactgtggtacatgacaaagtctggtgtggctataggaacaaaatctatgtggtgcagccaaaggccatgaaaatagagaaatcttttgatgcacatcccaggaaggagagccaagtgcgacagcttgcgtgggtgggggatggcgtgtgggtctccattcgcttggattctacgctccgtctctatcatgcacacacttatcaacatctacaggatgtggacattgagccttatgtaagcaaaatgttaggtactggaaaactgggcttctcttttgtgagaattacagctcttatggtgtcttgtaatcgtttgtgggtggggacaggaaatggtgtcattatctccatcccattgacagaaacaaataaaacctcaggtgtaccaggaaatcgtcctggaagtgtaatccgtgtatatggtgatgaaaacagtgataaagtgactccagggacatttataccctattgttcaatggcacatgcacagctttgcttccatgggcaccgggatgctgtgaaattctttgtggcagtcccaggtcaagtcatcagcccacaaagtagcagtagtggcacggatctgacgggtgacaaagcagggccatctgcacaggagcctggtagtcagacgcccttgaagtctatgcttgtcatcagtggaggagagggctacatcgacttccgaatgggtgatgaaggtggagaatcagaacttcttggagaggatcttccacttgaaccttctgtcaccaaagcagaaaggagtcacttgatagtgtggcaagtgatgtatggcaatgagtgagcccatgggaaacaggtggagatggggaagccgtctcttctgcatggtttattttccctctatccttttatttaatgctcttttgtgagataagtttcaccacataatgtgtgagcattttttcctgttaactttatattacaaaatccgttctaccataacaatacagaggaactagctgtgttactgcaccagtgttataggtaacttcagtatattatgaacaaatcaaagaatgtttacttcctgcaaactggtgaattatagaaagcaatccagatgtggtttactctgccacagtctaatgtcattcacttcatttgatggggtcacttgttagctgtcactaataatggaattaatgggaaacacttgataaatgaaactgtaccgttaaatacaatagctgagttttccccagtgtattgtaaaattgacacacactaatacaagatggattatcaggatgtatctaaatgtcccgagagggttaaaagctaactgtaaattactttaactttcactttcaaatctgacaaatcttgtttatatggtatataaaactttgttttcatcagatttgggggggttttatattaaagaaattaagactacactatttaaataaacgtttcctgtttctgacttattagagctctaaagtttatgaggcctacttctctgaatattctgatgggttttttttgagaccagtctcattttcatactgacatgtctgaaagatttattatttataaagcttaggacatactctgggaagcttagaagatacttcagcactgggaggattttttaaaggaaatgtgttttgtatttcttgtaccagagaatggtgatgttgattgagttttttccatgtaaaaaatgtacttgtttgccaaatgttcctagattgctcttaacctgttaatacaagtaaaactgtagtggggatggagtctggcctaagtacagaatgagggatttaattagaaaagttattttcttttgttctgtatcaaactgcagaacagctatatacttggtattttgtacgtgaataacgttttagcttttgtgcccttttgagcttgaagggttatcctcaaaggggaaaactatgaaggggaagaagacaaacctaagataccataaagtaaaggttgacattacatattttcattcacaatgcccattaaaaaaaaaaaataggttgggcatggtggctcacgcctgtaatcccaacactttaggaggctgaggcagatggattgcttgagcccaggagttcaagaccagcctgggcaacatggcgaaaccctgtctctaccaaaaaaaaaaaacaaaataaattaaccgggtgtggtggcacatgcctgtagtcccagctacttgggaggctgaggtgggaggatgacctgggcccaggaggtggaggttgcagtgagccttgatagcaccactgcactccagcctgggtgacggagcaagaccctgtctcaaaacagacaaacaagcaaaaaatagattaaagtctggatttcactgattttcttgcttaataagttttttaaaaccacgatgctgcaattttttccctctcaagcttcttgaaaatgtgtgatttacccttttttatctattactctaggcaaagctaaatatgatttttttttttttttttgagacggagtctggctctgttgcccaggctggaatgcagtggtgcgatctcagctcactgcaacctccacctctcaggttcaagtagttctcctgcctcagcctcccaagtagctgggattacaggtgtgtgccaccctgcccagctaatttttgtatttttagtagagacagggtttcaccacattggccaggctggtctcaaactcctgacctcagatgatctacccgccttggcctcccgaagtgcttgaattacaggcgtgagcccccgcgccggtccgaagcaaagctaaatgtaattttatgtactgttttaacagtataaacctatgggataaaggcccccaatcatcagaaggactactgaaaagaaaagaaagcaaacgtagatgtcaaattgtctaaacattcttaagtaccactgattttttttttctggactattatacaaagatgtctgtaaaaagtataccagtggcttttatgcatatacacgattaggctagattgtgaagtacatgggatttcatgagccagaggaggcatttggatccattgggccacatgtgactataagcacattgtgtacacaataaaattgtagccactcatgtattaaaactgttttggtaaaagctgtattaaaagaataattttttgcttgagctacttagtcacttttttgcagggcaccaaaatgtaggctacttttccatagcttgtttgctatgtttttatttcatcttaaatctgagccatttttggcaatatcttttaaaaaatcattattaaacatttattggaaatgttgtatagattcacaagaaagagacaccaaagtgtttgggaattttaatcccaagaagtaaacatcccagagtcagatcccatttgctgttgttcagccatgtttgtatgactgaatgtaatttaggaaatcaggagttagagatgaaaaatacaaacatgtcaaatggttgtaattgctttttttgaacttactggctttaacttaagtaatataggtgtgtagttgttttatctaaagatgtcagattatctgtggccctgttaattaactgcagggaccagagagaggacaaaaatgcctgtataatttgctttaaaggcttgtccttatgtttgtaatttcagttaaatattttctacagattgcttcacttcccctttcccccaataacaagttcatattcttgtaatgtttactttggtcaacgtggtaatttttggaagaaaatgccaaaatgtaagcttctcacaagcagcaaaggaatgtaactgcctgtagctaccacatcaagggagagaagaggcttgcgtactttgggttgatctcactgtacaaaaaaagtgtacccctattggaagaaataaggaatacttgaaggtttctcctttttttacacttgagtcatgtgcaaggttgaaccatatgaaattgccagtgttcaaccattgctgatctgcaaaagcgacaatatcatatgcctcaacctaacacttactcttaaatgcaggttaaaatctctgtgaggcaaagggataatattctctaggaactcacttttgagagtatttttctctaacccatgtggatctaaattttaaaaataggaatgaatctcttaattgcagcttgtggagagtataaaacattttgagcacaatatgcagcacataacttttcagattgtgtttgcatagaaaaggttaaaatcaattctttcagttactgtattgttcatttcttgtaaaggtcttcctacatttgagacgagaccctttaacataggctgccttagtaacaaaataaaacagatgtgtcataatattaactgtcctaaagaacatgtgtcttgcaaatgccatggaactgaatatttatttccttgtgagtattatgaccgttaccaaaggactcaaccagatttagggctcttcttaattgatcatgttcagaaagggactcatttggtcccactttgtaacatgggaagagtagaagagaaaattaaatgtggaaatcataaatgcttttctaacagggttatgctattctgtaacactaaatgtctgtcttttctcttaaaagattaagttttattaattttgtcatacatttctctatttgaatatatcttaaccattttatgttccaaattcgttttttgtccaagacattctatcagaattttacttgcctctataatctgaaaaatgggttctagaatgtcccacttgctgtctcttagaggctgagcttcatttctatgagcaaagagctcatttagcaatgtagttatttcagtatttatttctattatggaatccctggggttcagaatgtaactttgtacatgagatatatataaatatgtatatgaacatgta

SEQ ID NO: 48241 - DNA, 4659 bp, Artificial Sequence
  derived and/or modified sequence
gtcgggtccgtcccgtgcgggcaggtgccgcccctctgccggcgacgccccgggccgcccgcccgtccgcttgccaccatggagctggaggacggtgtggtgtatcaggaggagcccggcggctccggggccgtgatgtcggagcgggtgtccggcctggccggctccatctaccgcgagttcgagcggcttatcgggcgctatgacgaggaggtggtcaaagagctgatgccgctggtggtggctgtgctggagaacctggactcggtgttcgcgcaggaccaggagcaccaggtggagctggagctgctgcgggacgacaacgagcagctcatcacccagtacgagcgggagaaggcgctgcgcaagcacgctgaggagaaattcattgaatttgaagactctcaagaacaggaaaaaaaggacttacagacccgagtggaatctttagaatctcaaacaagacaacttgagctgaaagcgaaaaactatgctgaccagattagcagacttgaagaaagagaagcagaactgaagaaggaatataatgcattacatcaaagacacactgagatgatccataattatatggaacatttagaaagaacaaaacttcatcagctctcagggagtgatcaactagaatccacagctcatagtagaattagaaaagaacgccctatatcattaggaattttcccattacctgctggagatggattgcttacacctgatgctcagaaaggaggagagacccctggatctgagcaatggaaatttcaggaattaagtcaaccacgttctcataccagcctgaaggatgagctttctgatgttagccaaggcggatctaaagctaccactccagcatcaacagctaattcagatgtggcaacaattcctactgatactcccttaaaggaagaaaacgaaggatttgtgaaggttacagatgcgccaaataaatcagagataagcaaacacattgaagtacaggtagcccaggaaactagaaatgtatctactggctctgctgaaaatgaagaaaagtcagaagttcaagcaatcatcgaatctactcctgagctggatatggacaaagatctcagtggatataaaggttcaagcactcccaccaaaggcatagagaacaaagcttttgatcgcaatacagaatctctctttgaagaactgtcttcagctggctcaggcctaataggagatgtggatgaaggagcagatttactaggaatgggtcgggaagttgagaatcttatattagaaaatacacaactgttggaaaccaaaaatgctttgaacatagtgaagaatgatttgatagcaaaagtggatgaactgacctgtgagaaagatgtgctgcaaggggaattggaggctgtgaagcaagccaaactgaaactagaggaaaagaacagagaattggaggaagagcttaggaaagctcgggcagaagctgaagatgcaaggcaaaaagcaaaagatgacgatgatagtgatattcccacagcccagaggaaacggtttactagagtagaaatggcccgtgttctcatggagcgaaaccagtataaagagagattgatggagcttcaggaagctgttcgatggacagagatgattcgggcatcacgagaaaatccagccatgcaggaaaaaaaaaggtcaagcatttggcagtttgtgccaactcgtttcagccgacttttcagctcctcaagtaacacgactaagaagcctgaaccacctgttaatctgaagtacaatgcacccacgtctcatgttactccgtccgtcaagaaaagaagcagcaccttatctcagctccctggggataagtccaaagcctttgatttccttagtgaagaaactgaagctagtttagcctcacgcagagaacaaaagagagagcagtatcgtcaggtaaaagcacatgttcagaaggaagacggtagagtgcaggcttttggctggagtctgcctcagaagtacaaacaggtaaccaatggtcaaggtgaaaataagatgaaaaatttacctgtgcctgtctatctcagacctctggatgaaaaagatacatcaatgaagctgtggtgtgctgttggagtcaatttatctggtgggaagaccagagatggtggttctgttgttggagcaagtgtattttacaaggatgttgctggtttggatacagaaggcagtaaacagcgaagtgcctctcagagtagtttagataagttagatcaggaacttaaggaacagcagaaggagttaaaaaatcaagaagaattatccagtctagtttggatctgtaccagcactcattcggctacaaaagttcttattattgatgctgttcaacctggcaacatcctagacagtttcactgtttgcaactctcatgttctgtgcattgcaagtgtgccaggtgcacgagaaacagactaccctgcaggagaagatctttcagaatctggtcaggtagacaaagcatctttatgtggaagtatgacaagcaacagctcagcagagacagacagcctgttaggaggcatcacagtggttggttgttctgcagaaggtgtgacgggagctgccacttcccctagtacaaatggtgcttctccagtgatggataaaccaccagaaatggaagcagaaaatagtgaggttgatgaaaatgttccaacagcagaagaagcaactgaagctacagaagggaatgcggggtcagctgaagacacagtggacatctcccaaactggcgtctacacagagcatgtctttacagatcctttgggagttcagatcccagaagacctctccccagtgtatcagtcgagcaatgactcagatgcatataaagatcaaatatcagtactgccaaatgaacaagacttggtgagagaagaagcccagaaaatgagtagtcttttaccaactatgtggcttggagctcaaaatggctgtttgtatgtccattcatctgtagcccagtggaggaaatgtctccattccattaaacttaaagattcgattctcagtattgtacacgtgaagggaatcgtgttagtagccctggctgacggcacccttgcaatctttcacagaggagtggatgggcagtgggatttgtcaaactatcacctcttagaccttggacggcctcatcattccatccgttgcatgactgtggtacatgacaaagtctggtgtggctataggaacaaaatctatgtggtgcagccaaaggccatgaaaatagagaaatcttttgatgcacatcccaggaaggagagccaagtgcgacagcttgcgtgggtgggggatggcgtgtgggtctccattcgcttggattctacgctccgtctctatcatgcacacacttatcaacatctacaggatgtggacattgagccttatgtaagcaaaatgttaggtactggaaaactgggcttctcttttgtgagaattacagctcttatggtgtcttgtaatcgtttgtgggtggggacaggaaatggtgtcattatctccatcccattgacagaaacaaataaaacctcaggtgtaccaggaaatcgtcctggaagtgtaatccgtgtatatggtgatgaaaacagtgataaagtgactccagggacatttataccctattgttcaatggcacatgcacagctttgcttccatgggcaccgggatgctgtgaaattctttgtggcagtcccaggtcaagtcatcagcccacaaagtagcagtagtggcacggatctgacgggtgacaaagcagggccatctgcacaggagcctggtagtcagacgcccttgaagtctatgcttgtcatcagtggaggagagggctacatcgacttccgaatgggtgatgaaggtggagaatcagaacttcttggagaggatcttccacttgaaccttctgtcaccaaagcagaaaggagtcacttgatagtgtggcaagtgatgtatggcaatgagtgagcccatgggaaacaggtggagatggggaagccgtctcttctgcatggtttattttccctctatccttttatttaatgctcttttgtgagataagtttcaccacataatgtgtgagcattttttcctgttaactttatattacaaaatccgttctaccataacaatacagaggaactagctgtgttactgcaccagtgttataggtaacttcagtatattatgaacaaatcaaagaatgtttacttcctgcaaactggtgaattatagaaagcaatccagatgtggtttactctgccacagtctaatgtcattcacttcatttgatggggtcacttgttagctgtcactaataatggaattaatgggaaacacttgataaatgaaactgtaccgttaaatacaatagctgagttttccccagtgtattgtaaaattgacacacactaatacaagatggattatcaggatgtatctaaatgtcccgagagggttaaaagctaactgtaaattactttaactttcactttcaaatctgacaaatcttgtttatatggtatataaaactttgttttcatcagatttgggggggttttatattaaagaaattaagactacactatttaaataaacgtttcctgtttctga

SEQ ID NO: 48242 - protein, 1321 aa, Artificial Sequence
  derived and/or modified sequence
MELEDGVVYQEEPGGSGAVMSERVSGLAGSIYREFERLIGRYDEEVVKELMPLVVAVLENLDSVFAQDQEHQVELELLRDDNEQLITQYEREKALRKHAEEKFIEFEDSQEQEKKDLQTRVESLESQTRQLELKAKNYADQISRLEEREAELKKEYNALHQRHTEMIHNYMEHLERTKLHQLSGSDQLESTAHSRIRKERPISLGIFPLPAGDGLLTPDAQKGGETPGSEQWKFQELSQPRSHTSLKVSNSPEPQKAVEQEDELSDVSQGGSKATTPASTANSDVATIPTDTPLKEENEGFVKVTDAPNKSEISKHIEVQVAQETRNVSTGSAENEEKSEVQAIIESTPELDMDKDLSGYKGSSTPTKGIENKAFDRNTESLFEELSSAGSGLIGDVDEGADLLGMGREVENLILENTQLLETKNALNIVKNDLIAKVDELTCEKDVLQGELEAVKQAKLKLEEKNRELEEELRKARAEAEDARQKAKDDDDSDIPTAQRKRFTRVEMARVLMERNQYKERLMELQEAVRWTEMIRASRENPAMQEKKRSSIWQFFSRLFSSSSNTTKKPEPPVNLKYNAPTSHVTPSVKKRSSTLSQLPGDKSKAFDFLSEETEASLASRREQKREQYRQVKAHVQKEDGRVQAFGWSLPQKYKQVTNGQGENKMKNLPVPVYLRPLDEKDTSMKLWCAVGVNLSGGKTRDGGSVVGASVFYKDVAGLDTEGSKQRSASQSSLDKLDQELKEQQKELKNQEELSSLVWICTSTHSATKVLIIDAVQPGNILDSFTVCNSHVLCIASVPGARETDYPAGEDLSESGQVDKASLCGSMTSNSSAETDSLLGGITVVGCSAEGVTGAATSPSTNGASPVMDKPPEMEAENSEVDENVPTAEEATEATEGNAGSAEDTVDISQTGVYTEHVFTDPLGVQIPEDLSPVYQSSNDSDAYKDQISVLPNEQDLVREEAQKMSSLLPTMWLGAQNGCLYVHSSVAQWRKCLHSIKLKDSILSIVHVKGIVLVALADGTLAIFHRGVDGQWDLSNYHLLDLGRPHHSIRCMTVVHDKVWCGYRNKIYVVQPKAMKIEKSFDAHPRKESQVRQLAWVGDGVWVSIRLDSTLRLYHAHTYQHLQDVDIEPYVSKMLGTGKLGFSFVRITALMVSCNRLWVGTGNGVIISIPLTETNKTSGVPGNRPGSVIRVYGDENSDKVTPGTFIPYCSMAHAQLCFHGHRDAVKFFVAVPGQVISPQSSSSGTDLTGDKAGPSAQEPGSQTPLKSMLVISGGEGYIDFRMGDEGGESELLGEDLPLEPSVTKAERSHLIVWQVMYGNE

SEQ ID NO: 48243 - protein, 1078 aa, Artificial Sequence
  derived and/or modified sequence
SVKVSNSPEPQKAVEQEDELSDVSQGGSKATTPASTANSDVATIPTDTPLKEENEGFVKVTDAPNKSEISKHIEVQVAQETRNVSTGSAENEEKSEVQAIIESTPELDMDKDLSGYKGSSTPTKGIENKAFDRNTESLFEELSSAGSGLIGDVDEGADLLGMGREVENLILENTQLLETKNALNIVKNDLIAKVDELTCEKDVLQGELEAVKQAKLKLEEKNRELEEELRKARAEAEDARQKAKDDDDSDIPTAQRKRFTRVEMARVLMERNQYKERLMELQEAVRWTEMIRASRENPAMQEKKRSSIWQFFSRLFSSSSNTTKKPEPPVNLKYNAPTSHVTPSVKKRSSTLSQLPGDKSKAFDFLSEETEASLASRREQKREQYRQVKAHVQKEDGRVQAFGWSLPQKYKQVTNGQGENKMKNLPVPVYLRPLDEKDTSMKKLWCAVGVNLSGGKTRDGGSVVGASVFYKDVAGLDTEGSKQRSASQSSLDKLDQELKEQQKELKNQEELSSLVWICTSTHSATKVLIIDAVQPGNILDSFTVCNSHVLCIASVPGARETDYPAGEDLSESGQVDKASLCGSMTSNSSAETDSLLGGITVVGCSAEGVTGAATSPSTNGASPVMDKPPEMEAENSEVDENVPTAEEATEATEGNAGSAEDTVDISQTGVYTEHVFTDPLGVQIPEDLSPVYQSSNDSDAYKDQISVLPNEQDLVREEAQKMSSLLPTMWLGAQNGCLYVHSSVAQWRKCLHSIKLKDSILSIVHVKGIVLVALADGTLAIFHRGVDGQWDLSNYHLLDLGRPHHSIRCMTVVHDKVWCGYRNKIYVVQPKAMKIEKSFDAHPRKESQVRQLAWVGDGVWVSIRLDSTLRLYHAHTYQHLQDVDIEPYVSKMLGTGKLGFSFVRITALMVSCNRLWVGTGNGVIISIPLTETNKTSGVPGNRPGSVIRVYGDENSDKVTPGTFIPYCSMAHAQLCFHGHRDAVKFFVAVPGQVISPQSSSSGTDLTGDKAGPSAQEPGSQTPLKSMLVISGGEGYIDFRMGDEGGESELLGEDLPLEPSVTKAERSHLIVWQVMYGNE

SEQ ID NO: 48244 - protein, 919 aa, Artificial Sequence
  derived and/or modified sequence
MVMRWGERNDVIAWELLQDGVENALNIVKNDLIAKVDELTCEKDVLQGELEAVKQAKLKLEEKNRELEEELRKARAEAEDARQKAKDDDDSDIPTAQRKRFTRVEMARVLMERNQYKERLMELQEAVRWTEMIRASRENPAMQEKKRSSIWQFFSRLFSSSSNTTKKPEPPVNLKYNAPTSHVTPSVKKRSSTLSQLPGDKSKAFDFLSEETEASLASRREQKREQYRQVKAHVQKEDGRVQAFGWSLPQKYKQVTNGQGENKMKNLPVPVYLRPLDEKDTSMKLWCAVGVNLSGGKTRDGGSVVGASVFYKDVAGLDTEGSKQRSASQSSLDKLDQELKEQQKELKNQEELSSLVWICTSTHSATKVLIIDAVQPGNILDSFTVCNSHVLCIASVPGARETDYPAGEDLSESGQVDKASLCGSMTSNSSAETDSLLGGITVVGCSAEGVTGAATSPSTNGASPVMDKPPEMEAENSEVDENVPTAEEATEATEGNAGSAEDTVDISQTGVYTEHVFTDPLGVQIPEDLSPVYQSSNDSDAYKDQISVLPNEQDLVREEAQKMSSLLPTMWLGAQNGCLYVHSSVAQWRKCLHSIKLKDSILSIVHVKGIVLVALADGTLAIFHRGVDGQWDLSNYHLLDLGRPHHSIRCMTVVHDKVWCGYRNKIYVVQPKAMKIEKSFDAHPRKESQVRQLAWVGDGVWVSIRLDSTLRLYHAHTYQHLQDVDIEPYVSKMLGTGKLGFSFVRITALMVSCNRLWVGTGNGVIISIPLTETNKTSGVPGNRPGSVIRVYGDENSDKVTPGTFIPYCSMAHAQLCFHGHRDAVKFFVAVPGQVISPQSSSSGTDLTGDKAGPSAQEPGSQTPLKSMLVISGGEGYIDFRMGDEGGESELLGEDLPLEPSVTKAERSHLIVWQVMYGNE

SEQ ID NO: 48245 - DNA, 3966 bp, Artificial Sequence
  derived and/or modified sequence
atggagctggaggacggcgtggtgtaccaggaggagcccggcggcagcggcgccgtgatgagcgagagagtgagcggcctggccggcagcatctacagagagttcgagagactgatcggcagatacgacgaggaggtggtgaaggagctgatgcccctggtggtggccgtgctggagaacctggacagcgtgttcgcccaggaccaggagcaccaggtggagctggagctgctgagagacgacaacgagcagctgatcacccagtacgagagagagaaggccctgagaaagcacgccgaggagaagttcatcgagttcgaggacagccaggagcaggagaagaaggacctgcagaccagagtggagagcctggagagccagaccagacagctggagctgaaggccaagaactacgccgaccagatcagcagactggaggagagagaggccgagctgaagaaggagtacaacgccctgcaccagagacacaccgagatgatccacaactacatggagcacctggagagaaccaagctgcaccagctgagcggcagcgaccagctggagagcaccgcccacagcagaatcagaaaggagagacccatcagcctgggcatcttccccctgcccgccggcgacggcctgctgacccccgacgcccagaagggcggcgagacccccggcagcgagcagtggaagttccaggagctgagccagcccagaagccacaccagcctgaaggtgagcaacagccccgagccccagaaggccgtggagcaggaggacgagctgagcgacgtgagccagggcggcagcaaggccaccacccccgccagcaccgccaacagcgacgtggccaccatccccaccgacacccccctgaaggaggagaacgagggcttcgtgaaggtgaccgacgcccccaacaagagcgagatcagcaagcacatcgaggtgcaggtggcccaggagaccagaaacgtgagcaccggcagcgccgagaacgaggagaagagcgaggtgcaggccatcatcgagagcacccccgagctggacatggacaaggacctgagcggctacaagggcagcagcacccccaccaagggcatcgagaacaaggccttcgacagaaacaccgagagcctgttcgaggagctgagcagcgccggcagcggcctgatcggcgacgtggacgagggcgccgacctgctgggcatgggcagagaggtggagaacctgatcctggagaacacccagctgctggagaccaagaacgccctgaacatcgtgaagaacgacctgatcgccaaggtggacgagctgacctgcgagaaggacgtgctgcagggcgagctggaggccgtgaagcaggccaagctgaagctggaggagaagaacagagagctggaggaggagctgagaaaggccagagccgaggccgaggacgccagacagaaggccaaggacgacgacgacagcgacatccccaccgcccagagaaagagattcaccagagtggagatggccagagtgctgatggagagaaaccagtacaaggagagactgatggagctgcaggaggccgtgagatggaccgagatgatcagagccagcagagagaaccccgccatgcaggagaagaagagaagcagcatctggcagttcttcagcagactgttcagcagcagcagcaacaccaccaagaagcccgagccccccgtgaacctgaagtacaacgcccccaccagccacgtgacccccagcgtgaagaagagaagcagcaccctgagccagctgcccggcgacaagagcaaggccttcgacttcctgagcgaggagaccgaggccagcctggccagcagaagagagcagaagagagagcagtacagacaggtgaaggcccacgtgcagaaggaggacggcagagtgcaggccttcggctggagcctgccccagaagtacaagcaggtgaccaacggccagggcgagaacaagatgaagaacctgcccgtgcccgtgtacctgagacccctggacgagaaggacaccagcatgaagctgtggtgcgccgtgggcgtgaacctgagcggcggcaagaccagagacggcggcagcgtggtgggcgccagcgtgttctacaaggacgtggccggcctggacaccgagggcagcaagcagagaagcgccagccagagcagcctggacaagctggaccaggagctgaaggagcagcagaaggagctgaagaaccaggaggagctgagcagcctggtgtggatctgcaccagcacccacagcgccaccaaggtgctgatcatcgacgccgtgcagcccggcaacatcctggacagcttcaccgtgtgcaacagccacgtgctgtgcatcgccagcgtgcccggcgccagagagaccgactaccccgccggcgaggacctgagcgagagcggccaggtggacaaggccagcctgtgcggcagcatgaccagcaacagcagcgccgagaccgacagcctgctgggcggcatcaccgtggtgggctgcagcgccgagggcgtgaccggcgccgccaccagccccagcaccaacggcgccagccccgtgatggacaagccccccgagatggaggccgagaacagcgaggtggacgagaacgtgcccaccgccgaggaggccaccgaggccaccgagggcaacgccggcagcgccgaggacaccgtggacatcagccagaccggcgtgtacaccgagcacgtgttcaccgaccccctgggcgtgcagatccccgaggacctgagccccgtgtaccagagcagcaacgacagcgacgcctacaaggaccagatcagcgtgctgcccaacgagcaggacctggtgagagaggaggcccagaagatgagcagcctgctgcccaccatgtggctgggcgcccagaacggctgcctgtacgtgcacagcagcgtggcccagtggagaaagtgcctgcacagcatcaagctgaaggacagcatcctgagcatcgtgcacgtgaagggcatcgtgctggtggccctggccgacggcaccctggccatcttccacagaggcgtggacggccagtgggacctgagcaactaccacctgctggacctgggcagaccccaccacagcatcagatgcatgaccgtggtgcacgacaaggtgtggtgcggctacagaaacaagatctacgtggtgcagcccaaggccatgaagatcgagaagagcttcgacgcccaccccagaaaggagagccaggtgagacagctggcctgggtgggcgacggcgtgtgggtgagcatcagactggacagcaccctgagactgtaccacgcccacacctaccagcacctgcaggacgtggacatcgagccctacgtgagcaagatgctgggcaccggcaagctgggcttcagcttcgtgagaatcaccgccctgatggtgagctgcaacagactgtgggtgggcaccggcaacggcgtgatcatcagcatccccctgaccgagaccaacaagaccagcggcgtgcccggcaacagacccggcagcgtgatcagagtgtacggcgacgagaacagcgacaaggtgacccccggcaccttcatcccctactgcagcatggcccacgcccagctgtgcttccacggccacagagacgccgtgaagttcttcgtggccgtgcccggccaggtgatcagcccccagagcagcagcagcggcaccgacctgaccggcgacaaggccggccccagcgcccaggagcccggcagccagacccccctgaagagcatgctggtgatcagcggcggcgagggctacatcgacttcagaatgggcgacgagggcggcgagagcgagctgctgggcgaggacctgcccctggagcccagcgtgaccaaggccgagagaagccacctgatcgtgtggcaggtgatgtacggcaacgagtag

SEQ ID NO: 48246 - DNA, 3237 bp, Artificial Sequence
  derived and/or modified sequence
agcgtgaaggtgagcaacagccccgagccccagaaggccgtggagcaggaggacgagctgagcgacgtgagccagggcggcagcaaggccaccacccccgccagcaccgccaacagcgacgtggccaccatccccaccgacacccccctgaaggaggagaacgagggcttcgtgaaggtgaccgacgcccccaacaagagcgagatcagcaagcacatcgaggtgcaggtggcccaggagaccagaaacgtgagcaccggcagcgccgagaacgaggagaagagcgaggtgcaggccatcatcgagagcacccccgagctggacatggacaaggacctgagcggctacaagggcagcagcacccccaccaagggcatcgagaacaaggccttcgacagaaacaccgagagcctgttcgaggagctgagcagcgccggcagcggcctgatcggcgacgtggacgagggcgccgacctgctgggcatgggcagagaggtggagaacctgatcctggagaacacccagctgctggagaccaagaacgccctgaacatcgtgaagaacgacctgatcgccaaggtggacgagctgacctgcgagaaggacgtgctgcagggcgagctggaggccgtgaagcaggccaagctgaagctggaggagaagaacagagagctggaggaggagctgagaaaggccagagccgaggccgaggacgccagacagaaggccaaggacgacgacgacagcgacatccccaccgcccagagaaagagattcaccagagtggagatggccagagtgctgatggagagaaaccagtacaaggagagactgatggagctgcaggaggccgtgagatggaccgagatgatcagagccagcagagagaaccccgccatgcaggagaagaagagaagcagcatctggcagttcttcagcagactgttcagcagcagcagcaacaccaccaagaagcccgagccccccgtgaacctgaagtacaacgcccccaccagccacgtgacccccagcgtgaagaagagaagcagcaccctgagccagctgcccggcgacaagagcaaggccttcgacttcctgagcgaggagaccgaggccagcctggccagcagaagagagcagaagagagagcagtacagacaggtgaaggcccacgtgcagaaggaggacggcagagtgcaggccttcggctggagcctgccccagaagtacaagcaggtgaccaacggccagggcgagaacaagatgaagaacctgcccgtgcccgtgtacctgagacccctggacgagaaggacaccagcatgaagaagctgtggtgcgccgtgggcgtgaacctgagcggcggcaagaccagagacggcggcagcgtggtgggcgccagcgtgttctacaaggacgtggccggcctggacaccgagggcagcaagcagagaagcgccagccagagcagcctggacaagctggaccaggagctgaaggagcagcagaaggagctgaagaaccaggaggagctgagcagcctggtgtggatctgcaccagcacccacagcgccaccaaggtgctgatcatcgacgccgtgcagcccggcaacatcctggacagcttcaccgtgtgcaacagccacgtgctgtgcatcgccagcgtgcccggcgccagagagaccgactaccccgccggcgaggacctgagcgagagcggccaggtggacaaggccagcctgtgcggcagcatgaccagcaacagcagcgccgagaccgacagcctgctgggcggcatcaccgtggtgggctgcagcgccgagggcgtgaccggcgccgccaccagccccagcaccaacggcgccagccccgtgatggacaagccccccgagatggaggccgagaacagcgaggtggacgagaacgtgcccaccgccgaggaggccaccgaggccaccgagggcaacgccggcagcgccgaggacaccgtggacatcagccagaccggcgtgtacaccgagcacgtgttcaccgaccccctgggcgtgcagatccccgaggacctgagccccgtgtaccagagcagcaacgacagcgacgcctacaaggaccagatcagcgtgctgcccaacgagcaggacctggtgagagaggaggcccagaagatgagcagcctgctgcccaccatgtggctgggcgcccagaacggctgcctgtacgtgcacagcagcgtggcccagtggagaaagtgcctgcacagcatcaagctgaaggacagcatcctgagcatcgtgcacgtgaagggcatcgtgctggtggccctggccgacggcaccctggccatcttccacagaggcgtggacggccagtgggacctgagcaactaccacctgctggacctgggcagaccccaccacagcatcagatgcatgaccgtggtgcacgacaaggtgtggtgcggctacagaaacaagatctacgtggtgcagcccaaggccatgaagatcgagaagagcttcgacgcccaccccagaaaggagagccaggtgagacagctggcctgggtgggcgacggcgtgtgggtgagcatcagactggacagcaccctgagactgtaccacgcccacacctaccagcacctgcaggacgtggacatcgagccctacgtgagcaagatgctgggcaccggcaagctgggcttcagcttcgtgagaatcaccgccctgatggtgagctgcaacagactgtgggtgggcaccggcaacggcgtgatcatcagcatccccctgaccgagaccaacaagaccagcggcgtgcccggcaacagacccggcagcgtgatcagagtgtacggcgacgagaacagcgacaaggtgacccccggcaccttcatcccctactgcagcatggcccacgcccagctgtgcttccacggccacagagacgccgtgaagttcttcgtggccgtgcccggccaggtgatcagcccccagagcagcagcagcggcaccgacctgaccggcgacaaggccggccccagcgcccaggagcccggcagccagacccccctgaagagcatgctggtgatcagcggcggcgagggctacatcgacttcagaatgggcgacgagggcggcgagagcgagctgctgggcgaggacctgcccctggagcccagcgtgaccaaggccgagagaagccacctgatcgtgtggcaggtgatgtacggcaacgagtag

SEQ ID NO: 48247 - DNA, 2760 bp, Artificial Sequence
  derived and/or modified sequence
atggtgatgagatggggcgagagaaacgacgtgatcgcctgggagctgctgcaggacggcgtggagaacgccctgaacatcgtgaagaacgacctgatcgccaaggtggacgagctgacctgcgagaaggacgtgctgcagggcgagctggaggccgtgaagcaggccaagctgaagctggaggagaagaacagagagctggaggaggagctgagaaaggccagagccgaggccgaggacgccagacagaaggccaaggacgacgacgacagcgacatccccaccgcccagagaaagagattcaccagagtggagatggccagagtgctgatggagagaaaccagtacaaggagagactgatggagctgcaggaggccgtgagatggaccgagatgatcagagccagcagagagaaccccgccatgcaggagaagaagagaagcagcatctggcagttcttcagcagactgttcagcagcagcagcaacaccaccaagaagcccgagccccccgtgaacctgaagtacaacgcccccaccagccacgtgacccccagcgtgaagaagagaagcagcaccctgagccagctgcccggcgacaagagcaaggccttcgacttcctgagcgaggagaccgaggccagcctggccagcagaagagagcagaagagagagcagtacagacaggtgaaggcccacgtgcagaaggaggacggcagagtgcaggccttcggctggagcctgccccagaagtacaagcaggtgaccaacggccagggcgagaacaagatgaagaacctgcccgtgcccgtgtacctgagacccctggacgagaaggacaccagcatgaagctgtggtgcgccgtgggcgtgaacctgagcggcggcaagaccagagacggcggcagcgtggtgggcgccagcgtgttctacaaggacgtggccggcctggacaccgagggcagcaagcagagaagcgccagccagagcagcctggacaagctggaccaggagctgaaggagcagcagaaggagctgaagaaccaggaggagctgagcagcctggtgtggatctgcaccagcacccacagcgccaccaaggtgctgatcatcgacgccgtgcagcccggcaacatcctggacagcttcaccgtgtgcaacagccacgtgctgtgcatcgccagcgtgcccggcgccagagagaccgactaccccgccggcgaggacctgagcgagagcggccaggtggacaaggccagcctgtgcggcagcatgaccagcaacagcagcgccgagaccgacagcctgctgggcggcatcaccgtggtgggctgcagcgccgagggcgtgaccggcgccgccaccagccccagcaccaacggcgccagccccgtgatggacaagccccccgagatggaggccgagaacagcgaggtggacgagaacgtgcccaccgccgaggaggccaccgaggccaccgagggcaacgccggcagcgccgaggacaccgtggacatcagccagaccggcgtgtacaccgagcacgtgttcaccgaccccctgggcgtgcagatccccgaggacctgagccccgtgtaccagagcagcaacgacagcgacgcctacaaggaccagatcagcgtgctgcccaacgagcaggacctggtgagagaggaggcccagaagatgagcagcctgctgcccaccatgtggctgggcgcccagaacggctgcctgtacgtgcacagcagcgtggcccagtggagaaagtgcctgcacagcatcaagctgaaggacagcatcctgagcatcgtgcacgtgaagggcatcgtgctggtggccctggccgacggcaccctggccatcttccacagaggcgtggacggccagtgggacctgagcaactaccacctgctggacctgggcagaccccaccacagcatcagatgcatgaccgtggtgcacgacaaggtgtggtgcggctacagaaacaagatctacgtggtgcagcccaaggccatgaagatcgagaagagcttcgacgcccaccccagaaaggagagccaggtgagacagctggcctgggtgggcgacggcgtgtgggtgagcatcagactggacagcaccctgagactgtaccacgcccacacctaccagcacctgcaggacgtggacatcgagccctacgtgagcaagatgctgggcaccggcaagctgggcttcagcttcgtgagaatcaccgccctgatggtgagctgcaacagactgtgggtgggcaccggcaacggcgtgatcatcagcatccccctgaccgagaccaacaagaccagcggcgtgcccggcaacagacccggcagcgtgatcagagtgtacggcgacgagaacagcgacaaggtgacccccggcaccttcatcccctactgcagcatggcccacgcccagctgtgcttccacggccacagagacgccgtgaagttcttcgtggccgtgcccggccaggtgatcagcccccagagcagcagcagcggcaccgacctgaccggcgacaaggccggccccagcgcccaggagcccggcagccagacccccctgaagagcatgctggtgatcagcggcggcgagggctacatcgacttcagaatgggcgacgagggcggcgagagcgagctgctgggcgaggacctgcccctggagcccagcgtgaccaaggccgagagaagccacctgatcgtgtggcaggtgatgtacggcaacgagtag

SEQ ID NO: 48248 - DNA, 825 bp, Artificial Sequence
  derived and/or modified sequence
atggagctggaggacggcgtggtgtaccaggaggagcccggcggcagcggcgccgtgatgagcgagagagtgagcggcctggccggcagcatctacagagagttcgagagactgatcggcagatacgacgaggaggtggtgaaggagctgatgcccctggtggtggccgtgctggagaacctggacagcgtgttcgcccaggaccaggagcaccaggtggagctggagctgctgagagacgacaacgagcagctgatcacccagtacgagagagagaaggccctgagaaagcacgccgaggagaagttcatcgagttcgaggacagccaggagcaggagaagaaggacctgcagaccagagtggagagcctggagagccagaccagacagctggagctgaaggccaagaactacgccgaccagagcgccatgagccccggctgcatgctgctgttcgtgttcggcttcgtgggcggcgccgtggtgatcaacagcgccatcctggtgagcctgagcgtgctgctgctggtgcacttcagcatcagcaccggcgtgcccgccctgacccagaacctgcccagaatcctgagaaaggagagacccatcagcctgggcatcttccccctgcccgccggcgacggcctgctgacccccgacgcccagaagggcggcgagacccccggcagcgagcagtggaagttccaggagctgagccagcccagaagccacaccagcctgaaggtgagcaacagccccgagccccagaaggccgtggagcaggaggtgagaatggtgctgctgaacatcctgcagaaggtgtactag

SEQ ID NO: 48249 - DNA, 3966 bp, Artificial Sequence
  derived and/or modified sequence
atggaactggaagatggcgttgtgtaccaggaggagcctggcgggagtggggctgttatgagtgaaagagtgtcagggctagctggctcaatttatagagaattcgaacgactaattggccgttatgacgaggaagttgtgaaagaactgatgcccttggtggtggccgttctggaaaatctcgattccgtctttgctcaggaccaagagcaccaggtcgaattagaactattacgcgatgacaacgagcagctcattacccagtacgagagagagaaggcccttcggaaacacgctgaggagaagtttatcgaattcgaggactcacaggagcaggagaagaaggacttgcagacaagagtcgagtctctggagtctcaaacacggcagctggagctaaaagctaaaaactacgccgatcagatcagtagactcgaagagagagaggccgaactgaaaaaagaatacaatgcgctgcaccagcgccatacagaaatgattcacaactacatggagcacctcgagagaacaaaacttcaccagctaagtggctccgaccagttggaatccacagcccactccaggattcggaaagagagacccatttcgctcgggatcttccctttgcccgcaggggacgggcttctcacgcccgacgctcagaaaggcggggagacccctggttcagaacagtggaagtttcaggaattgtctcaaccgcgaagtcacacctccctcaaggtaagcaattcacctgagccacagaaagcagtggagcaggaagacgaactgtccgatgtttcccagggaggttctaaagccactaccccggccagcaccgccaactcagacgtcgccaccatcccaaccgatactccactgaaggaggagaatgagggattcgtgaaggtcacagacgcgccgaacaaaagcgaaatttcgaagcacatcgaggtgcaggttgctcaggaaacgagaaacgtgtccacaggcagcgccgaaaacgaagaaaagtcagaagttcaggctattatagagtctactccagagctggacatggataaagacttgagcggatataaaggatcaagcactcctaccaaggggattgagaataaggcctttgatcgaaataccgagagtctctttgaggaactgtcaagcgccgggagtggcttaataggcgacgttgatgaaggtgctgacctcttgggtatgggtcgtgaagtggaaaatctgatcctggagaatacccaactgttggaaactaaaaatgctctgaacatagtgaaaaacgatttgattgccaaagtggatgaattgacctgtgagaaggacgtgcttcagggtgaacttgaagccgttaagcaagccaaactgaagctggaagagaagaaccgagagctggaggaggaactgagaaaggcgagggccgaagcggaggatgcacgccagaaggccaaggatgatgatgatagtgatatccccaccgctcagcggaaacggttcaccagagttgagatggctcgagtcctgatggagagaaatcagtataaggagcggttgatggagttacaagaagccgtacgatggaccgagatgattcgggcctcgcgcgagaatccagccatgcaggagaagaaacgcagctccatctggcaattcttctcccgtctcttctcctcgtctagcaacacaacaaaaaaaccggaaccacctgtgaaccttaaatacaatgctcccacctcacacgtgaccccctcagtaaagaagcgctcaagtacgttatcgcagctccctggagacaagagcaaagccttcgacttcctttcagaggagaccgaagcctctctggcatctcgccgggagcagaagcgcgagcagtaccgtcaggtaaaggcccacgtgcagaaagaagacggccgtgttcaggctttcggctggtcactccctcagaaatataagcaggttacaaatggccagggcgagaacaagatgaagaatcttcctgtgccggtttacctgcggccacttgacgagaaagatacctctatgaagctctggtgcgccgtgggcgtcaatctgagcggtggaaagacccgcgacgggggctcggtggtgggcgccagcgtcttctataaggacgtggccggtcttgacacagagggatccaagcagagatcagcatctcagtctagccttgacaaactcgaccaagagttgaaggagcagcagaaggaactgaagaaccaggaagagctgtcttcactcgtctggatttgtacaagtacccacagcgctaccaaggttttgataattgatgctgtccaacccggtaatatcttagatagctttactgtgtgtaactcccatgtcctgtgtatcgcctccgtcccaggagcaagggaaactgactatcccgccggcgaggacctgtcagagagtggccaagttgacaaggcttccctgtgcgggtctatgacgtccaacagtagtgctgaaaccgattccttgctcggcggcattaccgttgtgggttgctccgccgagggtgtgaccggtgcggccacttcaccctcgacaaacggcgcgtcacctgttatggacaagccccccgagatggaagcggaaaacagcgaagtcgacgaaaacgtgccaactgctgaggaggccaccgaggccacagaggggaatgctgggtctgcggaggataccgttgatataagccagaccggcgtctacacggaacatgtctttaccgaccctctcggtgtgcagattcctgaggatctttcacctgtataccagtcatccaacgacagcgacgcatataaggaccagatttctgtgttgcccaacgaacaggatcttgttcgcgaggaggcccaaaaaatgtccagtctcctgccaacaatgtggctaggtgcacaaaacggttgcctctatgtccactccagtgtcgcccagtggcggaagtgtctacacagtattaagcttaaagattctattctctcgatagtgcacgtcaaggggattgtgcttgttgccttggctgatggaacactagcaatttttcaccgcggtgttgacggacagtgggacctgtcgaactaccacttactggatctcggacgtccccaccactccatcaggtgtatgactgtggtgcacgacaaggtgtggtgcggataccgcaataagatctacgttgtgcagcccaaggccatgaagattgaaaaatcctttgatgctcatcctcgcaaggagtctcaggtgcgacagctagcatgggtgggcgacggggtgtgggtttctattcggctcgactcaacactgcgtctctatcacgcacacacataccagcacctgcaggacgtagatattgaaccatatgtgagcaaaatgttgggcaccgggaagttaggattttctttcgtacgtatcacagccctgatggtctcgtgcaataggctgtgggtgggaactgggaatggtgtgatcatctccatcccgctgacagaaaccaacaaaacctcaggagtcccgggtaatcgtcccgggtctgtcatccgagtttacggcgatgaaaacagcgataaggtgacccccggtactttcatcccatactgttccatggctcatgcacaactttgttttcacgggcacagagacgctgttaaattcttcgtcgctgtaccaggacaagttatcagccctcagtccagcagctcggggaccgacctgaccggagataaggcggggccgtctgcccaggagccaggaagtcagacaccgctgaagtccatgctggtcatctccggtggcgagggctatattgacttcagaatgggtgatgaggggggtgagagcgagctcctcggagaggacctaccattagagccatccgtgacaaaagctgaacgatcccatttgattgtttggcaggtgatgtatggaaacgagtag

SEQ ID NO: 48250 - DNA, 3237 bp, Artificial Sequence
  derived and/or modified sequence
tctgtgaaagtgtctaacagcccggaacctcaaaaggccgtggaacaagaggatgagctttcagatgtctcacagggcggctccaaggctaccactccagcttccactgctaactctgatgttgccactattccaacagatacacctttgaaagaggaaaacgaagggtttgtgaaagttaccgacgccccaaataaatcagagatttcgaaacatatcgaggtacaagtggcccaggagactcgcaatgtctctaccgggtctgcagagaacgaggagaaatccgaagtacaggcaatcattgagtctacgccagaactcgacatggacaaggatctgagcggatacaaagggtcttcaacgccgaccaagggaattgagaataaagcattcgatcggaataccgaaagtctctttgaggagctgtcgtccgccggctccggccttattggggacgttgacgagggtgctgacctgctggggatgggaagggaagtggaaaatttgatcctggagaatactcagctgttggaaactaagaacgcactgaatattgttaagaatgatcttatagccaaagtggatgagttgacatgtgagaaggatgtcctacagggagagttagaggccgttaaacaggccaagctaaaactcgaggagaagaatcgggagttagaggaagagctgcggaaagctagagccgaggccgaggacgcacgccagaaagctaaggatgacgatgacagcgacatccctacagcccagaggaagcgtttcacccgagtagagatggcacgggttctcatggagagaaaccagtacaaggaaaggttgatggagctgcaggaagcggttaggtggacggaaatgatcagggcttcacgcgaaaatcccgccatgcaggagaagaagaggtcctccatctggcagttcttctctaggttgttctccagcagcagcaacacaaccaagaagccagagccacctgttaaccttaaatacaacgcccctaccagccatgtgacgccttcagtgaagaagcgctcttctactctaagtcagcttccaggagataaatcgaaggcatttgactttttgtccgaagagaccgaggccagtctggcgtccagacgcgaacagaagcgagagcagtaccgacaggtcaaagctcacgttcagaaagaagatggtagagtgcaggctttcggctggagtctccctcagaaatacaagcaagtcaccaatggacagggggaaaataaaatgaagaaccttcctgttcccgtgtatctcagaccacttgatgagaaggacacttccatgaagaagctgtggtgcgccgtaggcgtgaatctgtcgggggggaaaacccgcgatggaggatcagttgttggcgcctcggtgttctataaggacgttgcaggacttgacaccgaaggaagtaaacagagatctgcaagtcagagcagtctcgataagttggatcaagaactgaaagaacagcagaaggagcttaaaaatcaggaagaactctccagcctcgtctggatttgcaccagtacccatagtgcaactaaggtcttaattatcgacgccgtacaaccaggaaatatccttgatagtttcaccgtgtgtaattcccatgtgttatgtatagcctccgtccctggcgcgcgggaaaccgattacccagcaggagaagacctgtctgaatcagggcaggtcgataaggcctccctgtgcggttccatgacgtccaattcaagcgctgagactgactctttactcggcggaatcaccgtcgtcggatgcagcgcagaaggcgtcactggggccgccacttcccccagtacaaatggcgcatcccctgtgatggataagccacctgagatggaggctgagaactcagaggtagatgaaaacgtgccgactgctgaggaggccaccgaggctacagaaggcaacgctgggagcgccgaagatacagttgatatttctcagactggagtgtacaccgagcatgtgttcactgaccccctgggcgtacagatcccagaggatctgtccccggtgtaccaatcctccaatgattctgacgcatacaaagatcagatctctgtcttgcccaacgaacaagatctggtgagggaggaggctcaaaaaatgtcctctcttttgcctactatgtggttaggggcccagaacggctgtttgtacgtccatagcagcgtcgcacagtggcgaaagtgcttacactctataaagcttaaggattccatcctctcgattgttcacgtgaagggcatagtgttagtcgcgttggctgatggtacgttagctatatttcatcgtggtgtggacggccagtgggatctgtcaaattatcaccttctggacttgggtcgccctcaccatagcattaggtgcatgaccgtggtgcacgacaaggtatggtgcggctatcgaaacaaaatttacgtggtgcagcctaaagcgatgaagatcgagaagtcctttgatgcccatcccagaaaggaaagccaggtgcggcagctggcatgggtaggcgacggggtgtgggtctccatcagactcgattccaccctgcgcctgtaccacgcccacacctaccaacacctgcaggatgttgacattgaaccatacgtgagtaagatgttaggtactgggaagctcgggttctcttttgttcgaataaccgctctgatggtttcctgtaataggctttgggttggcaccggtaacggcgtcatcatcagcattcccttaacagagactaacaagacatccggggtcccaggaaatcgtcctggatcggtcattagggtgtacggtgacgagaactctgataaggttactccgggaactttcatcccatactgtagcatggcccatgcacagctgtgcttccacggccaccgtgatgctgtcaagttctttgtggccgtgcccggtcaagtcataagtccacagtcatcgtcttcgggtacagacctgacgggggacaaagctggtccaagtgcgcaggaacccgggtcccaaacccctctaaagtcaatgctcgtgatcagcggaggcgaggggtacattgatttccggatgggagatgaggggggtgaatccgagctgctgggtgaagatttacccctggagccctctgttactaaagcagagagaagccatcttattgtttggcaggtgatgtatggaaatgaatag

SEQ ID NO: 48251 - DNA, 2760 bp, Artificial Sequence
  derived and/or modified sequence
atggtcatgagatggggcgagaggaatgatgtgatagcttgggagctgcttcaggatggtgtggagaatgcgctgaacatagtgaaaaatgatctgattgctaaagtggacgaactaacttgcgagaaggacgttcttcagggcgagctggaggctgttaagcaggccaagttgaagctggaagaaaaaaaccgagagctcgaggaagagttaagaaaagcccgagccgaggcagaagatgcccgacagaaagcaaaggacgacgacgactcagacatccccacagcacagcggaaacgctttacaagagttgaaatggccagggtactgatggagcgtaatcagtataaggagcggctcatggagctgcaagaggcagttaggtggaccgagatgatccgcgccagcagagagaaccctgccatgcaggaaaaaaaacgttcttctatctggcagtttttcagccgcctgttctcatcatcatccaacactacgaaaaagcctgagcctcccgttaacctgaagtataatgcccccacgtctcacgtgacccctagcgtgaagaagcgctcttctaccctttcccagctgcctggcgataagtccaaagcttttgatttcctgagtgaggagaccgaggcgtcactggcctccaggagagaacagaagagggaacaatatagacaggtaaaagcacacgtgcagaaggaagacggccgtgtccaggcatttggctggtcactgccacagaagtacaagcaggtcacaaatgggcaaggagagaataaaatgaaaaacctcccagtccccgtgtacctgcgcccacttgacgagaaggacactagtatgaagctctggtgtgctgtcggcgtgaatttgtctggcgggaaaacacgcgacggcggcagcgttgtcggagcctccgtcttttataaagacgtagccggtctggacactgagggctccaaacagaggagtgcctcacagtcttccctggacaagctcgatcaggagcttaaagaacagcaaaaggaactgaaaaatcaggaggagctctcatcgctcgtgtggatctgtacctcaacccattctgccacaaaggtgctaattatagatgcagtgcagcccggcaacatcttagatagttttaccgtgtgcaattcacatgtcttatgcattgcatcagtccctggagcccgcgaaactgattatcccgccggtgaggatctctctgagagcggccaggtggataaagccagtctctgtggctctatgacgagcaattcatctgcagaaaccgatagccttctcgggggcattaccgtggtgggctgcagtgctgagggcgtgaccggagcagccaccagcccttctacaaatggagcctcccccgtgatggataaacctcctgagatggaggccgaaaactcagaggttgacgaaaacgttcccaccgccgaagaggcaactgaggcaactgaggggaatgccggctcagcagaagataccgtggacatttcccagactggcgtgtatacagaacacgttttcacagatccgctaggcgtccaaatcccagaagatctgtcgccagtttaccagagcagcaacgacagcgatgcttataaggatcagatctcagttcttccgaacgagcaggacctagttagagaagaagcccagaagatgtccagtttgctgcccaccatgtggctgggagctcagaacggttgcctgtacgtgcacagttctgtcgcacagtggaggaaatgtctccattctattaaacttaaagactccattctgagcatagtgcacgtgaagggcatcgttctagtagcccttgccgatggtaccctggccatcttccaccggggcgtcgacggtcagtgggatctttcaaactatcatttgctggaccttggacgcccacaccacagtatcagatgcatgactgtcgttcatgacaaagtgtggtgtggttacagaaataagatatatgtggtccagcctaaagccatgaagatcgaaaagtccttcgacgcccatcctaggaaagaatctcaggtgcgccagctggcatgggtgggagatggggtgtgggtgtccattaggctggacagtacccttaggctgtatcatgcccacacctaccagcacttacaggacgtggacatagaaccatacgtcagcaagatgttagggaccgggaaactgggcttttctttcgttcgaatcacggcgttgatggtttcttgtaacagactgtgggtaggtacaggtaacggcgtaataatcagcatccccctgactgaaacaaataaaacaagtggggtgcctggcaataggcccggttctgtcatccgcgtgtatggcgacgagaactctgacaaagtgacacctggaacttttattccgtattgctctatggcccacgcccagttgtgtttccatggacacagggacgccgtgaagttcttcgttgccgttcctggccaagtgatatcccctcagtcaagcagttcaggcacggatctgactggagataaggccggcccctccgcacaagagcctggtagccagactccccttaagtccatgctcgtaatttccgggggcgaaggttacatagattttagaatgggcgacgagggcggcgagtcagagctgctcggcgaggatttgcctcttgagcccagcgtaacgaaggccgaaaggtcgcatttaatcgtgtggcaggtgatgtacggcaatgaatag

SEQ ID NO: 48252 - DNA, 825 bp, Artificial Sequence
  derived and/or modified sequence
atggagctcgaagatggcgtggtttaccaggaggaaccaggcgggagcggagctgttatgagtgagcgggtttcagggctggccggatccatctaccgagaatttgaacgactcatcggtcgctatgacgaagaagtggtgaaggaactcatgccactcgtggttgccgtgctggagaacctggactccgtgtttgcgcaggaccaggagcaccaggtggagctcgagctgttgagggacgacaacgagcagctgatcacacagtacgaacgggagaaggcgctgcgcaagcatgcggaggaaaaattcatcgagttcgaagactcacaagagcaggaaaaaaaagacctgcagactcgcgttgagagcctggaatcccagacccggcagctggagttgaaagcaaagaactacgccgatcagtctgcaatgagccctggatgcatgctgctgttcgtttttgggttcgttgggggtgccgttgtgatcaactctgcaatcttggtatctctctcagtgctgctgctggtgcacttcagcatctctaccggcgtgcctgccttgacacagaacttaccgcgtatactgcgcaaagagcgtcctatttccttaggcatctttccgttgccggctggcgatggactgctaactcctgatgctcaaaaaggaggcgagacgcccggttccgaacagtggaaattccaagagctgagtcagcctcggtcccacacaagtctgaaggtgtctaattcacctgagcctcagaaagccgtggagcaggaggttcgcatggtgttgctaaatattctgcagaaggtgtactag

SEQ ID NO: 48253 - DNA, 3966 bp, Artificial Sequence
  derived and/or modified sequence
atggagctggaggatggagtggtgtaccaggaggagcccggcggcagcggggctgtgatgtctgagcgggtgtctggcctggccggcagcatctaccgggagtttgagcggctgattggccgctatgatgaggaggtggtgaaggagctgatgcccctggtggtggccgtgctggagaacctggacagcgtgtttgcccaggaccaggagcaccaggtggagctggagctgctgagagatgacaatgagcagctgatcacccagtatgagcgggagaaggccctgaggaagcatgctgaggagaagttcatcgagtttgaggacagccaggagcaggagaagaaggacctgcagaccagggtggagagcctggagagccagacccggcagctggagctgaaggccaagaactatgctgaccagatcagccggctggaggagcgggaggccgagctgaagaaggagtacaatgccctgcaccagaggcacacagagatgatccacaactacatggagcacctggagaggaccaagctgcaccagctgagcggcagtgaccagctggagagcacagcccacagccgcatcaggaaggagcggcccatcagcctgggcatcttccccctgcctgctggagatggcctgctgaccccagatgcccagaagggcggggagaccccaggcagcgagcagtggaagttccaggagctgagccagcccaggagccacaccagcctgaaggtgagcaacagccctgagccccagaaggctgtggagcaggaggatgagctgagtgatgtgtcccagggcggcagcaaggccaccaccccagccagcacagccaacagtgatgtggccaccatccccacagacacccccctgaaggaggagaatgaaggatttgtgaaggtgacagatgcccccaacaagtctgagatcagcaagcacatcgaggtgcaggtggcccaggagaccagaaatgtgtccacaggcagcgcagaaaatgaggagaagtctgaggtgcaggccatcatcgagagcaccccagagctggacatggacaaggacctgagcggctacaagggcagcagcacccccaccaagggcatcgagaacaaggcctttgacaggaacacagagagcctgtttgaggagctgagcagcgctggcagcggcctgattggagatgtggatgagggcgctgacctgctgggcatgggccgggaggtggagaacctgatcctggagaacacccagctgctggagaccaagaatgccctgaacatcgtgaagaatgacctgattgccaaggtggatgagctgacctgtgagaaggatgtgctgcagggcgagctggaggccgtgaagcaggccaagctgaagctggaggagaagaaccgggagctggaggaggagctgaggaaggcccgggcagaggctgaagatgcccggcagaaggccaaggatgatgatgacagcgacatccccacagcccagaggaagcgcttcaccagggtggagatggcccgggtgctgatggagaggaaccagtacaaggagcggctgatggagctgcaggaggccgtgcgctggacagagatgatccgggccagccgggagaacccagccatgcaggagaagaagaggagcagcatctggcagttcttcagccgcctcttcagcagcagcagcaacaccaccaagaagccagagccccctgtgaacctgaagtacaatgcccccaccagccacgtgacccccagcgtgaagaagaggagcagcaccctgagccagctgcccggggacaagagcaaggcctttgacttcctgtctgaggagacagaggccagcctggccagcagaagagagcagaagcgggagcagtaccggcaggtgaaggcccacgtgcagaaggaggatggccgggtgcaggccttcggctggagcctgccccagaagtacaagcaggtgaccaacggccagggcgagaacaagatgaagaacctgcctgtgcctgtgtacctgcggcccctggatgagaaggacacctccatgaagctgtggtgtgctgtgggcgtgaacctgagcggcggcaagaccagagatggcggctctgtggtgggcgccagcgtcttctacaaggatgtggccggcctggacacagagggcagcaagcagaggtctgccagccagagcagcctggacaagctggaccaggagctgaaggagcagcagaaggagctgaagaaccaggaggagctgagcagcctggtgtggatctgcaccagcacccacagcgccaccaaggtgctgatcattgatgctgtgcagcccggcaacatcctggacagcttcaccgtgtgcaacagccacgtgctgtgcatcgcctctgtgcctggggcccgggagacagactacccagctggggaggacctgtctgagagcggccaggtggacaaggccagcctgtgtggctccatgaccagcaacagcagcgctgagacagacagcctgctgggcggcatcaccgtggtgggctgcagcgctgagggcgtgactggagctgccaccagccccagcaccaacggggccagccctgtgatggacaagcccccagagatggaggctgaaaattctgaggtggatgaaaatgtgcccacagctgaggaggccacagaggccacagagggcaatgccggcagcgcagaagatactgtggacatcagccagacaggagtgtacacagaacatgtgttcacagaccccctgggcgtgcagatccctgaggacctgagccctgtgtaccagagcagcaatgacagtgatgcctacaaggaccagatctctgtgctgcccaatgagcaggacctggtgcgggaggaggcccagaagatgagcagcctgctgcccaccatgtggctgggcgcccagaatggctgcctgtatgtgcacagctctgtggcccagtggaggaagtgcctgcacagcatcaagctgaaggacagcatcctgagcatcgtgcacgtgaagggcatcgtgctggtggccctggctgatggcaccctggccatcttccaccggggcgtggatggccagtgggacctgagcaactaccacctgctggacctgggccggccccaccacagcatccgctgcatgacagtggtgcatgacaaggtgtggtgtggctacagaaacaagatctacgtggtgcagcccaaggccatgaagattgagaagagctttgatgcccaccccaggaaggagagccaggtgcggcagctggcctgggtgggagatggagtgtgggtgtccatccggctggacagcaccctgcggctgtaccacgcccacacctaccagcacctgcaggatgtggacatcgagccctacgtgtccaagatgctgggcaccgggaagctgggcttctcctttgtgcgcatcacagccctgatggtgtcctgcaaccggctgtgggtgggcactggaaatggagtcatcatcagcatccccctgacagagaccaacaagaccagcggcgtgcccggcaaccggcccggcagcgtcatccgggtgtatggagatgagaacagcgacaaggtgaccccaggcaccttcatcccctactgcagcatggcccacgcccagctgtgcttccacggccacagagatgctgtgaagttctttgtggccgtgcccggccaggtgatcagcccccagagcagcagcagcggcacagacctgactggagacaaggccggccccagcgcccaggagcccggcagccagacccccctgaagtccatgctggtgatctctggaggagagggctacatcgacttcaggatgggagatgaaggaggagagagcgagctgctgggggaggacctgcccctggagcccagcgtgaccaaggccgagaggagccacctgattgtgtggcaggtgatgtatggaaatgaatag

SEQ ID NO: 48254 - DNA, 3237 bp, Artificial Sequence
  derived and/or modified sequence
tctgtgaaggtgagcaacagccctgagccccagaaggctgtggagcaggaggatgagctgagtgatgtgtcccagggcggcagcaaggccaccaccccagccagcacagccaacagtgatgtggccaccatccccacagacacccccctgaaggaggagaatgaaggatttgtgaaggtgacagatgcccccaacaagtctgagatcagcaagcacatcgaggtgcaggtggcccaggagaccagaaatgtgtccacaggcagcgcagaaaatgaggagaagtctgaggtgcaggccatcatcgagagcaccccagagctggacatggacaaggacctgagcggctacaagggcagcagcacccccaccaagggcatcgagaacaaggcctttgacaggaacacagagagcctgtttgaggagctgagcagcgctggcagcggcctgattggagatgtggatgagggcgctgacctgctgggcatgggccgggaggtggagaacctgatcctggagaacacccagctgctggagaccaagaatgccctgaacatcgtgaagaatgacctgattgccaaggtggatgagctgacctgtgagaaggatgtgctgcagggcgagctggaggccgtgaagcaggccaagctgaagctggaggagaagaaccgggagctggaggaggagctgaggaaggcccgggcagaggctgaagatgcccggcagaaggccaaggatgatgatgacagcgacatccccacagcccagaggaagcgcttcaccagggtggagatggcccgggtgctgatggagaggaaccagtacaaggagcggctgatggagctgcaggaggccgtgcgctggacagagatgatccgggccagccgggagaacccagccatgcaggagaagaagaggagcagcatctggcagttcttcagccgcctcttcagcagcagcagcaacaccaccaagaagccagagccccctgtgaacctgaagtacaatgcccccaccagccacgtgacccccagcgtgaagaagaggagcagcaccctgagccagctgcccggggacaagagcaaggcctttgacttcctgtctgaggagacagaggccagcctggccagcagaagagagcagaagcgggagcagtaccggcaggtgaaggcccacgtgcagaaggaggatggccgggtgcaggccttcggctggagcctgccccagaagtacaagcaggtgaccaacggccagggcgagaacaagatgaagaacctgcctgtgcctgtgtacctgcggcccctggatgagaaggacacctccatgaagaagctgtggtgtgctgtgggcgtgaacctgagcggcggcaagaccagagatggcggctctgtggtgggcgcctctgtgttctacaaggatgtggccggcctggacacagagggcagcaagcagaggtctgccagccagagcagcctggacaagctggaccaggagctgaaggagcagcagaaggagctgaagaaccaggaggagctgagcagcctggtgtggatctgcaccagcacccacagcgccaccaaggtgctgatcattgatgctgtgcagcccggcaacatcctggacagcttcaccgtgtgcaacagccacgtgctgtgcatcgcctctgtgcctggggcccgggagacagactacccagctggggaggacctgtctgagagcggccaggtggacaaggccagcctgtgtggctccatgaccagcaacagcagcgctgagacagacagcctgctgggcggcatcaccgtggtgggctgcagcgctgagggcgtgactggagctgccaccagccccagcaccaatggagccagccctgtgatggacaagcccccagagatggaggccgagaacagcgaggtggatgaaaatgtgcccacagctgaggaggccacagaggccacagagggcaatgccggcagcgctgaggacacagtggacatcagccagacaggagtgtacacagagcacgtgttcacagaccccctgggcgtgcagatccctgaggacctgagccctgtgtaccagagcagcaatgacagtgatgcctacaaggaccagatctctgtgctgcccaatgagcaggacctggtgcgggaggaggcccagaagatgagcagcctgctgcccaccatgtggctgggcgcccagaatggctgcctgtatgtgcacagctctgtggcccagtggaggaagtgcctgcacagcatcaagctgaaggacagcatcctgagcatcgtgcacgtgaagggcatcgtgctggtggccctggctgatggcaccctggccatcttccacagaggagtggatggccagtgggacctgagcaactaccacctgctggacctgggccggccccaccacagcatccgctgcatgacagtggtgcatgacaaggtgtggtgtggctacagaaacaagatctacgtggtgcagcccaaggccatgaagattgagaagagctttgatgcccaccccaggaaggagagccaggtgcggcagctggcctgggtgggagatggagtgtgggtgtccatccggctggacagcaccctgcggctgtaccacgcccacacctaccagcacctgcaggatgtggacatcgagccctacgtgtccaagatgctgggcaccgggaagctgggcttctcctttgtgcgcatcacagccctgatggtgtcctgcaaccggctgtgggtgggcactggaaatggagtcatcatcagcatccccctgacagagaccaacaagaccagcggcgtgcccggcaacagacctggcagcgtcatccgggtgtatggagatgaaaattctgacaaggtgaccccaggcaccttcatcccctactgcagcatggcccacgcccagctgtgcttccacggccacagagatgctgtgaagttctttgtggccgtgcccggccaggtgatcagcccccagagcagcagcagcggcacagacctgaccggggacaaggccggccccagcgcccaggagcccggcagccagacccccctgaagtccatgctggtgatcagcggcggggagggctacatcgacttcaggatgggagatgagggcggggagagcgagctgctgggggaggacctgcccctggagcccagcgtgaccaaggccgagaggagccacctgattgtgtggcaggtgatgtatggaaatgaatag

SEQ ID NO: 48255 - DNA, 2760 bp, Artificial Sequence
  derived and/or modified sequence
atggtgatgcgctggggcgagagaaatgatgtgattgcctgggagctgctgcaggatggagtggagaatgccctgaacatcgtgaagaatgacctgattgccaaggtggatgagctgacctgtgagaaggatgtgctgcagggcgagctggaggccgtgaagcaggccaagctgaagctggaggagaagaaccgggagctggaggaggagctgaggaaggcccgggcagaggctgaagatgcccggcagaaggccaaggatgatgatgacagcgacatccccacagcccagaggaagcgcttcaccagggtggagatggcccgggtgctgatggagaggaaccagtacaaggagcggctgatggagctgcaggaggccgtgcgctggacagagatgatccgggccagccgggagaacccagccatgcaggagaagaagaggagcagcatctggcagttcttcagccgcctcttcagcagcagcagcaacaccaccaagaagccagagccccctgtgaacctgaagtacaatgcccccaccagccacgtgacccccagcgtgaagaagaggagcagcaccctgagccagctgcccggggacaagagcaaggcctttgacttcctgtctgaggagacagaggccagcctggccagcagaagagagcagaagcgggagcagtaccggcaggtgaaggcccacgtgcagaaggaggatggccgggtgcaggccttcggctggagcctgccccagaagtacaagcaggtgaccaacggccagggcgagaacaagatgaagaacctgcctgtgcctgtgtacctgcggcccctggatgagaaggacacctccatgaagctgtggtgtgctgtgggcgtgaacctgagcggcggcaagaccagagatggcggctctgtggtgggcgccagcgtcttctacaaggatgtggccggcctggacacagagggcagcaagcagaggtctgccagccagagcagcctggacaagctggaccaggagctgaaggagcagcagaaggagctgaagaaccaggaggagctgagcagcctggtgtggatctgcaccagcacccacagcgccaccaaggtgctgatcattgatgctgtgcagcccggcaacatcctggacagcttcaccgtgtgcaacagccacgtgctgtgcatcgcctctgtgcctggggcccgggagacagactacccagctggggaggacctgtctgagagcggccaggtggacaaggccagcctgtgtggctccatgaccagcaacagcagcgctgagacagacagcctgctgggcggcatcaccgtggtgggctgcagcgctgagggcgtgactggagctgccaccagccccagcaccaacggggccagccctgtgatggacaagcccccagagatggaggctgaaaattctgaggtggatgaaaatgtgcccacagctgaggaggccacagaggccacagagggcaatgccggcagcgcagaagatactgtggacatcagccagacaggagtgtacacagaacatgtgttcacagaccccctgggcgtgcagatccctgaggacctgagccctgtgtaccagagcagcaatgacagtgatgcctacaaggaccagatctctgtgctgcccaatgagcaggacctggtgcgggaggaggcccagaagatgagcagcctgctgcccaccatgtggctgggcgcccagaatggctgcctgtatgtgcacagctctgtggcccagtggaggaagtgcctgcacagcatcaagctgaaggacagcatcctgagcatcgtgcacgtgaagggcatcgtgctggtggccctggctgatggcaccctggccatcttccaccggggcgtggatggccagtgggacctgagcaactaccacctgctggacctgggccggccccaccacagcatccgctgcatgacagtggtgcatgacaaggtgtggtgtggctacagaaacaagatctacgtggtgcagcccaaggccatgaagattgagaagagctttgatgcccaccccaggaaggagagccaggtgcggcagctggcctgggtgggagatggagtgtgggtgtccatccggctggacagcaccctgcggctgtaccacgcccacacctaccagcacctgcaggatgtggacatcgagccctacgtgtccaagatgctgggcaccgggaagctgggcttctcctttgtgcgcatcacagccctgatggtgtcctgcaaccggctgtgggtgggcactggaaatggagtcatcatcagcatccccctgacagagaccaacaagaccagcggcgtgcccggcaaccggcccggcagcgtcatccgggtgtatggagatgagaacagcgacaaggtgaccccaggcaccttcatcccctactgcagcatggcccacgcccagctgtgcttccacggccacagagatgctgtgaagttctttgtggccgtgcccggccaggtgatcagcccccagagcagcagcagcggcacagacctgactggagacaaggccggccccagcgcccaggagcccggcagccagacccccctgaagtccatgctggtgatctctggaggagagggctacatcgacttcaggatgggagatgaaggaggagagagcgagctgctgggggaggacctgcccctggagcccagcgtgaccaaggccgagaggagccacctgattgtgtggcaggtgatgtatggaaatgaatag

SEQ ID NO: 48256 - DNA, 825 bp, Artificial Sequence
  derived and/or modified sequence
atggagctggaggatggagtggtgtaccaggaggagcccggcggcagcggggctgtgatgtctgagcgggtgtctggcctggccggcagcatctaccgggagtttgagcggctgattggccgctatgatgaggaggtggtgaaggagctgatgcccctggtggtggccgtgctggagaacctggacagcgtgtttgcccaggaccaggagcaccaggtggagctggagctgctgagagatgacaatgagcagctgatcacccagtatgagcgggagaaggccctgaggaagcatgctgaggagaagttcatcgagtttgaggacagccaggagcaggagaagaaggacctgcagaccagggtggagagcctggagagccagacccggcagctggagctgaaggccaagaactatgctgaccagagcgccatgagccctggctgcatgctgctgtttgtgtttggatttgtgggcggcgctgtggtgatcaacagcgccatcctggtgtccctgtctgtgctgctgctggtgcacttcagcatcagcactggagtgcctgccctgacccagaacctgccccgcatcctgaggaaggagcggcccatcagcctgggcatcttccccctgcctgctggagatggcctgctgaccccagatgcccagaagggcggggagaccccaggcagcgagcagtggaagttccaggagctgagccagcccaggagccacaccagcctgaaggtgagcaacagccctgagccccagaaggctgtggagcaggaggtgaggatggtgctgctgaacatcctgcagaaggtgtactag

SEQ ID NO: 48257 - DNA, 3966 bp, Artificial Sequence
  derived and/or modified sequence
atggagctggaggacggcgtggtgtaccaggaggagcccggcggctcaggggctgtgatgagcgaaagggtttctggcctagccggatctatctatagagaatttgagagactgatcgggcggtatgacgaggaggtcgtcaaagagctgatgcctttagtggtcgctgtcctcgaaaaccttgattcagttttcgcacaggatcaggaacatcaggtggagttggagctgttgcgcgacgacaatgaacagttgataacccagtacgaacgtgaaaaagcacttcgcaaacatgctgaggagaaatttatcgagtttgaggactctcaagagcaggagaagaaagacttacagaccagagtggagtcactcgaatcccagacgcgacaactcgagcttaaagctaaaaactacgccgaccaaatcagccggctcgaagagagagaagcagagctgaagaaggaatataacgcgctccaccagcggcacacagagatgatccacaattatatggagcacctggaacgcacgaaactgcaccaactctccggcagtgatcagctggagtctaccgctcatagtcggattcggaaggagaggcctatcagtctgggaatttttccccttcccgccggcgatgggcttctgacacctgacgcccagaaaggcggtgagactcccggctctgaacagtggaagtttcaggaactctctcaacctcgaagccatacatcactgaaggtttccaacagccccgaaccacagaaggctgtggagcaagaagacgagctgagcgatgttagccagggcgggtctaaggcgacaacccctgctagtactgccaactccgacgtcgctacaattcctaccgacaccccattgaaagaggaaaatgagggatttgtcaaggtaaccgacgctccaaacaaatccgagatatcaaagcatattgaggtccaggtagctcaggaaactcgaaatgtgtcaacaggcagcgccgaaaacgaggagaaatctgaagtgcaggcaatcatcgaatccacgcccgagctggatatggacaaagatctcagtggatacaaaggatccagcacccccactaagggcatagagaataaagccttcgacagaaatacggagagcttgtttgaggagctgagcagtgcaggaagcggtctcatcggtgacgtggatgaaggcgcagatctgctggggatgggcagggaggtagaaaatttgatcttggagaacacgcaactgttagagaccaagaatgctttgaacattgtaaaaaacgaccttatcgctaaagttgacgaattgacatgtgagaaagacgttctgcagggcgagctggaggcagtgaagcaagctaaactgaagttggaggagaaaaacagggaactggaagaagaactgagaaaagccagggccgaagcggaggatgccagacaaaaggcgaaggatgacgatgacagcgatattcctacggcgcagcgaaaaagattcacccgcgtggagatggctcgggtgctgatggagagaaaccaatacaaagaaagacttatggagctgcaggaagctgtcagatggaccgaaatgatcagagcttctagggagaaccctgccatgcaagaaaagaaacgtagttcaatctggcaattttttagtagactttttagctctagctcgaacaccaccaaaaaaccagaaccccccgtgaatttgaaatataacgcccccacttctcacgtgaccccctctgtcaagaagagatcctccactctgtcacaattgcccggcgataagtcaaaggcattcgatttcctttcggaagagaccgaggcctccctggcttcacgcagagagcagaagcgcgaacagtataggcaggtgaaagcccacgtccagaaagaggatggacgagtgcaggcctttggttggtccctcccccaaaagtacaaacaggtgacaaacgggcagggggagaataagatgaagaacctgcctgtgccagtgtatctccggcctctggatgagaaggatacaagcatgaagctgtggtgcgccgtcggagtgaatttatctggcggaaagacgcgggacggcggtagcgttgtaggcgcctccgtcttttataaggacgtggccggtctagatactgagggatcgaaacagcgcagcgcctctcagagttctttggataaattagaccaggagctgaaggaacagcagaaagaactgaaaaaccaggaggagttgtcatccctggtgtggatctgtacctccacacacagtgctacaaaagttctgattatagatgcagttcaacccggcaacatcctagacagttttaccgtctgtaacagtcatgtcctatgtatcgcctccgttccgggggctcgggaaacagactatcccgctggcgaggatctgtcggagtcaggtcaggtggacaaggccagtttgtgtggctcaatgacctccaactcttccgccgagaccgactcgctgttgggcggaatcacggtcgttggctgcagcgccgagggggtcaccggcgctgccacttcgccttccacaaatggcgctagcccggtgatggacaagccccctgaaatggaggccgagaacagcgaagtcgacgagaatgtcccgactgcagaagaagccactgaggctactgagggtaatgcaggatcagccgaggatacagtggacataagtcagacgggcgtctacacagagcacgtctttactgatcctttgggtgtgcagattccggaagatctgtcccctgtgtatcagagcagtaatgattcagacgcctacaaggaccagatcagtgttctgcccaacgagcaggatctcgttcgtgaagaggcccagaagatgtctagcctgttacctaccatgtggctcggagctcagaacggctgcctctatgtgcactcgagcgtggctcagtggcgtaagtgcctgcattccattaagctaaaggattcaatactctccattgttcacgtgaaagggatagttctcgtcgctctcgccgatggcactctggccatatttcatcgaggagtggacggacagtgggatctgtccaactatcatctgttagacctcggtcgcccccaccatagtatcaggtgcatgaccgttgtgcatgacaaggtgtggtgtggatacagaaacaaaatctatgttgtgcagccaaaagctatgaagatagagaagagcttcgatgcacaccccaggaaggaaagccaagtgcggcaactggcctgggtgggagacggagtttgggtgagcatacgcctcgattccacattgcgtctgtatcacgcccacacctaccaacatctccaggacgtggacattgagccctacgtaagcaagatgttagggaccgggaagctggggttttcattcgttcgaataaccgccctgatggtttcgtgtaaccgcctgtgggtggggactgggaacggagtgatcatttctattcctctcactgagactaataagacaagcggtgttcctgggaaccgcccagggtccgtgattcgcgtgtacggagacgagaactctgataaagtgacacctggcacgtttatcccttactgctcaatggcacacgcacagctatgtttccatgggcacagggatgccgtgaagttctttgttgccgtgcccggtcaggtaattagcccccagtcttcctcttctggaaccgatctgaccggagacaaagccggcccttccgcccaagagcctgggtcacaaacccccctgaagtctatgctcgtgatctcgggaggcgaagggtacatcgattttagaatgggagacgagggaggggaatccgaattattgggtgaggatctcccattggagccgagtgttaccaaggcggagcggtctcacttaatcgtatggcaggttatgtatggcaacgagtag

SEQ ID NO: 48258 - DNA, 3237 bp, Artificial Sequence
  derived and/or modified sequence
agcgtgaaggtgagcaacagccccgagccccagaaggccgtggagcaggaagatgaactttcagatgtatctcagggcggtagtaaagctacaacacctgcctcaacagcaaactccgatgtcgcaaccatcccgactgatacgccactcaaagaagagaacgagggattcgttaaagtcaccgacgcaccaaacaagagcgaaattagtaaacatattgaagtgcaagtggcccaggagacccggaacgtaagcacagggtccgctgagaacgaggaaaagagcgaggtccaagcaattatagaaagtacccctgaactggatatggataaggatctgtccggatacaaaggtagcagtacccccaccaaaggcattgagaataaagcattcgaccgcaacacggaatccctgttcgaggagctgtctagcgccgggtctggactaattggagacgtggatgagggagcggacctgttaggcatgggcagggaagtagagaatctgattctcgaaaatacacagttactggaaaccaaaaatgctctcaatatagtgaaaaatgacctgattgccaaagtcgatgaactcacctgcgagaaagacgttcttcagggagagctggaagctgtcaaacaagccaagcttaagcttgaggagaaaaaccgagagcttgaggaagaacttcgcaaggcccgagcagaggccgaggacgccaggcagaaagccaaggatgacgacgatagcgatatcccaaccgcacagcgcaaacgtttcacccgcgtcgagatggccagagtgttaatggaaagaaaccaatacaaagagagactgatggaactccaagaggcggtgagatggacagaaatgatcagagcaagtagggagaacccagcaatgcaagaaaagaagcgtagctccatttggcagtttttttcaaggctcttttcctcgagtagtaacactaccaaaaagcctgaaccgccggtgaatttaaagtataacgccccaacctctcatgtcacaccaagtgtgaaaaagcggagtagtacgctgtcccagttgccaggggacaaatcaaaggcatttgatttcctgtctgaagagaccgaagcatcactcgccagccgcagagagcagaagcgggagcagtacaggcaggtgaaagcccatgtgcagaaagaagacgggagggtacaggcttttggttggtcactgccacaaaagtacaagcaggtcacaaatgggcaaggagagaacaaaatgaaaaacctgcctgtgccggtatacctgaggcccctggacgagaaggatacctccatgaaaaaattgtggtgcgccgtgggagtgaacctaagcggcggaaaaactcgggacggcgggtcagtggtgggcgccagcgttttctataaagatgtggcgggcttggacactgaaggctctaagcagcggtccgcatcgcagagctccctggacaagctggaccaggagttgaaggagcagcagaaggaactgaagaatcaagaagaacttagcagcctagtttggatttgtaccagtacccattcagctacaaaggtgcttatcattgacgcagtgcagccagggaatatactcgactcatttacagtctgcaacagtcatgtactctgcatcgcttcagtgccaggcgcccgggaaacagactaccctgcaggcgaggacttgtctgagtctggccaggtggataaagcctcactgtgcggatccatgacttccaattcgtccgctgaaacagattccctacttgggggaatcacggtcgtgggctgctcggccgaaggcgtgacgggggctgccacatctccttctacaaatggcgcctccccagttatggataagccgcccgagatggaagcagagaacagcgaagtagacgagaacgtgcccaccgctgaagaagccactgaggctactgaaggaaacgcaggctccgccgaggacaccgtagacatttctcagacgggcgtgtacactgagcatgtgttcacagatccactaggcgtccagattccagaagacctgagcccggtgtatcagtccagcaatgactctgacgcctacaaagaccagatttctgtattacctaacgaacaagatttggtgagagaggaggcccaaaaaatgtcttctctcctccccacgatgtggttgggcgcccagaacgggtgcctatacgtgcattctagtgtcgcccagtggagaaagtgcctccactcgatcaagttgaaagactcaatcctgtcaatcgtccacgtgaaagggattgtccttgttgctcttgcggacggaactttagcaatcttccatagaggggttgacggtcagtgggacctcagcaattaccatctgttggatctggggcgtccacaccattccattaggtgcatgactgtggtgcacgataaggtctggtgcggatatcgcaataagatttacgttgttcagcccaaggctatgaaaatagagaaatcttttgacgctcacccaaggaaggaatcccaagtccgccagctggcatgggtaggggatggagtttgggtgagtatccggctggacagtaccctgcggctgtaccacgctcatacatatcagcatttgcaggacgtggatatcgaaccctacgtgtctaaaatgttggggaccggaaaattaggcttttcgtttgtgagaatcacagcactgatggtatcctgcaaccgcctctgggtcgggacaggcaatggggtgattattagcatccccctgactgagacaaacaaaacttcaggcgttccagggaatcggccagggtctgtgattcgagtgtatggggatgagaactcagacaaagtgacccctggcaccttcatcccctactgttccatggcccatgcacagctctgctttcacggacatagagatgcggtgaagtttttcgtggcagtcccaggacaggtgatcagtccccagtctagctcctctgggacggatctgacaggcgataaggcagggccttccgcgcaagaacccgggtcccagacccctctcaagagtatgctggtcatctccgggggggagggctacatcgactttcgaatgggggacgaggggggcgagagcgagttgctgggggaagatcttcctctggaaccgtctgtcactaaagccgaacgatctcatctcatcgtctggcaagtaatgtatggtaacgagtag

SEQ ID NO: 48259 - DNA, 2760 bp, Artificial Sequence
  derived and/or modified sequence
atggtgatgcggtggggcgagcggaacgacgtgatcgcctgggagttactccaagacggggtggaaaacgcattaaatattgtgaaaaacgacctgatagcaaaggtagatgagctgacatgtgagaaagatgtgctacagggggaactggaggccgtgaaacaggctaaactaaagctcgaggagaaaaatagggaactggaagaggagttgcggaaagctagggctgaggcggaagatgctcggcagaaagcaaaggacgacgacgattccgacatcccgacagcccagcgcaaacgctttacaagagtagagatggcccgagtgctgatggaaagaaatcagtacaaagagcgtctcatggaactgcaagaggctgtgaggtggaccgaaatgattcgcgcttcccgggaaaaccccgcaatgcaggagaagaagagatccagcatctggcaatttttctctcgactctttagcagtagcagcaatactaccaagaagcctgaacctcctgtgaatctgaaatacaacgccccaacttcacacgtcaccccgagtgtgaagaagagatctagcactctctcccaactcccaggggacaagtctaaagctttcgactttctgtccgaggaaaccgaggcaagtctggcctccaggagggagcagaaaagagaacaatatcgtcaggtgaaggctcacgtccagaaggaggacggaagggtccaggcctttggctggagtctgccccaaaagtacaaacaggtcaccaatggccagggagaaaataagatgaagaatcttcccgtcccggtgtatctgagacctctcgacgagaaagacactagcatgaagctctggtgcgccgtcggggtcaatctctccggcggaaagactcgggatgggggcagcgtggtgggagccagtgttttttataaggacgtggcaggactagacaccgagggcagcaagcaacgctctgcctctcaaagtagcttagataagcttgatcaagaactcaaggagcaacagaaggagctaaagaatcaggaggaattaagttctctcgtgtggatctgtactagcactcattccgccactaaagtgttgattatcgatgctgtgcagcccggcaacattctagattcttttacagtctgtaacagccacgttctgtgcatcgcctctgtgcctggagcacgtgagacagactaccccgcaggggaggatttgtccgagagcggacaggtggacaaagcttctctgtgtggaagtatgacctccaattcatccgctgagacagattctctgttgggtggaattaccgtggtgggctgctccgcagagggggtcaccggggccgcaacttccccctctactaatggggcgagtcccgttatggataaaccccctgaaatggaggctgagaattctgaggtcgatgagaacgtcccaactgccgaggaggcgacagaagccacagaaggcaacgcgggctctgcggaggatacagtggacatctctcagacaggagtgtacaccgaacacgtcttcacagaccctctgggagttcagatcccagaggatctctcaccagtgtatcaaagcagtaacgattccgacgcttataaggatcagatttctgtcttacctaacgaacaggacctcgtccgcgaggaagcccagaaaatgagctctttactgcctacgatgtggctcggcgcgcagaatggctgcctgtacgtccacagttcggtggctcagtggaggaaatgcctacactccataaaattgaaggattctatcctatccattgtacatgtgaagggcatagttttagttgctttagctgacgggacactggcaatcttccacagaggcgtagatgggcaatgggatttgagcaattaccacctcctggaccttggccggccccatcactctatccgctgcatgacagtcgtccacgacaaagtgtggtgtgggtatcgaaacaagatttatgtggtccagcccaaagccatgaaaattgaaaaaagtttcgacgcccacccaaggaaggagtcacaagtccgtcagctggcgtgggtgggggatggtgtatgggtgagcatcagacttgattcgactctcaggttatatcacgctcacacctaccagcatctacaagatgtagatatcgagccttatgtttctaaaatgctgggaaccggtaaactcgggttctcttttgtacgtatcactgctctaatggtctcctgtaatcggctgtgggtgggcaccggcaacggcgtaattatctcaatccccctcacagagactaataaaacgtcaggcgttcctgggaacaggccgggtagcgtaatacgcgtatatggcgacgaaaactcagacaaggtgacgccagggacattcatcccttattgcagcatggctcacgctcaactgtgctttcacggacacagagatgcagtgaaattttttgtggcagtgcctggccaagtcattagcccccagagtagtagcagtggaaccgatctgactggtgataaggcgggaccatccgcccaggaaccgggaagccagacgccactcaagagtatgttggttatatccgggggcgagggttatatcgacttcaggatgggagatgagggtggcgaaagtgagctactgggagaggatctacccttggaaccttccgtgactaaagcggaaagaagccacctgattgtgtggcaggtaatgtacggaaatgagtag

SEQ ID NO: 48260 - DNA, 825 bp, Artificial Sequence
  derived and/or modified sequence
atggagctggaggacggcgtggtgtaccaggaggagcccggcggcagtggagccgttatgagtgagcgtgtgtcagggttggccggtagtatttacagggaatttgagaggctcattgggcgttacgacgaggaggtcgtaaaggaattgatgccattagtggtggccgtgttggagaatctggattcagttttcgcccaagatcaggaacaccaggtggagcttgagcttctgcgtgacgacaacgagcagctgatcacacagtacgagagagaaaaggccctgcgaaaacatgcagaggagaagtttatcgaatttgaggattcacaagagcaggagaaaaaggacctgcagacgcgcgtggagagcctcgagagccagactagacaactcgagctcaaagcgaagaattatgccgaccagtctgcgatgtcgcctggttgcatgctcttgttcgttttcgggtttgtgggcggggctgtggttataaacagtgccattttggtcagtctgtcagtcctactgctcgtgcacttttcaattagcactggcgtacccgcactcacccagaatctccctcgtattctgaggaaagagcgccctataagtctcggaatatttcccctgcccgcaggtgatggactgctgacacccgatgcgcagaaggggggcgaaaccccaggaagtgagcaatggaaattccaagaactttctcagccaagatctcacacaagtcttaaggttagcaatagtccggagcctcaaaaggcggtagaacaggaggtgcgtatggtattgttaaacattttgcagaaagtgtattag

SEQ ID NO: 48261 - DNA, 3966 bp, Artificial Sequence
  derived and/or modified sequence
atggagctggaagatggtgttgtctaccaggaagagcccggaggcagcggcgcagtgatgtccgagagggtctctgggctggccggaagcatctacagggagtttgagcggttgattggcagatacgacgaggaagtagtaaaggaactgatgccgctcgtggtggctgtgctggagaacttggactctgtttttgctcaagaccaggaacaccaggttgagctggagctcctgagagacgataatgagcagctgatcactcagtatgaacgcgagaaggctcttagaaaacacgcagaggaaaagtttatagagtttgaggactctcaggagcaggaaaagaaggacctccagactcgcgtggagtcattggaatcccagaccagacaactggaactgaaagctaaaaattacgccgaccagatttcacgactcgaagaacgcgaggccgagttaaaaaaggaatacaatgcgctgcaccaacgccacaccgagatgatccataattatatggagcatctcgagcggacaaaattacatcagctctccggcagcgaccagttagaatccaccgcacactcccgtatccgcaaagagaggcccatcagtttgggtatcttcccgctacctgccggagatgggctgctaacccctgatgcacaaaagggcggagagacacctggaagcgagcagtggaaattccaggagttatcccagcccaggtctcacacgtccctgaaagtcagcaattctcctgagccgcagaaggctgtcgagcaggaggatgaactatcagacgtgagccaggggggatcaaaagctactaccccagcaagtacggccaattcggatgttgctacaattcctacagacacacccctgaaggaggagaatgaagggtttgtgaaagtaacagatgcccctaacaaatcagaaatctcaaaacacattgaagttcaggtcgcccaggagacaagaaatgtcagcacagggtctgccgaaaacgaagaaaagagtgaggtgcaagctataatagagagcactccagagctagatatggacaaggacctgtctgggtataagggttcatctacacccaccaagggaattgagaataaagccttcgaccgtaacaccgaatcactgtttgaggagctcagctctgccggtagtggtctgataggtgatgtggacgagggggctgacctgctgggtatggggagagaagtggaaaacctgatactcgaaaatacacagctgctcgaaaccaaaaatgcactgaatattgtaaagaatgacctgatagctaaagttgatgaactgacctgcgagaaggacgtccttcagggggagctggaagctgtgaaacaggcgaaactgaagctggaggaaaagaatcgtgagctggaagaagaacttcggaaagctcgagcagaagccgaggatgcccgacaaaaagccaaagatgacgacgattcagatataccaacagcccagcggaaaagattcactagagtggagatggcgcgagtgctgatggaaaggaaccagtacaaggaaaggctgatggagctccaggaggccgtgagatggacagagatgattagggcctcaagggagaatcccgcaatgcaggaaaaaaagcggagtagcatttggcagttcttctctcgactcttttcgagcagcagtaataccactaagaagccggaacctccagtgaatctgaagtacaatgccccaacatcgcatgtaacaccgtcagtgaagaagcgtagctccactctttcccagttgcctggcgataagtccaaagccttcgatttcctaagcgaagagacggaggcatcgctggcgagccgaagagagcagaagcgcgagcaatatcgtcaagttaaggcccatgtgcagaaggaagacggaagggtccaggccttcggatggagccttccccagaaatataagcaggtaaccaacggtcaaggagagaataaaatgaagaacctgcctgtgcccgtgtatctaagaccactggacgagaaagatactagcatgaaactctggtgcgccgtcggggtcaatttgagcgggggaaaaacaagggacggtggctcggtggtcggcgcttctgtattctataaggatgtggctggactagacacagagggatccaaacaacgtagcgctagccagtcctccctggacaagctggaccaagagctgaaggagcagcagaaagaattaaagaaccaggaggagctgtcaagcctcgtctggatctgcacctctactcactcagcaaccaaagtgctgattatcgacgcagtacagccgggtaacattcttgatagtttcaccgtctgtaattcacacgtgctgtgtatcgcgtcggtacccggtgccagagagaccgattacccagccggagaagaccttagtgagtctggccaggtcgataaggcttcactttgcgggagcatgaccagtaattcctctgctgaaactgactcacttctgggcggaattacggtggtgggatgttcagcggaaggtgtgaccggcgctgcaacaagcccctctactaacggcgcatctcccgtgatggataaacccccagaaatggaggcagaaaacagcgaggtggacgagaacgtccccacagccgaggaagccaccgaagccactgagggcaatgctggatccgcagaagacacagttgacatttcacagaccggggtatacacagagcatgttttcaccgatcccttaggcgtgcagatccctgaggacttaagccccgtctaccagagttctaacgattcagatgcttacaaggaccagatttctgttttgcccaatgagcaggatttagtgcgggaggaggcgcagaaaatgagctcactgcttcctactatgtggctgggcgcacaaaatggctgcttatatgttcactcctccgtagctcaatggcgcaagtgcctgcactccatcaaacttaaggactcaatcctctcgatcgtgcatgtgaaggggatcgttctagtcgccttggccgatggaacactggccatctttcataggggtgtcgacggtcagtgggacctttccaattaccacctcctggatcttggaaggccacatcactctattagatgcatgaccgtggtgcacgataaggtgtggtgcggatatcgtaacaaaatctacgtggtacagccaaaagctatgaagatcgagaaatcctttgacgctcacccaagaaaagagtcccaagtacggcagctcgcctgggtgggcgacggtgtttgggtgtctatccgactcgactctaccctgagactctaccatgctcatacctatcagcatctccaagatgtggacattgagccttatgttagtaaaatgttaggaactggcaagctgggcttctcgtttgttcgaataaccgcgctcatggtctcgtgtaacagactttgggtgggcacgggcaatggcgtaatcataagcattcctctcaccgagacaaacaaaacgagcggggtgccgggtaacagaccgggttctgtcattcgagtgtatggagatgagaattccgataaggtgacccctggaacatttattccttattgttctatggcccacgcacagctgtgcttccacgggcacagggacgcagtcaaattctttgtggccgtccccggacaggtaatctcaccccagagcagctcctccggcacagatctgaccggtgataaagccggtccttctgcacaggagcctggttcacagactcctctgaagtcaatgctggtaatttccggcggtgaagggtacattgattttcggatgggggatgaagggggtgagagcgaattgctgggagaggaccttccacttgaaccgtcggtgacaaaggcagagagaagtcacctcatcgtctggcaggtcatgtatggcaatgagtag

SEQ ID NO: 48262 - DNA, 3237 bp, Artificial Sequence
  derived and/or modified sequence
tctgtgaaggtgtccaacagccctgagccccagaaggccgtggagcaggaagatgaactctcagacgtctcgcagggaggctcaaaggcgactaccccagcaagtaccgcaaattctgacgtagctacaattcccacggacactcccctgaaagaggagaacgagggctttgtgaaggttactgatgctccaaataagagtgaaatttccaagcacatagaggtgcaggtggcacaggaaaccagaaatgtctcgaccggcagcgcagaaaatgaggaaaaatctgaggtgcaggccatcatcgaaagtacccctgaactggacatggataaggatctgtctggctacaaaggtagttctacgcctacaaaagggattgagaataaagcgtttgatcgtaacactgagagcctcttcgaggagctaagcagtgcagggagcggtctcataggtgacgtagacgagggcgctgacctcttggggatgggccgagaggtggaaaacctcattttggaaaacacccagttgcttgaaactaaaaacgcccttaacatcgtgaagaacgatctaattgccaaagttgatgagcttacctgcgagaaggatgtcttgcagggcgaactggaagctgtgaagcaggcaaagctgaaactggaagaaaagaaccgtgagcttgaagaggagctcagaaaggccagagccgaagccgaagacgcgcgacagaaagctaaagatgacgacgactcagacatccctactgcccagcgcaaacgatttactagagtggagatggccagagtgcttatggaaagaaatcagtataaagagcgcttgatggaactgcaggaggctgtcaggtggacagagatgattcgggcatctcgagagaaccctgccatgcaggagaaaaagcgttcttccatctggcagtttttctctcggctgttttccagctctagcaatacaaccaagaaacccgagcccccagtgaacctcaaatataacgcacctactagccacgtgaccccgtctgtcaaaaagcgcagctcgactctaagccagctgcccggagacaagagtaaggcctttgactttctgagtgaagagaccgaagcttctctcgcatccagacgcgagcagaaaagagagcagtatagacaagtcaaggcgcacgtgcagaaggaggacggcagagtccaagcctttggctggagtcttccacaaaagtataagcaggtgacaaacggacagggagaaaataaaatgaagaacctgcccgtaccagtttacctcagaccactcgacgagaaggacacttcaatgaagaagctgtggtgtgccgtgggcgtaaacctatcaggcggtaagacccgtgacggcggaagcgtcgtgggagcgtccgtgttttacaaagacgtggcaggcctggatacagaagggtccaaacagaggtccgcgtcacagtcttctttggataagttagatcaggaactgaaggagcagcaaaaagagttaaaaaaccaggaagagctgagttccctcgtctggatttgcaccagcactcacagtgcaaccaaagtacttatcatcgacgcggtgcaacctggtaatatactggattcctttacagtttgcaactcgcatgtgttgtgcatcgcgagcgtgcctggggctagagagacggattaccctgcaggggaagacctgtcagaaagcgggcaggtggacaaagctagtttatgtggctctatgacttccaatagttccgctgagacggacagccttctcgggggtatcactgtcgtagggtgtagcgctgagggggtaacaggtgccgctacctcccccagtacgaacggtgctagtccagtcatggataagccccctgagatggaggccgagaactccgaagtggatgagaatgttcctactgctgaagaagccactgaagcgacagagggcaacgctggaagtgctgaagacaccgttgatattagtcaaacgggagtctataccgaacacgtgttcactgacccgctaggcgtgcagatcccagaggatctgtcacccgtctaccagtcgagcaatgactccgacgcgtacaaggaccagatctcggtgctgccaaacgagcaagacctggttagggaagaggcccaaaaaatgtcctcacttttaccgaccatgtggcttggagcccagaacgggtgtctgtacgtgcatagttccgtggctcagtggagaaagtgcttgcactcgatcaagttaaaggactccatcttgtctatcgtgcatgttaagggcatagtgttagtggcattggccgatgggacactggcgatcttccaccgtggagtcgacggccaatgggacctctccaactaccatctcctagatcttggccgtccacaccattctatccgttgtatgaccgtggtccacgacaaggtctggtgcggttaccgcaataagatctatgtggttcagccaaaagccatgaaaattgagaaaagcttcgacgcacacccacgtaaagaaagtcaagtacgccagcttgcctgggtgggagatggagtatgggtgagtatccggctcgactccacactccggctgtaccacgcccacacgtatcagcatcttcaggacgtggatatcgaaccctacgtgtccaagatgctcgggactggaaagctgggcttctcgttcgtgagaattactgccctcatggtctcttgtaatcgcctatgggtgggcactggtaatggggttattatttctatccccctgactgagactaataagacttccggcgtgcccggaaaccgccctgggtccgtaattcgggtgtacggcgacgagaactccgacaaagtgacccctggaaccttcattccatactgttccatggcgcatgcccagttgtgctttcacgggcaccgagatgcagtgaagttcttcgtggctgttcctggtcaagtgatttccccccagagtagttccagcggtacagatctgaccggagacaaagccggaccttctgcccaagaacctggttcacagacgcccctaaagtctatgctcgtcattagcggtggagagggctacatagatttcaggatgggcgatgaggggggtgaatcagagttgctaggagaagatctgccccttgagccttcggtaaccaaggccgaaaggagccaccttatagtttggcaggtgatgtacggaaatgagtag

SEQ ID NO: 48263 - DNA, 2760 bp, Artificial Sequence
  derived and/or modified sequence
atggtgatgcgatggggggaacgcaacgatgtgatagcttgggaacttctgcaggatggggtggaaaacgccttgaacatcgtgaaaaatgacctcatcgccaaggtagatgagctgacttgcgagaaggatgtgctccagggcgaactggaggccgttaagcaggctaaactgaaattggaagagaagaaccgcgagcttgaggaggagctgaggaaggctagagcagaagctgaggacgcgaggcaaaaggctaaagatgacgacgattccgacatcccaacggctcagagaaaaaggtttacccgggttgagatggcccgagtgctgatggagagaaaccagtacaaggaacgcctcatggagttgcaggaggccgtccgctggaccgagatgatccgggctagccgcgaaaacccagccatgcaagagaagaagaggtcctcaatatggcaattcttttcaaggctgttcagcagttcctccaatacaaccaaaaagcccgaacccccagtcaatttaaaatacaatgctcccacgtcgcatgtcactccgtcagtgaaaaaaaggagctccaccctgagccagttgcccggagataaatcaaaagcatttgatttcttgtcagaggaaactgaggcttctttggcaagtagacgcgaacagaagagagagcaatatagacaagtaaaggcacacgtacagaaggaggacggtagagtccaagcgttcggttggtctctcccacagaagtacaagcaagtgacaaacggccagggcgagaacaaaatgaaaaaccttccggttcccgtgtacctgagaccgttagatgaaaaggacactagtatgaaattgtggtgcgctgtaggcgtcaatttgtcgggaggcaaaacacgggatggagggagcgttgtaggggcaagcgtgttctataaggacgtcgcaggcttagacaccgagggatccaagcagaggtcggcgtcccagtcatccctcgacaaactggatcaggagctgaaagaacagcagaaggaattaaagaatcaggaggaactcagcagtctagtgtggatttgtacaagcacgcactcagcaaccaaggtgcttatcatcgatgctgttcagcccggaaatatactggattcatttacagtttgcaattcccacgtcctctgcatcgcttccgtccccggagcgcgagaaacggattaccctgcgggtgaggacctgtcagagtccggccaggttgataaagcttctctgtgcggctctatgacatccaacagttccgctgaaaccgatagcctactgggcggaatcactgtcgttggatgctctgctgagggagttaccggcgctgccacctcaccctccacaaacggcgcttctcccgtgatggacaagccacccgaaatggaggcagaaaattccgaggtggacgagaatgtgcccactgccgaagaagccacagaggcaacagaggggaacgctgggtcagccgaagatactgtcgatatttctcagaccggagtctatactgagcatgttttcaccgatcccttaggggtccagatccctgaggacttgagtcccgtgtaccagtcatccaacgatagcgacgcgtacaaggaccagatttcagtcttgccgaacgagcaggatcttgtcagggaggaggcccagaagatgtccagccttctgcccacaatgtggctcggggctcagaatggctgcttgtacgtccattccagcgtcgcacaatggcgaaagtgcctgcacagcatcaaacttaaggacagcattttgagcattgtccatgtgaaaggcatcgtgttggtcgccctagccgacggcaccctcgcgattttccacagaggtgtggatgggcagtgggatctgtcaaattatcacctcctggatctcgggaggccacaccactcgatcagatgcatgaccgttgttcacgataaggtctggtgcgggtatcggaataagatttacgtcgtccagcccaaggccatgaagatcgagaagtctttcgatgcccatcccaggaaggagtcccaagttcgccaactggcatgggtcggagacggtgtgtgggtatcaatccgtttggactctactcttcgcctttaccatgcccatacctaccagcacctccaagacgtcgacatcgagccatatgtttcgaagatgcttgggaccgggaaactcgggttttccttcgtgagaatcacagcgttgatggttagctgtaaccgactctgggtaggcacagggaacggggtgatcattagcattcccctgaccgaaaccaataagaccagtggcgtacccggaaataggcctgggtcagtcatccgagtttatggtgacgaaaactccgacaaagtaaccccagggacattcattccctattgtagcatggcccacgcccagctttgcttccacgggcaccgggacgccgtgaagttcttcgttgctgtgccaggacaggtgatttctcctcagtcctcaagcagtggtacggacctgacgggggataaggccggtccatcagcgcaagagcctgggagccagaccccacttaagagcatgctcgtcataagcggcggagagggatatatcgatttccgaatgggtgacgagggtggggagtctgagctcctcggggaggacctgccacttgaaccatccgttacaaaagctgaacgaagtcatttgattgtttggcaagtcatgtacgggaatgaatag

SEQ ID NO: 48264 - DNA, 825 bp, Artificial Sequence
  derived and/or modified sequence
atggaactcgaagatggagtggtgtatcaggaggagccaggcggatccggcgctgtgatgtcggaacgagtgagcggtcttgccggtagcatctaccgtgagttcgagcggttaattggcaggtacgatgaagaagtggtgaaagaattgatgcctttagtagtggctgtgttagagaatctggacagcgtgttcgcccaagaccaggaacaccaggtcgaacttgagctcctccgggatgataatgaacagctcataacacagtacgagcgggaaaaggctctaagaaaacatgcagaggagaagttcattgagttcgaggatagtcaggagcaggagaagaaagatctacaaactcgggtggaaagcttggagtcccagacaaggcagctcgaactgaaggccaagaattatgctgaccagagcgctatgagccctggctgtatgcttctgttcgttttcggcttcgttggcggagctgtggttatcaactctgcaattttggtgtctttatctgtactcctgctggtgcacttctccattagcactggcgtccccgctttaacccaaaatctgccccgaattctccgcaaagagcgtcctatcagtctaggaattttcccactgccagcaggcgacggcctgctgacacctgacgcccagaaaggcggtgagacacccggatctgagcagtggaaattccaagaactgtcacagcctcggtcccacacaagcctgaaagtatccaactcgccagagcctcagaaagccgtcgagcaagaagtccgaatggtgctgttgaacattctgcagaaagtttattag

SEQ ID NO: 48265 - DNA, 8273 bp, Artificial Sequence
  derived and/or modified sequence
agttggtgcagcggcggttggggtgagagcgcctacgccacccctcccctcctccggccccggcccccaccccgccgggcccagccccagccccggcccgggctccagccctagtacccgtcccagcccgagtcgggtccgtcccgtgcgggcaggtgccgcccctctgccggcgacgccccgggccgcccgcccgtccgcttgccaccatggagctggaggacggtgtggtgtatcaggaggagcccggcggctccggggccgtgatgtcggagcgggtgtccggcctggccggctccatctaccgcgagttcgagcggcttatcgggcgctatgacgaggaggtggtcaaagagctgatgccgctggtggtggctgtgctggagaacctggactcggtgttcgcgcaggaccaggagcaccaggtggagctggagctgctgcgggacgacaacgagcagctcatcacccagtacgagcgggagaaggcgctgcgcaagcacgctgaggagaaattcattgaatttgaagactctcaagaacaggaaaaaaaggacttacagacccgagtggaatctttagaatctcaaacaagacaacttgagctgaaagcgaaaaactatgctgaccagattagcagacttgaagaaagagaagcagaactgaagaaggaatataatgcattacatcaaagacacactgagatgatccataattatatggaacatttagaaagaacaaaacttcatcagctctcagggagtgatcaactagaatccacagctcatagtagaattagaaaagaacgccctatatcattaggaattttcccattacctgctggagatggattgcttacacctgatgctcagaaaggaggagagacccctggatctgagcaatggaaatttcaggaattaagtcaaccacgttctcataccagcctgaaggtcagcaatagtcctgaacctcagaaggctgtagaacaggaggatgagctttctgatgttagccaaggcggatctaaagctaccactccagcatcaacagctaattcagatgtggcaacaattcctactgatactcccttaaaggaagaaaacgaaggatttgtgaaggttacagatgcgccaaataaatcagagataagcaaacacattgaagtacaggtagcccaggaaactagaaatgtatctactggctctgctgaaaatgaagaaaagtcagaagttcaagcaatcatcgaatctactcctgagctggatatggacaaagatctcagtggatataaaggttcaagcactcccaccaaaggcatagagaacaaagcttttgatcgcaatacagaatctctctttgaagaactgtcttcagctggctcaggcctaataggagatgtggatgaaggagcagatttactaggaatgggtcgggaagttgagaatcttatattagaaaatacacaactgttggaaaccaaaaatgctttgaacatagtgaagaatgatttgatagcaaaagtggatgaactgacctgtgagaaagatgtgctgcaaggggaattggaggctgtgaagcaagccaaactgaaactagaggaaaagaacagagaattggaggaagagcttaggaaagctcgggcagaagctgaagatgcaaggcaaaaagcaaaagatgacgatgatagtgatattcccacagcccagaggaaacggtttactagagtagaaatggcccgtgttctcatggagcgaaaccagtataaagagagattgatggagcttcaggaagctgttcgatggacagagatgattcgggcatcacgagaaaatccagccatgcaggaaaaaaaaaggtcaagcatttggcagtttttcagccgacttttcagctcctcaagtaacacgactaagaagcctgaaccacctgttaatctgaagtacaatgcacccacgtctcatgttactccgtccgtcaagaaaagaagcagcaccttatctcagctccctggggataagtccaaagcctttgatttccttagtgaagaaactgaagctagtttagcctcacgcagagaacaaaagagagagcagtatcgtcaggtaaaagcacatgttcagaaggaagacggtagagtgcaggcttttggctggagtctgcctcagaagtacaaacaggtaaccaatggtcaaggtgaaaataagatgaaaaatttacctgtgcctgtctatctcagacctctggatgaaaaagatacatcaatgaagctgtggtgtgctgttggagtcaatttatctggtgggaagaccagagatggtggttctgttgttggagcaagtgtattttacaaggatgttgctggtttggatacagaaggcagtaaacagcgaagtgcctctcagagtagtttagataagttagatcaggaacttaaggaacagcagaaggagttaaaaaatcaagaagaattatccagtctagtttggatctgtaccagcactcattcggctacaaaagttcttattattgatgctgttcaacctggcaacatcctagacagtttcactgtttgcaactctcatgttctgtgcattgcaagtgtgccaggtgcacgagaaacagactaccctgcaggagaagatctttcagaatctggtcaggtagacaaagcatctttatgtggaagtatgacaagcaacagctcagcagagacagacagcctgttaggaggcatcacagtggttggttgttctgcagaaggtgtgacgggagctgccacttcccctagtacaaatggtgcttctccagtgatggataaaccaccagaaatggaagcagaaaatagtgaggttgatgaaaatgttccaacagcagaagaagcaactgaagctacagaagggaatgcggggtcagctgaagacacagtggacatctcccaaactggcgtctacacagagcatgtctttacagatcctttgggagttcagatcccagaagacctctccccagtgtatcagtcgagcaatgactcagatgcatataaagatcaaatatcagtactgccaaatgaacaagacttggtgagagaagaagcccagaaaatgagtagtcttttaccaactatgtggcttggagctcaaaatggctgtttgtatgtccattcatctgtagcccagtggaggaaatgtctccattccattaaacttaaagattcgattctcagtattgtacacgtgaagggaatcgtgttagtagccctggctgacggcacccttgcaatctttcacagaggagtggatgggcagtgggatttgtcaaactatcacctcttagaccttggacggcctcatcattccatccgttgcatgactgtggtacatgacaaagtctggtgtggctataggaacaaaatctatgtggtgcagccaaaggccatgaaaatagagaaatcttttgatgcacatcccaggaaggagagccaagtgcgacagcttgcgtgggtgggggatggcgtgtgggtctccattcgcttggattctacgctccgtctctatcatgcacacacttatcaacatctacaggatgtggacattgagccttatgtaagcaaaatgttaggtactggaaaactgggcttctcttttgtgagaattacagctcttatggtgtcttgtaatcgtttgtgggtggggacaggaaatggtgtcattatctccatcccattgacagaaacaaataaaacctcaggtgtaccaggaaatcgtcctggaagtgtaatccgtgtatatggtgatgaaaacagtgataaagtgactccagggacatttataccctattgttcaatggcacatgcacagctttgcttccatgggcaccgggatgctgtgaaattctttgtggcagtcccaggtcaagtcatcagcccacaaagtagcagtagtggcacggatctgacgggtgacaaagcagggccatctgcacaggagcctggtagtcagacgcccttgaagtctatgcttgtcatcagtggaggagagggctacatcgacttccgaatgggtgatgaaggtggagaatcagaacttcttggagaggatcttccacttgaaccttctgtcaccaaagcagaaaggagtcacttgatagtgtggcaagtgatgtatggcaatgagtgagcccatgggaaacaggtggagatggggaagccgtctcttctgcatggtttattttccctctatccttttatttaatgctcttttgtgagataagtttcaccacataatgtgtgagcattttttcctgttaactttatattacaaaatccgttctaccataacaatacagaggaactagctgtgttactgcaccagtgttataggtaacttcagtatattatgaacaaatcaaagaatgtttacttcctgcaaactggtgaattatagaaagcaatccagatgtggtttactctgccacagtctaatgtcattcacttcatttgatggggtcacttgttagctgtcactaataatggaattaatgggaaacacttgataaatgaaactgtaccgttaaatacaatagctgagttttccccagtgtattgtaaaattgacacacactaatacaagatggattatcaggatgtatctaaatgtcccgagagggttaaaagctaactgtaaattactttaactttcactttcaaatctgacaaatcttgtttatatggtatataaaactttgttttcatcagatttgggggggttttatattaaagaaattaagactacactatttaaataaacgtttcctgtttctgacttattagagctctaaagtttatgaggcctacttctctgaatattctgatgggttttttttgagaccagtctcattttcatactgacatgtctgaaagatttattatttataaagcttaggacatactctgggaagcttagaagatacttcagcactgggaggattttttaaaggaaatgtgttttgtatttcttgtaccagagaatggtgatgttgattgagttttttccatgtaaaaaatgtacttgtttgccaaatgttcctagattgctcttaacctgttaatacaagtaaaactgtagtggggatggagtctggcctaagtacagaatgagggatttaattagaaaagttattttcttttgttctgtatcaaactgcagaacagctatatacttggtattttgtacgtgaataacgttttagcttttgtgcccttttgagcttgaagggttatcctcaaaggggaaaactatgaaggggaagaagacaaacctaagataccataaagtaaaggttgacattacatattttcattcacaatgcccattaaaaaaaaaaaataggttgggcatggtggctcacgcctgtaatcccaacactttaggaggctgaggcagatggattgcttgagcccaggagttcaagaccagcctgggcaacatggcgaaaccctgtctctaccaaaaaaaaaaaacaaaataaattaaccgggtgtggtggcacatgcctgtagtcccagctacttgggaggctgaggtgggaggatgacctgggcccaggaggtggaggttgcagtgagccttgatagcaccactgcactccagcctgggtgacggagcaagaccctgtctcaaaacagacaaacaagcaaaaaatagattaaagtctggatttcactgattttcttgcttaataagttttttaaaaccacgatgctgcaattttttccctctcaagcttcttgaaaatgtgtgatttacccttttttatctattactctaggcaaagctaaatatgatttttttttttttttttgagacggagtctggctctgttgcccaggctggaatgcagtggtgcgatctcagctcactgcaacctccacctctcaggttcaagtagttctcctgcctcagcctcccaagtagctgggattacaggtgtgtgccaccctgcccagctaatttttgtatttttagtagagacagggtttcaccacattggccaggctggtctcaaactcctgacctcagatgatctacccgccttggcctcccgaagtgcttgaattacaggcgtgagcccccgcgccggtccgaagcaaagctaaatgtaattttatgtactgttttaacagtataaacctatgggataaaggcccccaatcatcagaaggactactgaaaagaaaagaaagcaaacgtagatgtcaaattgtctaaacattcttaagtaccactgattttttttttctggactattatacaaagatgtctgtaaaaagtataccagtggcttttatgcatatacacgattaggctagattgtgaagtacatgggatttcatgagccagaggaggcatttggatccattgggccacatgtgactataagcacattgtgtacacaataaaattgtagccactcatgtattaaaactgttttggtaaaagctgtattaaaagaataattttttgcttgagctacttagtcacttttttgcagggcaccaaaatgtaggctacttttccatagcttgtttgctatgtttttatttcatcttaaatctgagccatttttggcaatatcttttaaaaaatcattattaaacatttattggaaatgttgtatagattcacaagaaagagacaccaaagtgtttgggaattttaatcccaagaagtaaacatcccagagtcagatcccatttgctgttgttcagccatgtttgtatgactgaatgtaatttaggaaatcaggagttagagatgaaaaatacaaacatgtcaaatggttgtaattgctttttttgaacttactggctttaacttaagtaatataggtgtgtagttgttttatctaaagatgtcagattatctgtggccctgttaattaactgcagggaccagagagaggacaaaaatgcctgtataatttgctttaaaggcttgtccttatgtttgtaatttcagttaaatattttctacagattgcttcacttcccctttcccccaataacaagttcatattcttgtaatgtttactttggtcaacgtggtaatttttggaagaaaatgccaaaatgtaagcttctcacaagcagcaaaggaatgtaactgcctgtagctaccacatcaagggagagaagaggcttgcgtactttgggttgatctcactgtacaaaaaaagtgtacccctattggaagaaataaggaatacttgaaggtttctcctttttttacacttgagtcatgtgcaaggttgaaccatatgaaattgccagtgttcaaccattgctgatctgcaaaagcgacaatatcatatgcctcaacctaacacttactcttaaatgcaggttaaaatctctgtgaggcaaagggataatattctctaggaactcacttttgagagtatttttctctaacccatgtggatctaaattttaaaaataggaatgaatctcttaattgcagcttgtggagagtataaaacattttgagcacaatatgcagcacataacttttcagattgtgtttgcatagaaaaggttaaaatcaattctttcagttactgtattgttcatttcttgtaaaggtcttcctacatttgagacgagaccctttaacataggctgccttagtaacaaaataaaacagatgtgtcataatattaactgtcctaaagaacatgtgtcttgcaaatgccatggaactgaatatttatttccttgtgagtattatgaccgttaccaaaggactcaaccagatttagggctcttcttaattgatcatgttcagaaagggactcatttggtcccactttgtaacatgggaagagtagaagagaaaattaaatgtggaaatcataaatgcttttctaacagggttatgctattctgtaacactaaatgtctgtcttttctcttaaaagattaagttttattaattttgtcatacatttctctatttgaatatatcttaaccattttatgttccaaattcgttttttgtccaagacattctatcagaattttacttgcctctataatctgaaaaatgggttctagaatgtcccacttgctgtctcttagaggctgagcttcatttctatgagcaaagagctcatttagcaatgtagttatttcagtatttatttctattatggaatccctggggttcagaatgtaactttgtacatgagatatatataaatatgtatatgaacatgta

SEQ ID NO: 48266 - DNA, 7335 bp, Artificial Sequence
  derived and/or modified sequence
agtgttaaggtcagcaatagtcctgaacctcagaaggctgtagaacaggaggatgagctttctgatgttagccaaggcggatctaaagctaccactccagcatcaacagctaattcagatgtggcaacaattcctactgatactcccttaaaggaagaaaacgaaggatttgtgaaggttacagatgcgccaaataaatcagagataagcaaacacattgaagtacaggtagcccaggaaactagaaatgtatctactggctctgctgaaaatgaagaaaagtcagaagttcaagcaatcatcgaatctactcctgagctggatatggacaaagatctcagtggatataaaggttcaagcactcccaccaaaggcatagagaacaaagcttttgatcgcaatacagaatctctctttgaagaactgtcttcagctggctcaggcctaataggagatgtggatgaaggagcagatttactaggaatgggtcgggaagttgagaatcttatattagaaaatacacaactgttggaaaccaaaaatgctttgaacatagtgaagaatgatttgatagcaaaagtggatgaactgacctgtgagaaagatgtgctgcaaggggaattggaggctgtgaagcaagccaaactgaaactagaggaaaagaacagagaattggaggaagagcttaggaaagctcgggcagaagctgaagatgcaaggcaaaaagcaaaagatgacgatgatagtgatattcccacagcccagaggaaacggtttactagagtagaaatggcccgtgttctcatggagcgaaaccagtataaagagagattgatggagcttcaggaagctgttcgatggacagagatgattcgggcatcacgagaaaatccagccatgcaggaaaaaaaaaggtcaagcatttggcagtttttcagccgacttttcagctcctcaagtaacacgactaagaagcctgaaccacctgttaatctgaagtacaatgcacccacgtctcatgttactccgtccgtcaagaaaagaagcagcaccttatctcagctccctggggataagtccaaagcctttgatttccttagtgaagaaactgaagctagtttagcctcacgcagagaacaaaagagagagcagtatcgtcaggtaaaagcacatgttcagaaggaagacggtagagtgcaggcttttggctggagtctgcctcagaagtacaaacaggtaaccaatggtcaaggtgaaaataagatgaaaaatttacctgtgcctgtctatctcagacctctggatgaaaaagatacatcaatgaagaagctgtggtgtgctgttggagtcaatttatctggtgggaagaccagagatggtggttctgttgttggagcaagtgtattttacaaggatgttgctggtttggatacagaaggcagtaaacagcgaagtgcctctcagagtagtttagataagttagatcaggaacttaaggaacagcagaaggagttaaaaaatcaagaagaattatccagtctagtttggatctgtaccagcactcattcggctacaaaagttcttattattgatgctgttcaacctggcaacatcctagacagtttcactgtttgcaactctcatgttctgtgcattgcaagtgtgccaggtgcacgagaaacagactaccctgcaggagaagatctttcagaatctggtcaggtagacaaagcatctttatgtggaagtatgacaagcaacagctcagcagagacagacagcctgttaggaggcatcacagtggttggttgttctgcagaaggtgtgacgggagctgccacttcccctagtacaaatggtgcttctccagtgatggataaaccaccagaaatggaagcagaaaatagtgaggttgatgaaaatgttccaacagcagaagaagcaactgaagctacagaagggaatgcggggtcagctgaagacacagtggacatctcccaaactggcgtctacacagagcatgtctttacagatcctttgggagttcagatcccagaagacctctccccagtgtatcagtcgagcaatgactcagatgcatataaagatcaaatatcagtactgccaaatgaacaagacttggtgagagaagaagcccagaaaatgagtagtcttttaccaactatgtggcttggagctcaaaatggctgtttgtatgtccattcatctgtagcccagtggaggaaatgtctccattccattaaacttaaagattcgattctcagtattgtacacgtgaagggaatcgtgttagtagccctggctgacggcacccttgcaatctttcacagaggagtggatgggcagtgggatttgtcaaactatcacctcttagaccttggacggcctcatcattccatccgttgcatgactgtggtacatgacaaagtctggtgtggctataggaacaaaatctatgtggtgcagccaaaggccatgaaaatagagaaatcttttgatgcacatcccaggaaggagagccaagtgcgacagcttgcgtgggtgggggatggcgtgtgggtctccattcgcttggattctacgctccgtctctatcatgcacacacttatcaacatctacaggatgtggacattgagccttatgtaagcaaaatgttaggtactggaaaactgggcttctcttttgtgagaattacagctcttatggtgtcttgtaatcgtttgtgggtggggacaggaaatggtgtcattatctccatcccattgacagaaacaaataaaacctcaggtgtaccaggaaatcgtcctggaagtgtaatccgtgtatatggtgatgaaaacagtgataaagtgactccagggacatttataccctattgttcaatggcacatgcacagctttgcttccatgggcaccgggatgctgtgaaattctttgtggcagtcccaggtcaagtcatcagcccacaaagtagcagtagtggcacggatctgacgggtgacaaagcagggccatctgcacaggagcctggtagtcagacgcccttgaagtctatgcttgtcatcagtggaggagagggctacatcgacttccgaatgggtgatgaaggtggagaatcagaacttcttggagaggatcttccacttgaaccttctgtcaccaaagcagaaaggagtcacttgatagtgtggcaagtgatgtatggcaatgagtgagcccatgggaaacaggtggagatggggaagccgtctcttctgcatggtttattttccctctatccttttatttaatgctcttttgtgagataagtttcaccacataatgtgtgagcattttttcctgttaactttatattacaaaatccgttctaccataacaatacagaggaactagctgtgttactgcaccagtgttataggtaacttcagtatattatgaacaaatcaaagaatgtttacttcctgcaaactggtgaattatagaaagcaatccagatgtggtttactctgccacagtctaatgtcattcacttcatttgatggggtcacttgttagctgtcactaataatggaattaatgggaaacacttgataaatgaaactgtaccgttaaatacaatagctgagttttccccagtgtattgtaaaattgacacacactaatacaagatggattatcaggatgtatctaaatgtcccgagagggttaaaagctaactgtaaattactttaactttcactttcaaatctgacaaatcttgtttatatggtatataaaactttgttttcatcagatttgggggggttttatattaaagaaattaagactacactatttaaataaacgtttcctgtttctgacttattagagctctaaagtttatgaggcctacttctctgaatattctgatgggttttttttgagaccagtctcattttcatactgacatgtctgaaagatttattatttataaagcttaggacatactctgggaagcttagaagatacttcagcactgggaggattttttaaaggaaatgtgttttgtatttcttgtaccagagaatggtgatgttgattgagttttttccatgtaaaaaatgtacttgtttgccaaatgttcctagattgctcttaacctgttaatacaagtaaaactgtagtggggatggagtctggcctaagtacagaatgagggatttaattagaaaagttattttcttttgttctgtatcaaactgcagaacagctatatacttggtattttgtacgtgaataacgttttagcttttgtgcccttttgagcttgaagggttatcctcaaaggggaaaactatgaaggggaagaagacaaacctaagataccataaagtaaaggttgacattacatattttcattcacaatgcccattaaaaaaaaaaaataggttgggcatggtggctcacgcctgtaatcccaacactttaggaggctgaggcagatggattgcttgagcccaggagttcaagaccagcctgggcaacatggcgaaaccctgtctctaccaaaaaaaaaaaacaaaataaattaaccgggtgtggtggcacatgcctgtagtcccagctacttgggaggctgaggtgggaggatgacctgggcccaggaggtggaggttgcagtgagccttgatagcaccactgcactccagcctgggtgacggagcaagaccctgtctcaaaacagacaaacaagcaaaaaatagattaaagtctggatttcactgattttcttgcttaataagttttttaaaaccacgatgctgcaattttttccctctcaagcttcttgaaaatgtgtgatttacccttttttatctattactctaggcaaagctaaatatgatttttttttttttttttgagacggagtctggctctgttgcccaggctggaatgcagtggtgcgatctcagctcactgcaacctccacctctcaggttcaagtagttctcctgcctcagcctcccaagtagctgggattacaggtgtgtgccaccctgcccagctaatttttgtatttttagtagagacagggtttcaccacattggccaggctggtctcaaactcctgacctcagatgatctacccgccttggcctcccgaagtgcttgaattacaggcgtgagcccccgcgccggtccgaagcaaagctaaatgtaattttatgtactgttttaacagtataaacctatgggataaaggcccccaatcatcagaaggactactgaaaagaaaagaaagcaaacgtagatgtcaaattgtctaaacattcttaagtaccactgattttttttttctggactattatacaaagatgtctgtaaaaagtataccagtggcttttatgcatatacacgattaggctagattgtgaagtacatgggatttcatgagccagaggaggcatttggatccattgggccacatgtgactataagcacattgtgtacacaataaaattgtagccactcatgtattaaaactgttttggtaaaagctgtattaaaagaataattttttgcttgagctacttagtcacttttttgcagggcaccaaaatgtaggctacttttccatagcttgtttgctatgtttttatttcatcttaaatctgagccatttttggcaatatcttttaaaaaatcattattaaacatttattggaaatgttgtatagattcacaagaaagagacaccaaagtgtttgggaattttaatcccaagaagtaaacatcccagagtcagatcccatttgctgttgttcagccatgtttgtatgactgaatgtaatttaggaaatcaggagttagagatgaaaaatacaaacatgtcaaatggttgtaattgctttttttgaacttactggctttaacttaagtaatataggtgtgtagttgttttatctaaagatgtcagattatctgtggccctgttaattaactgcagggaccagagagaggacaaaaatgcctgtataatttgctttaaaggcttgtccttatgtttgtaatttcagttaaatattttctacagattgcttcacttcccctttcccccaataacaagttcatattcttgtaatgtttactttggtcaacgtggtaatttttggaagaaaatgccaaaatgtaagcttctcacaagcagcaaaggaatgtaactgcctgtagctaccacatcaagggagagaagaggcttgcgtactttgggttgatctcactgtacaaaaaaagtgtacccctattggaagaaataaggaatacttgaaggtttctcctttttttacacttgagtcatgtgcaaggttgaaccatatgaaattgccagtgttcaaccattgctgatctgcaaaagcgacaatatcatatgcctcaacctaacacttactcttaaatgcaggttaaaatctctgtgaggcaaagggataatattctctaggaactcacttttgagagtatttttctctaacccatgtggatctaaattttaaaaataggaatgaatctcttaattgcagcttgtggagagtataaaacattttgagcacaatatgcagcacataacttttcagattgtgtttgcatagaaaaggttaaaatcaattctttcagttactgtattgttcatttcttgtaaaggtcttcctacatttgagacgagaccctttaacataggctgccttagtaacaaaataaaacagatgtgtcataatattaactgtcctaaagaacatgtgtcttgcaaatgccatggaactgaatatttatttccttgtgagtattatgaccgttaccaaaggactcaaccagatttagggctcttcttaattgatcatgttcagaaagggactcatttggtcccactttgtaacatgggaagagtagaagagaaaattaaatgtggaaatcataaatgcttttctaacagggttatgctattctgtaacactaaatgtctgtcttttctcttaaaagattaagttttattaattttgtcatacatttctctatttgaatatatcttaaccattttatgttccaaattcgttttttgtccaagacattctatcagaattttacttgcctctataatctgaaaaatgggttctagaatgtcccacttgctgtctcttagaggctgagcttcatttctatgagcaaagagctcatttagcaatgtagttatttcagtatttatttctattatggaatccctggggttcagaatgtaactttgtacatgagatatatataaatatgtatatgaacatgta

SEQ ID NO: 48267 - DNA, 3139 bp, Artificial Sequence
  derived and/or modified sequence
ataaatgctaggagcagcagctctatggttatgaggtggggagaacggaatgacgtcatcgcttgggagctgctgcaggatggagtggaaaatgctttgaacatagtgaagaatgatttgatagcaaaagtggatgaactgacctgtgagaaagatgtgctgcaaggggaattggaggctgtgaagcaagccaaactgaaactagaggaaaagaacagagaattggaggaagagcttaggaaagctcgggcagaagctgaagatgcaaggcaaaaagcaaaagatgacgatgatagtgatattcccacagcccagaggaaacggtttactagagtagaaatggcccgtgttctcatggagcgaaaccagtataaagagagattgatggagcttcaggaagctgttcgatggacagagatgattcgggcatcacgagaaaatccagccatgcaggaaaaaaaaaggtcaagcatttggcagtttttcagccgacttttcagctcctcaagtaacacgactaagaagcctgaaccacctgttaatctgaagtacaatgcacccacgtctcatgttactccgtccgtcaagaaaagaagcagcaccttatctcagctccctggggataagtccaaagcctttgatttccttagtgaagaaactgaagctagtttagcctcacgcagagaacaaaagagagagcagtatcgtcaggtaaaagcacatgttcagaaggaagacggtagagtgcaggcttttggctggagtctgcctcagaagtacaaacaggtaaccaatggtcaaggtgaaaataagatgaaaaatttacctgtgcctgtctatctcagacctctggatgaaaaagatacatcaatgaagctgtggtgtgctgttggagtcaatttatctggtgggaagaccagagatggtggttctgttgttggagcaagtgtattttacaaggatgttgctggtttggatacagaaggcagtaaacagcgaagtgcctctcagagtagtttagataagttagatcaggaacttaaggaacagcagaaggagttaaaaaatcaagaagaattatccagtctagtttggatctgtaccagcactcattcggctacaaaagttcttattattgatgctgttcaacctggcaacatcctagacagtttcactgtttgcaactctcatgttctgtgcattgcaagtgtgccaggtgcacgagaaacagactaccctgcaggagaagatctttcagaatctggtcaggtagacaaagcatctttatgtggaagtatgacaagcaacagctcagcagagacagacagcctgttaggaggcatcacagtggttggttgttctgcagaaggtgtgacgggagctgccacttcccctagtacaaatggtgcttctccagtgatggataaaccaccagaaatggaagcagaaaatagtgaggttgatgaaaatgttccaacagcagaagaagcaactgaagctacagaagggaatgcggggtcagctgaagacacagtggacatctcccaaactggcgtctacacagagcatgtctttacagatcctttgggagttcagatcccagaagacctctccccagtgtatcagtcgagcaatgactcagatgcatataaagatcaaatatcagtactgccaaatgaacaagacttggtgagagaagaagcccagaaaatgagtagtcttttaccaactatgtggcttggagctcaaaatggctgtttgtatgtccattcatctgtagcccagtggaggaaatgtctccattccattaaacttaaagattcgattctcagtattgtacacgtgaagggaatcgtgttagtagccctggctgacggcacccttgcaatctttcacagaggagtggatgggcagtgggatttgtcaaactatcacctcttagaccttggacggcctcatcattccatccgttgcatgactgtggtacatgacaaagtctggtgtggctataggaacaaaatctatgtggtgcagccaaaggccatgaaaatagagaaatcttttgatgcacatcccaggaaggagagccaagtgcgacagcttgcgtgggtgggggatggcgtgtgggtctccattcgcttggattctacgctccgtctctatcatgcacacacttatcaacatctacaggatgtggacattgagccttatgtaagcaaaatgttaggtactggaaaactgggcttctcttttgtgagaattacagctcttatggtgtcttgtaatcgtttgtgggtggggacaggaaatggtgtcattatctccatcccattgacagaaacaaataaaacctcaggtgtaccaggaaatcgtcctggaagtgtaatccgtgtatatggtgatgaaaacagtgataaagtgactccagggacatttataccctattgttcaatggcacatgcacagctttgcttccatgggcaccgggatgctgtgaaattctttgtggcagtcccaggtcaagtcatcagcccacaaagtagcagtagtggcacggatctgacgggtgacaaagcagggccatctgcacaggagcctggtagtcagacgcccttgaagtctatgcttgtcatcagtggaggagagggctacatcgacttccgaatgggtgatgaaggtggagaatcagaacttcttggagaggatcttccacttgaaccttctgtcaccaaagcagaaaggagtcacttgatagtgtggcaagtgatgtatggcaatgagtgagcccatgggaaacaggtggagatggggaagccgtctcttctgcatggtttattttccctctatccttttatttaatgctcttttgtgagataagtttcaccacataatgtgtgagcattttttcctgttaactttatattacaaaatccgttctaccataacaatacagaggaactagctgtgttactgcaccagtgttataggtaacttcagtatattatgaacaaatcaaagaatgtttacttcctgcaaactggtgaattatagaaagcaatccagatgtggtttactctgccacagtctaatgtcattcacttcatttgatggggtcacttgttagctgtcactaataatg

SEQ ID NO: 48268 - DNA, 1013 bp, Artificial Sequence
  derived and/or modified sequence
ggtgagagcgcctacgccacccctcccctcctccggccccggcccccaccccgccgggcccagccccagccccggcccgggctccagccctagtacccgtcccagcccgagtcgggtccgtcccgtgcgggcaggtgccgcccctctgccggcgacgccccgggccgcccgcccgtccgcttgccaccatggagctggaggacggtgtggtgtatcaggaggagcccggcggctccggggccgtgatgtcggagcgggtgtccggcctggccggctccatctaccgcgagttcgagcggcttatcgggcgctatgacgaggaggtggtcaaagagctgatgccgctggtggtggctgtgctggagaacctggactcggtgttcgcgcaggaccaggagcaccaggtggagctggagctgctgcgggacgacaacgagcagctcatcacccagtacgagcgggagaaggcgctgcgcaagcacgctgaggagaaattcattgaatttgaagactctcaagaacaggaaaaaaaggacttacagacccgagtggaatctttagaatctcaaacaagacaacttgagctgaaagcgaaaaactatgctgaccagagcgccatgagtcctggatgcatgctgctgtttgtgtttggctttgttggcggggcggtggtcattaattctgctatcttagtatctctctctgttttgctgcttgtgcacttttctatttctaccggtgtgccagctctgacgcagaacctaccaaggatactcagaaaagaacgccctatatcattaggaattttcccattacctgctggagatggattgcttacacctgatgctcagaaaggaggagagacccctggatctgagcaatggaaatttcaggaattaagtcaaccacgttctcataccagcctgaaggtcagcaatagtcctgaacctcagaaggctgtagaacaggaggtgagaatggtgcttcttaacattttgcaaaaagtatactaa

SEQ ID NO: 48269 - protein, 164 aa, Artificial Sequence
  derived and/or modified sequence
MMVRDERRFKMADKDGDLIATKEEFTAFLHPEEYDYMKDIVVQETMEDIDKNADGFIDLEEYIGDMYSHDGNTDEPEWVKTEREQFVEFRDKNRDGKMDKEETKDWILPSDYDHAEAEARHLVYESDQNKDGKLTKEEIVDKYDLFVGSQATDFGEALVRHDEF

SEQ ID NO: 48270 - DNA, 948 bp, Artificial Sequence
  derived and/or modified sequence
atggacctaagacagtttctgatgtgcctgtcgctctgcactgcctttgctttgtctaaacccaccgagaagaaggacagagtacatcacgaacctcagctgagcgacaaggtgcataatgacgcccagagcttcgactacgaccatgatgccttcctgggcgctgaggaagccaaaacatttgaccagctgacacccgaggaatcgaaggagcgtttgggaatgattgtggacaagatcgacgccgataaggatggtttcgtgactgaaggggagcttaagtcctggataaagcacgcacagaaaaaatatatctatgacaacgtcgaaaaccagtggcaggaatttgacatgaaccaggacggattaatttcttgggacgaatacaggaacgtgacctacggaacatacttagacgacccagatccagatgatggcttcaactataaacagatgatggtccgtgatgaacgacgattcaagatggccgataaggatggcgatctgatcgctactaaggaggaattcacagcctttttgcacccagaggagtacgactacatgaaggacattgtagtgcaagagacaatggaggatatcgataagaatgctgacgggtttattgacctagaggaatacatcggcgacatgtacagccacgatggaaatacagacgaacctgagtgggtgaaaaccgaaagagagcagttcgtcgagttccgagacaagaaccgggacggcaagatggacaaggaggaaacaaaggactggattttaccatctgactacgaccacgcagaggccgaagcacgtcacctagtgtatgagagtgatcagaacaaagacggaaagctgaccaaagaagaaattgttgataaatacgacttgtttgtgggaagccaggccacggattttggcgaggctcttgtaagacacgacgagttctag

SEQ ID NO: 48271 - DNA, 513 bp, Artificial Sequence
  derived and/or modified sequence
atggatctcagacagtttcttatgtgtctttcactctgcaccgcattcgctctgtcaaagcccactgaaaagaaggatagggtgcaccacgagcctcaactgagcgacaaggttcataacgacgctcagtcttttgattacgaccacgacgcctttctcggggccgaagaggccaaaaccttcgaccagctcactcccgaggagtctaaagagcggctgggaatgattgtggataaaatcgacgcggacaaggacggtttcgtcacagagggtgagcttaaatcatggattaaacacgcccagaaaaaatatatttacgataacgtggagaaccagtggcaagaattcgacatgaaccaggacgggctgatctcatgggacgagtaccgcaatgtgacctatgggacttacctggacgatccagatccagacgacggattcaactataaacaaatgatggtgagagatgagcggcgatttaagatggctgatcgggcccgcgccgtgtgctag

SEQ ID NO: 48272 - DNA, 606 bp, Artificial Sequence
  derived and/or modified sequence
atggatctacgacaattcttaatgtgtctttccctatgtacagcttttgcactgtctaagcctaccgagaaaaaggaccgtgttcaccacgaaccgcagttatctgataaagtgcataacgacgcacaatcctttgactatgaccacgacgcctttctgggcgccgaggaagccaagacttttgaccagctcactcccgaggagagcaaggaaagactcggcatgatagtcgataaaatcgacgctgacaaggatgggtttgtaaccgagggcgaattgaaaagttggataaaacacgcccagaaaaagtatatctatgacaacgtggaaaatcaatggcaggaattcgacatgaaccaggatggactgatctcgtgggatgagtaccgcaacgtaacttacggcacttaccttgatgatccagacccagacgacggattcaactacaagcagatgatggttagggatgaaagacgcttcaaaatggctgacaaagacggggacctgattgccactaaagaggaaattgttgacaaatacgacctgtttgtggggtctcaggctacagacttcggtgaagccctggtacgacacgacgaattctag

SEQ ID NO: 48273 - DNA, 948 bp, Artificial Sequence
  derived and/or modified sequence
atggacctgcggcagttcctgatgtgcctgagcctgtgcacagcctttgccctgagcaagcccacagagaagaaggacagagtgcaccacgagccccagctgagtgacaaggtgcacaatgatgcccagagctttgattatgaccatgatgccttcctgggcgctgaggaggccaagacctttgaccagctgaccccagaggagagcaaggagcggctgggcatgattgtggacaagattgatgctgacaaggatggctttgtgacagaaggagagctgaagtcctggatcaagcacgcccagaagaagtacatctatgacaacgtggagaaccagtggcaggagtttgacatgaaccaggacggcctcatctcctgggatgagtacagaaatgtgacctacggcacctacctggatgatcctgaccctgatgatggcttcaactacaagcagatgatggtgagagatgagcggcgcttcaagatggctgacaaggatggagacctgattgccaccaaggaggagttcaccgccttcctgcaccctgaggagtatgactacatgaaggacatcgtggtgcaggagaccatggaggacatcgacaagaatgctgatggcttcatcgacctggaggagtacatcggggacatgtacagccatgatggcaacacagatgagcctgagtgggtgaagacagagcgggagcagtttgtggagttccgggacaagaacagagatggcaagatggacaaggaggagaccaaggactggatcctgcccagcgactatgaccacgccgaggccgaggcccggcacctggtgtatgaaagtgaccagaacaaggatggcaagctgaccaaggaggagatcgtggacaagtatgacctgtttgtgggcagccaggccacagactttggagaggccctggtgagacatgatgagttctag

SEQ ID NO: 48274 - DNA, 513 bp, Artificial Sequence
  derived and/or modified sequence
atggacctgcggcagttcctgatgtgcctgagcctgtgcacagcctttgccctgagcaagcccacagagaagaaggacagagtgcaccacgagccccagctgagtgacaaggtgcacaatgatgcccagagctttgattatgaccatgatgccttcctgggcgctgaggaggccaagacctttgaccagctgaccccagaggagagcaaggagcggctgggcatgattgtggacaagattgatgctgacaaggatggctttgtgacagaaggagagctgaagtcctggatcaagcacgcccagaagaagtacatctatgacaacgtggagaaccagtggcaggagtttgacatgaaccaggacggcctcatctcctgggatgagtacagaaatgtgacctacggcacctacctggatgatcctgaccctgatgatggcttcaactacaagcagatgatggtgagagatgagcggcgcttcaagatggctgaccgggcccgggctgtgtgctag

SEQ ID NO: 48275 - DNA, 606 bp, Artificial Sequence
  derived and/or modified sequence
atggacctgcggcagttcctgatgtgcctgagcctgtgcacagcctttgccctgagcaagcccacagagaagaaggacagagtgcaccacgagccccagctgagtgacaaggtgcacaatgatgcccagagctttgattatgaccatgatgccttcctgggcgctgaggaggccaagacctttgaccagctgaccccagaggagagcaaggagcggctgggcatgattgtggacaagattgatgctgacaaggatggctttgtgacagaaggagagctgaagtcctggatcaagcacgcccagaagaagtacatctatgacaacgtggagaaccagtggcaggagtttgacatgaaccaggacggcctcatctcctgggatgagtacagaaatgtgacctacggcacctacctggatgatcctgaccctgatgatggcttcaactacaagcagatgatggtgagagatgagcggcgcttcaagatggctgacaaggatggagacctgattgccaccaaggaggagatcgtggacaagtatgacctgtttgtgggcagccaggccacagactttggagaggccctggtgagacatgatgagttctag

SEQ ID NO: 48276 - DNA, 948 bp, Artificial Sequence
  derived and/or modified sequence
atggacctgcggcagttcctgatgtgcctgagcctgtgcaccgccttcgctctgagtaagcctacagaaaaaaaggatcgagtccatcacgagccccagctgtccgataaagtgcacaatgacgctcaatctttcgattatgaccacgacgcatttttaggcgctgaggaagccaagaccttcgatcagcttaccccggaggaatccaaggagagactcggcatgatcgtggacaagatcgatgcagataaggacggatttgtgaccgaaggagaacttaagagctggatcaagcacgcacagaagaagtatatctacgataatgtggagaatcagtggcaagagtttgatatgaaccaagacggattaatcagttgggatgagtacaggaatgtcacttacggcacctacctagacgatcctgacccggacgacggtttcaattataagcagatgatggtacgcgatgagcggcggtttaaaatggcagataaggatggtgatctgattgcaaccaaggaagaatttactgcctttctacacccggaggaatatgactatatgaaggacattgtcgtgcaggagaccatggaggatattgataaaaatgcggacggctttattgatctggaagaatatatcggcgatatgtatagtcatgacggcaacactgacgaaccagaatgggttaagacggagcgcgagcagttcgtcgaattcagagataagaaccgagacggcaagatggacaaagaagagaccaaggactggatcctgccttctgattatgaccacgctgaagccgaggctagacaccttgtctatgagtcagaccaaaataaagacggcaaattgaccaaagaggagatagtggacaaatacgatctctttgtgggatcacaggcgactgatttcggagaggctctcgttcgtcacgatgaattctag

SEQ ID NO: 48277 - DNA, 513 bp, Artificial Sequence
  derived and/or modified sequence
atggacctgcggcagttcctgatgtgcctgagcctgtgcaccgcctttgcactgagtaaaccaactgagaagaaagacagagtgcatcatgaacctcagttgagtgacaaagtacataatgacgcgcagtctttcgactacgaccacgatgcatttttgggagctgaggaggccaagacttttgaccagttgactccagaagagtctaaagagcggctggggatgatcgtggacaaaattgacgccgataaggatggctttgtgactgagggagagctgaagtcctggatcaagcatgctcaaaagaaatacatatacgacaacgtggaaaaccagtggcaagaatttgatatgaaccaggacggccttatatcctgggatgagtacagaaatgttacgtatggtacgtatctggacgatccagaccctgacgatggcttcaattataagcaaatgatggttagagatgaacggcgcttcaaaatggccgacagagctcgcgcagtttgctag

SEQ ID NO: 48278 - DNA, 606 bp, Artificial Sequence
  derived and/or modified sequence
atggacctgcggcagttcctgatgtgcctgagcctgtgcaccgccttcgcactctcaaaaccaaccgagaaaaaagacagagttcaccacgagccacagctcagcgataaggtccacaacgatgcccagtcctttgactatgaccatgacgctttcctgggcgccgaggaggcgaagaccttcgaccagttgaccccagaagagtccaaagaaaggctgggcatgattgtcgataaaattgatgcggataaggatggctttgttacagaaggcgagctcaagagttggatcaaacatgctcagaaaaaatacatctacgacaacgtggaaaaccagtggcaggaatttgacatgaaccaggatgggctgattagctgggatgagtatcggaacgtgacctatgggacttatttagacgatccggacccagatgatggatttaattacaaacagatgatggtcagggatgagcggcggttcaagatggcagataaggatggcgacctgattgcaacaaaagaagagatagtcgataagtacgatctcttcgttggtagtcaggcaaccgatttcggggaagcgttggtccggcacgacgaattctag

SEQ ID NO: 48279 - DNA, 948 bp, Artificial Sequence
  derived and/or modified sequence
atggacctgaggcagttccttatgtgtctgtctctatgtaccgccttcgctctcagcaaaccgaccgagaaaaaggatagagtgcatcacgagcctcagcttagtgacaaggtgcataatgatgcacaaagcttcgactacgaccacgatgcttttctaggcgctgaagaagcaaaaacttttgaccagttaactccggaggagagcaaagaacgcctgggaatgattgttgataaaattgatgccgataaggacgggttcgtgaccgaaggagagctgaaaagctggatcaagcacgcacaaaaaaaatacatctatgacaatgtcgagaaccagtggcaggagtttgacatgaatcaagatggcctgatctcttgggacgagtatcgtaatgtgacctatgggacatacctagacgacccggacccggacgatggcttcaactacaaacagatgatggtacgcgacgagcggaggttcaaaatggcagataaagacggggacctgatcgccactaaggaggaatttacagctttcctgcaccctgaggaatacgactacatgaaagacatcgttgtccaggagactatggaagatattgacaaaaatgctgatggctttatcgacctggaggaatacattggggacatgtatagccacgatggtaataccgacgaacctgagtgggttaagacggagcgggaacagtttgtagaattcagagacaagaacagggatggaaagatggataaggaggagaccaaggactggatattaccaagcgattacgaccacgcagaagccgaagcgcgacaccttgtttacgagtcagatcagaacaaagacggcaagcttacgaaagaagagattgtggataaatacgatctttttgtcggttctcaggccaccgacttcggtgaggctcttgtccggcatgacgagttctag

SEQ ID NO: 48280 - DNA, 513 bp, Artificial Sequence
  derived and/or modified sequence
atggatctcaggcagttcctcatgtgcctcagtctgtgtactgcttttgcccttagcaagccgactgagaaaaaggatcgagtccatcacgaaccccaattaagcgacaaagtccacaacgatgctcagagcttcgactatgatcacgacgccttcctcggcgcagaggaggcgaagacattcgaccagttgactcccgaggagtcaaaagaacgcttggggatgatcgtagacaaaattgatgcagataaagacggttttgtcaccgaaggggagctcaaaagctggatcaaacacgctcagaaaaagtatatatatgacaacgtggagaaccagtggcaggagtttgacatgaatcaggatggcctgataagctgggacgagtaccggaatgtcacctacggcacctatttggatgacccagatcctgacgatggctttaattataaacagatgatggtgcgggatgaaaggcgatttaaaatggctgatcgcgctcgtgcagtgtgctag

SEQ ID NO: 48281 - DNA, 606 bp, Artificial Sequence
  derived and/or modified sequence
atggatctgcggcagttcctgatgtgcctctccttatgcaccgccttcgcgctatccaagcccaccgagaagaaagaccgtgtgcatcacgaacctcaattgtcagataaagtgcacaacgacgctcagtctttcgactatgatcacgacgccttcctcggggctgaagaggctaaaacattcgatcagctgacccccgaagagagcaaggagagattgggaatgattgtggacaagatcgatgccgataaggacggcttcgtgactgagggggaactgaagagctggatcaaacacgcacagaagaaatacatctatgacaatgtggagaaccaatggcaagaattcgacatgaaccaggacggactgataagttgggacgagtataggaacgtgacatatgggacctacctggacgatcccgaccccgacgacggctttaactacaaacaaatgatggtgagggacgaacgccgatttaaaatggcagacaaagatggtgatctcattgctactaaagaggagattgtggataaatacgacctatttgtcggcagccaggcaaccgattttggggaggccctggtgcgacacgacgaattctag

SEQ ID NO: 48282 - DNA, 948 bp, Artificial Sequence
  derived and/or modified sequence
atggacttaagacagtttctgatgtgcctcagcctgtgcaccgcgttcgctctgtcgaaacccactgaaaaaaaggatagagtccatcacgaacctcagctttctgataaagtgcacaacgatgcccaaagttttgactacgatcacgatgcattcctaggggcagaggaagctaagaccttcgaccaattgacccccgaagaatcaaaggaaaggctgggcatgatcgtagataagattgacgctgataaggacggatttgttaccgagggggaactgaagagttggataaaacacgcgcagaagaagtacatctacgacaacgtggagaaccagtggcaggaattcgacatgaatcaggacggacttatctcatgggacgagtatcggaacgtaacctatggaacctatctggatgatccagaccctgacgacgggtttaattacaagcagatgatggtaagagacgagcgacggtttaagatggcagataaggacggagatctgatcgccacgaaagaggaattcactgcttttctacacccggaagagtatgattacatgaaggacatcgtggtccaagagaccatggaagatattgataaaaatgcggacgggtttattgacctcgaggaatatataggtgatatgtactcacacgacggtaatactgacgaacctgagtgggtgaagaccgagcgagagcagtttgtggagtttcgggataagaacagagacgggaagatggacaaagaagaaaccaaagactggattttacctagtgactacgatcatgccgaggccgaggctcgacacctcgtttacgagtcagatcagaacaaagacggaaaactgacaaaggaagagatcgtagataagtatgacttattcgtgggatcccaggcgacagacttcggtgaagcattagtcaggcacgatgaattttag

SEQ ID NO: 48283 - DNA, 513 bp, Artificial Sequence
  derived and/or modified sequence
atggacttaagacaattccttatgtgccttagcctgtgtaccgcttttgccctaagcaagcctacagagaaaaaggatagagtgcatcatgaacctcaacttagtgacaaagtgcacaatgatgctcagagctttgactacgaccatgatgcttttctgggcgcagaggaagccaagacattcgaccaactgacccctgaggaaagtaaggagaggttgggaatgatcgtagataaaatcgacgcagataaggatggatttgtgaccgaaggagaactgaagagctggatcaagcacgcgcagaaaaagtatatctacgataatgtggaaaaccagtggcaggaatttgacatgaaccaggacgggttgatttcttgggatgaataccgcaacgtaacttatgggacataccttgacgaccccgacccagatgacgggtttaactacaagcagatgatggttcgcgacgaacgccgctttaagatggccgaccgagctagggctgtgtgctag

SEQ ID NO: 48284 - DNA, 606 bp, Artificial Sequence
  derived and/or modified sequence
atggatctgcgccaatttttaatgtgtctgagtctttgcaccgcattcgctttatctaaacctacagaaaagaaggaccgcgtacaccatgagcctcagttaagtgacaaagtccataatgatgcccagtcttttgactatgaccatgacgcattcttgggcgctgaagaggctaagacatttgaccagttgacccccgaggagagcaaagagcgcctggggatgatagtggacaagatcgacgccgacaaggatggcttcgtgaccgagggcgagttgaagagctggattaaacatgctcagaagaagtatatatatgacaatgttgagaaccagtggcaagagtttgatatgaatcaggacggcctgattagttgggacgagtataggaatgtgacgtacgggacatacctcgacgatccagacccggacgacggatttaattacaaacaaatgatggttagggacgaacgacgattcaaaatggctgacaaggatggtgatctcatagcaactaaagaggagatagtggataaatatgatctgtttgtcgggtcacaggcaacggactttggagaggccctggtgcgtcatgatgaattttag

SEQ ID NO: 48285 - DNA, 948 bp, Artificial Sequence
  derived and/or modified sequence
atggatctccgccagttcctcatgtgtctgtcactgtgcactgcttttgccctttccaagcctactgagaaaaaagaccgcgtacaccatgaaccacaattgtccgataaagtgcacaacgatgcccagtcattcgattacgatcacgacgctttcttaggcgccgaggaagccaagactttcgaccagctgaccccggaagagagtaaagaaagattgggaatgattgtcgataaaatcgacgcagacaaagatggcttcgtgaccgaaggcgaactgaagtcttggattaaacatgcacagaagaagtatatttatgacaacgtagagaaccagtggcaggaatttgatatgaatcaggacggacttatcagctgggatgagtataggaacgtgacgtacggcacctacttagatgatccagatccagacgacggttttaactataaacagatgatggtgagagacgagaggaggtttaagatggcagataaggacggcgatttgatcgcaaccaaagaagagttcacagcttttttgcatcccgaagagtatgattacatgaaagatatagtggtgcaggagactatggaagacatcgacaagaatgccgacgggtttattgacctcgaagagtatatcggcgatatgtattcacatgacggaaatacggatgaaccggaatgggtgaagacagagagagaacagtttgtggaatttcgagataagaatcgggatggtaagatggacaaagaagaaacaaaagattggatactgcctagcgactacgaccacgccgaggccgaagctcggcacctggtatatgaaagcgaccaaaacaaagatggcaagctaacaaaggaggagattgtggacaagtacgacctgtttgtcgggtcacaggccacagactttggagaagctttagtgcgacatgacgaattttag

SEQ ID NO: 48286 - DNA, 513 bp, Artificial Sequence
  derived and/or modified sequence
atggatctgcgacagtttctgatgtgtttgtctctgtgcacagccttcgctttatcaaaacccaccgaaaaaaaggacagagtacaccatgagccacaattgtccgataaagttcataatgatgcccaatcatttgactacgaccatgacgcattcctgggtgccgaagaggccaagacttttgatcagttgacccctgaagagtccaaggagcgcctcggaatgattgtcgacaaaattgatgcagataaagacggcttcgtaaccgagggggaacttaaatcttggataaaacatgctcagaagaaatacatttatgacaacgtggaaaaccaatggcaggagttcgacatgaatcaagacggacttatcagctgggacgagtatagaaatgtgacatacgggacctacctagacgaccctgaccccgacgacggcttcaattataaacagatgatggtgagggatgagagaagattcaaaatggccgatcgcgctcgagccgtttgctag

SEQ ID NO: 48287 - DNA, 606 bp, Artificial Sequence
  derived and/or modified sequence
atggacctgcggcaattcttgatgtgtctgtccctctgtaccgcattcgccctgtctaagccgaccgaaaagaaggatcgagtacatcacgagcctcaactatcagataaggtgcacaatgacgctcagagctttgactatgatcatgatgcatttctgggagccgaagaagccaaaacatttgaccagctgacaccagaagagagtaaggaacgactggggatgattgtcgacaaaattgatgctgacaaggatggttttgtcacggaaggcgagctgaagtcatggatcaagcatgctcagaaaaaatatatatacgacaatgtcgagaaccaatggcaggagttcgacatgaatcaggacggccttatttcatgggatgaatatcgcaacgtgacgtacggcacctaccttgacgacccagatcctgatgacggctttaattataaacagatgatggtgagggacgaacggagatttaaaatggccgacaaagacggagatctcatagccactaaagaggaaattgtcgacaagtacgatcttttcgtgggtagccaggcaacagatttcggcgaggcactagtgcgtcatgacgaattctag

SEQ ID NO: 48288 - DNA, 948 bp, Artificial Sequence
  derived and/or modified sequence
atggacctgagacagttcctgatgtgcctgagcctgtgcaccgccttcgccctgagcaagcccaccgagaagaaggacagagtgcaccacgagccccagctgagcgacaaggtgcacaacgacgcccagagcttcgactacgaccacgacgccttcctgggcgccgaggaggccaagaccttcgaccagctgacccccgaggagagcaaggagagactgggcatgatcgtggacaagatcgacgccgacaaggacggcttcgtgaccgagggcgagctgaagagctggatcaagcacgcccagaagaagtacatctacgacaacgtggagaaccagtggcaggagttcgacatgaaccaggacggcctgatcagctgggacgagtacagaaacgtgacctacggcacctacctggacgaccccgaccccgacgacggcttcaactacaagcagatgatggtgagagacgagagaagattcaagatggccgacaaggacggcgacctgatcgccaccaaggaggagttcaccgccttcctgcaccccgaggagtacgactacatgaaggacatcgtggtgcaggagaccatggaggacatcgacaagaacgccgacggcttcatcgacctggaggagtacatcggcgacatgtacagccacgacggcaacaccgacgagcccgagtgggtgaagaccgagagagagcagttcgtggagttcagagacaagaacagagacggcaagatggacaaggaggagaccaaggactggatcctgcccagcgactacgaccacgccgaggccgaggccagacacctggtgtacgagagcgaccagaacaaggacggcaagctgaccaaggaggagatcgtggacaagtacgacctgttcgtgggcagccaggccaccgacttcggcgaggccctggtgagacacgacgagttctag

SEQ ID NO: 48289 - DNA, 513 bp, Artificial Sequence
  derived and/or modified sequence
atggacctgagacagttcctgatgtgcctgagcctgtgcaccgccttcgccctgagcaagcccaccgagaagaaggacagagtgcaccacgagccccagctgagcgacaaggtgcacaacgacgcccagagcttcgactacgaccacgacgccttcctgggcgccgaggaggccaagaccttcgaccagctgacccccgaggagagcaaggagagactgggcatgatcgtggacaagatcgacgccgacaaggacggcttcgtgaccgagggcgagctgaagagctggatcaagcacgcccagaagaagtacatctacgacaacgtggagaaccagtggcaggagttcgacatgaaccaggacggcctgatcagctgggacgagtacagaaacgtgacctacggcacctacctggacgaccccgaccccgacgacggcttcaactacaagcagatgatggtgagagacgagagaagattcaagatggccgacagagccagagccgtgtgctag

SEQ ID NO: 48290 - DNA, 606 bp, Artificial Sequence
  derived and/or modified sequence
atggacctgagacagttcctgatgtgcctgagcctgtgcaccgccttcgccctgagcaagcccaccgagaagaaggacagagtgcaccacgagccccagctgagcgacaaggtgcacaacgacgcccagagcttcgactacgaccacgacgccttcctgggcgccgaggaggccaagaccttcgaccagctgacccccgaggagagcaaggagagactgggcatgatcgtggacaagatcgacgccgacaaggacggcttcgtgaccgagggcgagctgaagagctggatcaagcacgcccagaagaagtacatctacgacaacgtggagaaccagtggcaggagttcgacatgaaccaggacggcctgatcagctgggacgagtacagaaacgtgacctacggcacctacctggacgaccccgaccccgacgacggcttcaactacaagcagatgatggtgagagacgagagaagattcaagatggccgacaaggacggcgacctgatcgccaccaaggaggagatcgtggacaagtacgacctgttcgtgggcagccaggccaccgacttcggcgaggccctggtgagacacgacgagttctag

SEQ ID NO: 48291 - protein, 379 aa, Artificial Sequence
  derived and/or modified sequence
METLCPAPRLAVPASPRGSPCSPTPRKPCRGTQEFSPLCLRALAFCALAKPRASSLGPGPGELAARSPVLRGPQAPLRPGGWAPDGLKHLWAPTGRPGVPNTAAGEDADVAACPRRGEEEEGGGGFPHFGVRSCAPPGRCPAPPHPRESTTSFASAPPRPAPGLEPQRGPAASPPQEPSSRPPSPPAGLSTEPAGPGTAPRPFLPGQPAEVDGNPPPAAPEAPAASPSTASPAPAAPGDLRQEHFDRLIRRSKLWCYAKGFALDTPSLRRGPERPPAKGPARGAAKKRRLPAPPPRTAQPRRPAPTLPTTSTFSLLNCFPCPPALVVGEDGDLKPASSLRLQGDSKPPPAHPLWRWQMGGPAVPEPPGLKFWGINMDES

SEQ ID NO: 48292 - DNA, 3227 bp, Artificial Sequence
  derived and/or modified sequence
ggagccagcggggaagaaagaaaccgagcgggcggaaggcgccctccccgccgcctgggcccgggcaccgggtgccgggcccggggtccttcccgcctcccgcggccgccggccgctttgtttcccctgcctctgcgcttcgggcgactcgagagggtctcccgccggggttgcgaaggggacgcggcggcagaagggcggccgaccccgccgggactcacagggacccaggagtccggccgccgggagggccgcgtgaggagagcgaagagggagcccgagctctgcggccccgggtggcgggccgggggcgcccgtgagcagagacctccccgtcgacggggggcgatgttcccctcacccgtgggctcttcgggcagccagggcatcccgccgctgggacctggacccgctcagtgggcacccctcaggctgctccatggagaccctgtgccctgcgccccgcctggcagtgccggcgtccccgcgagggtcgccctgctcccccacgccccggaagccgtgtcgggggacccaggaattctctccgctgtgcctgcgtgccctcgccttctgcgcccttgccaagccccgggcgtcctctctgggcccggggcctggggagctggcggcgcggtccccagtgctgcggggccctcaggcccccctgcgccctggcggctgggccccggatggcctgaagcacctctgggcaccgaccgggcggcccggcgttcctaacaccgccgccggcgaggatgcggacgtcgcagcgtgcccccgccgcggagaggaggaagagggcggaggcggtttcccgcacttcggcgttcgctcctgtgcacctccgggccgctgccctgcgcccccgcaccctcgggaatctacgaccagcttcgcctcggccccgcctcgcccggccccgggtctcgagcctcagcgtggcccagccgccagcccgcctcaggaacccagttcccggcctccgtcgccacctgcgggcctctccaccgagcccgcgggtcccgggacggcgccgcggccgttcctgcccggccagcctgccgaagtcgatggaaaccccccgccggccgcccccgaggctccagcggccagcccctcgacggccagcccggctccggccgcacccggagatctccgccaggaacatttcgatcgtctgatccgccggtcgaaactttggtgttacgcgaagggcttcgccttggacactccgagtttgcgccgggggccagagcggccgcctgcgaaagggccggctcggggagccgccaagaaacgccggctgccggcgccccctccgcgcaccgcgcagccccgccgccctgcaccgacgctccccaccacgagcaccttcagcctcctcaactgcttcccctgccccccggccctggtggtgggggaagacggagacctaaagccggcatcctcgcttcgcctccagggagactctaagcccccgcccgcccacccgctgtggaggtggcagatggggggtcccgctgtccctgagccccctggcctcaaattctgggggatcaacatggatgaaagctgaccgtgggacttctgccaaaggggaaaagttgggaccatggccaaaccgcgggcttgaggagggagccccgtttctcacatttgtccccttcctttacattttaggagctgtgggcagagggacctaaataacagtgatcttcattcaagcacctaagttttcggggtgacagtccctccccctcatcctttgcagaggaacccagggctggagtcgggagaaggctgatgacatagattccaatccctgcctccttccatctcggaccgttggaggcagggcctgcaccccagtgggagcaaaggaggccaccgctcaaagacacccccccacccaaaaaaaaggggagaagagagagacctcggtgatggacaaaccggttgttactgtgtctgtgggcgagcctggggtgcggggctgtggtgggggtggggagatgattggcagctccctgggggcatcccccacccccactgtccaggcctttaaccctttgctcccctcaggccttccctaacgctccaagcaccgctggagcctttaatgggtgagggaacttgggtaagaggaagatcacccccttcctgtcccctttctaggccccctcaagtgcaggtgacccttaattggtgagatcttcagcctcagccgccgacctttcccttttgtccagttttggagttcccgttttttccttgtttgctttccgagtgtaaggtctggccggtgagaaagatttcccccaaccttgattaatcagccccctcccccaacttacttcccttaggacgggtagggctgagggacctcctctcctggaaagtgcttactttgcctggggaaggggctagacactgtcccagggaaagtaatagaaggtggaagaaatcaataaaatcagaccaaacaagtcgcctttcgagggcctccaccgatttatggatgagagggggtggaggtggaaggcaggcccaagtccattctttggacacccaaactcagcccccttaaagagtggaaacaaaacaagctgcactttgcagaggtggtaaatgaaaggactcttggcctaacttcaagagtcccctggggtttgaaggggcaaagtttgagtctggatggaacctgggctgaggtaccttaagcttccccccgcaacaccccagcctcagggattgcgggagttgtcagagatctgatggatccgaaaggggcagggccaggggattaggtttggggtcagaggttctgttttccaggggaggggtgagataggcctggatcatgccctctgccatgccctccagctaggaggatcttgagtcagagaggattggaagtgctttctcctccacccaggtgaggtcaggggagcttaggtcttagggagatggcaagttgaggtatgaagggaagctggggcttttggagctgccgaacaactgagggacccagtgcgccttccatcccgcactagtgaatagcgccccctcttcccccgaaaacgaggtgcgagaggaacaattcccacgctggggaaggacttgtctccttttctgtgaaaatgctttgtaaaaagttgttattgtttgcatagagcagattcttgagaaaaactgttttggaccataaaagttttgtttgtttt

SEQ ID NO: 48293 - DNA, 1140 bp, Artificial Sequence
  derived and/or modified sequence
atggagaccctgtgccccgcccccagactggccgtgcccgccagccccagaggcagcccctgcagccccacccccagaaagccctgcagaggcacccaggagttcagccccctgtgcctgagagccctggccttctgcgccctggccaagcccagagccagcagcctgggccccggccccggcgagctggccgccagaagccccgtgctgagaggcccccaggcccccctgagacccggcggctgggcccccgacggcctgaagcacctgtgggcccccaccggcagacccggcgtgcccaacaccgccgccggcgaggacgccgacgtggccgcctgccccagaagaggcgaggaggaggagggcggcggcggcttcccccacttcggcgtgagaagctgcgccccccccggcagatgccccgcccccccccaccccagagagagcaccaccagcttcgccagcgccccccccagacccgcccccggcctggagccccagagaggccccgccgccagccccccccaggagcccagcagcagaccccccagcccccccgccggcctgagcaccgagcccgccggccccggcaccgcccccagacccttcctgcccggccagcccgccgaggtggacggcaaccccccccccgccgcccccgaggcccccgccgccagccccagcaccgccagccccgcccccgccgcccccggcgacctgagacaggagcacttcgacagactgatcagaagaagcaagctgtggtgctacgccaagggcttcgccctggacacccccagcctgagaagaggccccgagagaccccccgccaagggccccgccagaggcgccgccaagaagagaagactgcccgcccccccccccagaaccgcccagcccagaagacccgcccccaccctgcccaccaccagcaccttcagcctgctgaactgcttcccctgcccccccgccctggtggtgggcgaggacggcgacctgaagcccgccagcagcctgagactgcagggcgacagcaagcccccccccgcccaccccctgtggagatggcagatgggcggccccgccgtgcccgagccccccggcctgaagttctggggcatcaacatggacgagagctag

SEQ ID NO: 48294 - DNA, 1140 bp, Artificial Sequence
  derived and/or modified sequence
atggaaacactgtgccctgcacccagactcgctgtaccagccagtcctagaggaagcccttgctccccaacgcctagaaagccatgtcggggcactcaggaatttagtcctttgtgcctgcgcgccctcgcattctgtgctttagccaaacctagagcatcttcgctgggacctggccccggagagcttgccgctcgctcaccagtattgcggggaccacaggcacctctgcggcctggcggctgggctccagacgggctgaagcatctgtgggcacctaccggtaggcctggcgtgccaaatacggccgctggggaagatgccgatgtagccgcatgccctcggagaggcgaagaagaggaaggcggtgggggctttcctcacttcggggtccgaagctgtgcccctccaggccggtgtcctgcccctccacacccacgcgagagcacgaccagttttgccagcgcacctcctcggccagccccaggattagaaccccagcgaggccccgccgcatctcctccacaggaaccctcatcccgccctccctctcctcctgcagggctctccaccgaacccgctggcccaggtacagcaccacgcccttttctccctggtcagccggcagaggtggacgggaatcccccccccgcagcccccgaagccccagcggcgtccccgtcaacagcctcccccgcaccagctgcacccggcgatctgcggcaagaacatttcgaccgacttatcagacgttctaagctttggtgttatgccaagggcttcgccctggacacccctagcctgaggaggggacctgaacgtccccctgcaaagggaccagccagaggcgctgctaaaaagcggcgactgccagcgccccctccacgcactgcacaaccccgacggccagcccctactttgcccacaacgtctaccttctcccttttgaactgctttccctgtccacctgcgctggtggtcggggaggatggggacctgaaaccagccagtagtctgaggctgcagggcgatagcaagccaccccccgcccaccccttgtggcgctggcagatgggaggccctgcagtgcccgaacccccgggcttgaagttctggggaattaatatggatgaatcttag

SEQ ID NO: 48295 - DNA, 1140 bp, Artificial Sequence
  derived and/or modified sequence
atggagaccctgtgcccagccccccggctggccgtgcctgccagcccccggggcagcccctgcagccccacccccaggaagccctgccggggcacccaggagttcagccccctgtgcctgcgggccctggccttctgtgccctggccaagccccgggccagcagcctgggccctggccctggagagctggccgcccggagccctgtgctgcggggcccccaggcccccctgcggcctgggggctgggccccagatggcctgaagcacctgtgggcccccaccggccggcctggggtgcccaacacagctgctggggaggatgctgatgtggccgcctgccccaggagaggagaggaggaggagggcggcggcggcttcccccactttggagtgcgcagctgtgcccctcctggccgctgcccagccccaccccacccccgggagagcaccaccagctttgccagcgccccacccaggcctgcccctggcctggagccccagaggggccctgctgccagccccccccaggagcccagcagccggccccccagccccccagctggcctgagcacagagcccgccggccctggaacagccccccggcccttcctgcccggccagcctgctgaggtggatggcaaccccccacctgctgcccctgaggccccagctgccagccccagcacagccagccctgccccagctgcccctggggacctgcggcaggagcactttgacaggctcatccgccgcagcaagctgtggtgctacgccaagggctttgccctggacacccccagcctgcggcggggccctgagcggcccccagccaagggccctgcccggggggccgccaagaagaggcggctgcctgcccccccacccaggacagcccagcccaggaggcctgcccccaccctgcccaccaccagcaccttcagcctgctgaactgcttcccctgccccccagccctggtggtgggagaagatggagacctgaagccagccagcagcctgcggctgcagggcgacagcaagcccccaccagcccaccccctgtggcgctggcagatgggcggccctgctgtgcctgagcccccaggcctgaagttctggggcatcaacatggatgagagctag

SEQ ID NO: 48296 - DNA, 1140 bp, Artificial Sequence
  derived and/or modified sequence
atggagaccctgtgccccgccccccggctggccgtgcccgccagcccaagagggagcccatgctctcccactcctcgcaagccatgtagagggacccaggaattcagccccctatgtctgagagctctggctttttgtgccctcgcaaaaccgcgggccagttcgctcggtccagggccaggcgagctcgctgctagaagccccgtgctccggggtcctcaggcccccttacgtcctggaggctgggcgcccgatggcctgaagcacctgtgggccccaacgggtcggccgggggttcctaatactgctgccggtgaggatgccgatgtagccgcctgtccccgacggggtgaggaggaagaaggtggaggggggtttcctcattttggtgtcagaagctgcgcaccccccggtcggtgtccagccccaccgcatccgagagagtcaacgacctcttttgcatctgcacccccgagacctgcacccggtttggagccacaaaggggccctgctgcttccccgccgcaggagccctcatctagacctccgagcccaccggctggactgtctacagagcccgccggacccggaacagcacctagaccattcctgcctggccagcctgccgaagtggacggaaatcccccacctgctgcccctgaagcccccgcagccagcccgtccaccgcaagccctgcccccgctgccccaggcgacctgcgtcaagagcattttgatcgtctcatcaggaggagtaagctgtggtgttacgccaaggggttcgctctcgatactccaagccttcgccggggccccgagagaccgcccgccaagggcccggcaaggggtgccgccaaaaagagaagattgcccgctcctccaccaaggactgcacaaccgagaagaccagcccctacactgccaacaacatccacctttagcctgctcaactgcttcccatgtcctcccgccttggtggtcggcgaggatggcgatttaaaacccgcttcttctctgcggctacagggggactccaagcctcctcccgcacaccctctgtggaggtggcagatgggtgggccggcggtaccagagcccccgggcttgaaattttggggaatcaacatggacgaatcctag

SEQ ID NO: 48297 - DNA, 492 bp, Artificial Sequence
  derived and/or modified sequence
atgagcagctgccccgtgcacgactgccccagctgggaccccgagaggctagaaccagtggagacaggctctcggggcgccctgcgactcagaggcggggcccccggatccgccgctgggtttagagcgtctatctgggggcccgccggctacccgtcccctgtagggcttgggcacccggcctctctgccaaggcccgcctattccccccgctgccccgagcctgatgctcgccatggatggggctccggtagcaacgccgggtaccggggccccgaccgggctggaaccccctgtcccgcccaggacagagaaggcagatcttcttcccctgtgcctcccccacggctgaaagccatgacatcgcaggcgcggaagcagaatggaggcgctctgatcgatacggtagactggactagagaggcccccgattccgacccagtgatgtcaatgcagaagactcaaaaaccgcagacgaccgtgggccagtag

SEQ ID NO: 48298 - DNA, 1140 bp, Artificial Sequence
  derived and/or modified sequence
atggagaccctctgccccgcaccacgccttgcggtgcccgctagccctcggggttccccatgttcgccaacccccaggaaaccttgtcggggtacacaggagtttagtcccttgtgcttacgagctctggctttctgtgctctcgcaaagcccagggcaagttccctagggcctggccctggtgagttggccgctaggtccccggtactgcggggtccccaagctcctctgcgcccaggcggatgggctcccgatggtctcaagcacctgtgggcgcctaccggacgaccaggtgtgcccaacacagcagctggcgaagacgcagatgtcgctgcctgtcccagacgtggggaggaggaggaagggggtgggggtttccctcattttggtgtcaggtcatgcgcaccccctggaaggtgcccagccccaccccatcccagagagagtacaacttcattcgcgagtgctcccccacggcctgcgcctgggttggaaccgcagcggggtcccgcagctagtccaccacaggaaccgtcatcacgcccacctagccctccagccggtctgtcgacagaaccagccggtcctggtactgctcccagacctttcctcccagggcaacccgctgaggtggatggaaacccgcctcctgcagctccagaggcccctgccgcatccccctctacagctagcccagccccagccgcaccaggagatctgcgccaggagcattttgaccggctgatcagacgttcaaagctctggtgttacgctaaaggcttcgccctggacaccccgtcactacgcagggggcctgagagaccccctgcaaaaggccctgcgcgaggagcagcaaagaagcgtagactgccagccccaccgccacggacagcccagcctcggaggccagctccaacactgcccaccacctcaacttttagcctgctcaactgctttccgtgtcctccagccctggtggtgggcgaagacggagatctaaaacctgcctcttctcttagattgcagggggatagcaaaccccctcctgctcatcctctctggcgctggcagatgggcggacccgctgtgcccgagcctcctggactgaaattttgggggataaacatggacgagtcttag

SEQ ID NO: 48299 - protein, 237 aa, Artificial Sequence
  derived and/or modified sequence
MLDLTSRGQVGTSRRMAEAACSAHFLETTPTPNPPTTEEEKTESNQEVANPEHYIKHPLQNRWALWFFKNDKSKTWQANLRLISKFDTVEDFWALYNHIQLSSNLMPGCDYSLFKDGIEPMWEDEKNKRGGRWLITLNKQQRRSDLDRFWLETLLCLIGESFDDYSDDVCGAVVNVRAKGDKIAIWTTECENREAVTHIGRVYKERLGLPPKIVIGYQSHADTATKSGSTTKNRFVV

SEQ ID NO: 48300 - DNA, 714 bp, Artificial Sequence
  derived and/or modified sequence
atgctggacctgaccagcagaggccaggtgggcaccagcagaagaatggccgaggccgcctgcagcgcccacttcctggagaccacccccacccccaacccccccaccaccgaggaggagaagaccgagagcaaccaggaggtggccaaccccgagcactacatcaagcaccccctgcagaacagatgggccctgtggttcttcaagaacgacaagagcaagacctggcaggccaacctgagactgatcagcaagttcgacaccgtggaggacttctgggccctgtacaaccacatccagctgagcagcaacctgatgcccggctgcgactacagcctgttcaaggacggcatcgagcccatgtgggaggacgagaagaacaagagaggcggcagatggctgatcaccctgaacaagcagcagagaagaagcgacctggacagattctggctggagaccctgctgtgcctgatcggcgagagcttcgacgactacagcgacgacgtgtgcggcgccgtggtgaacgtgagagccaagggcgacaagatcgccatctggaccaccgagtgcgagaacagagaggccgtgacccacatcggcagagtgtacaaggagagactgggcctgccccccaagatcgtgatcggctaccagagccacgccgacaccgccaccaagagcggcagcaccaccaagaacagattcgtggtgtag

SEQ ID NO: 48301 - DNA, 714 bp, Artificial Sequence
  derived and/or modified sequence
atgctagacctgacatcccgtggacaagttggtactagtcggcggatggccgaggcagcctgcagcgcacatttcttagagaccacgcccacgcctaaccctcccaccacggaggaagagaagactgaatctaatcaagaggtggccaatccagagcactacatcaagcaccctctgcaaaacaggtgggctttgtggtttttcaagaacgataaatctaagacctggcaggcgaatctacgcctgatatccaagttcgatacggtagaagacttctgggccttgtacaatcacattcaactcagcagcaatctaatgccaggctgtgattattccctcttcaaggatggcattgagcccatgtgggaggacgagaaaaataagcgtggcggaaggtggctcattacattgaacaaacagcagaggaggagcgacctggatcggttctggctggagacactgctgtgtttaatcggggagtcattcgacgactattccgacgacgtatgcggagcagtagtgaatgttcgtgccaagggtgataaaattgccatctggacgactgagtgtgagaaccgggaagccgtgacccatatcgggcgtgtttacaaggaaagactgggtcttcccccgaagatcgtgataggttatcagagtcacgccgacacagccaccaagtcaggtagcacaacgaagaaccggtttgtggtgtag

SEQ ID NO: 48302 - DNA, 1097 bp, Artificial Sequence
  derived and/or modified sequence
gagtattgcctttggcccccacccccacgggtccccgcgctccgtcttccttctgactgggggactccgcgggacggcgttcccggcgcgcactgtaccccttgccgccccttccccttcatgttggacctgacctcccgcggacaagtggggacgtcccggaggatggccgaggcggcgtgtagcgcacactttctggaaaccacccctactcctaatcccccgactacagaagaggagaaaacggaatctaatcaggaggttgctaacccagaacactatattaaacatcccctacagaacagatgggcactctggttttttaaaaatgataaaagcaaaacttggcaagcaaacctgcggctgatctccaagtttgatactgttgaagacttttgggctctgtacaaccatatccagttgtctagtaatttaatgcctggctgtgactactcactttttaaggatggtattgagcctatgtgggaagatgagaaaaacaaacggggaggacgatggctaattacattgaacaaacagcagagacgaagtgacctcgatcgcttttggctagagacacttctgtgccttattggagaatcttttgatgactacagtgatgatgtatgtggcgctgttgttaatgttagagctaaaggtgataagatagcaatatggactactgaatgtgaaaacagagaagctgttacacatatagggagggtatacaaggaaaggttaggacttcctccaaagatagtgattggttatcagtcccacgcagacacagctactaagagcggctccaccactaaaaataggtttgttgtttaagaagacaccttctgagtattctcataggagactgcgtcaagcaatcgagatttgggagctgaaccaaagcctcttcaaaaagcagagtggactgcatttaaatttgatttccatcttaatgttactcagatataagagaagtctcattcgcctttgtcttgtacttctgtgttcatttttttttttttttttggctagagtttccactatcccaatcaaagaattacagtacacatccccagaatccataaatgtgttcctgg

SEQ ID NO: 48303 - DNA, 714 bp, Artificial Sequence
  derived and/or modified sequence
atgctggacctgaccagccggggccaggtgggcaccagcaggaggatggccgaggccgcctgcagcgcccacttcctggagaccacccccacccccaacccccccaccacagaggaggagaagacagagagcaaccaggaggtggccaaccctgagcactacatcaagcaccccctgcagaaccgctgggccctgtggttcttcaagaatgacaagagcaagacctggcaggccaacctgcggctcatcagcaagtttgacacagtggaggacttctgggccctgtacaaccacatccagctgagcagcaacctgatgcctggctgtgactacagcctcttcaaggatggcatcgagcccatgtgggaggatgagaagaacaagaggggcggccgctggctgatcaccctgaacaagcagcagaggagaagtgacctggaccgcttctggctggagaccctgctgtgcctgattggagagagctttgatgactacagtgatgatgtgtgtggggctgtggtgaatgtgcgggccaagggggacaagatcgccatctggaccacagaatgtgaaaatcgggaggccgtgacccacatcggccgggtgtacaaggagcggctgggcctgccccccaagatcgtgattggctaccagagccatgctgacacagccaccaagagcggcagcaccaccaagaacagatttgtggtgtag

SEQ ID NO: 48304 - DNA, 714 bp, Artificial Sequence
  derived and/or modified sequence
atgctggacctgaccagccggggccaggtgggcaccagccggcggatggctgaagctgcatgttctgcccattttcttgagacaactccaacaccaaacccccctactaccgaagaggagaaaaccgaatctaaccaagaggtcgccaaccccgaacattatattaagcatccccttcagaaccgatgggcactgtggttttttaaaaacgacaaatctaagacttggcaggcaaatctgcgcttgatctcgaaattcgatacagtggaagacttctgggcactgtataatcatattcagttaagtagtaatctaatgccaggctgtgactatagcctgttcaaagatggcattgaacctatgtgggaagatgagaagaataaaagaggaggacgctggctgattactctgaacaaacaacaacgccggtctgatctcgacaggttctggctcgaaaccctgttgtgcctgattggtgaaagcttcgatgactacagcgacgacgtatgcggggcagtggtaaatgtgagggcaaagggcgacaagatagctatctggacgacggagtgtgagaatcgggaggccgtgacccacatcgggcgcgtatataaggagaggctcggtctgccacccaaaattgtcataggctaccagtctcacgctgacactgcgaccaaaagcggatctacaaccaagaatagatttgtagtttag

SEQ ID NO: 48305 - DNA, 714 bp, Artificial Sequence
  derived and/or modified sequence
atgctcgacctgacctcccggggtcaggtgggtacatcccggagaatggccgaggccgcatgcagcgctcatttccttgaaacaacacccaccccgaatcctccaacaaccgaagaagagaagaccgaatccaatcaggaagttgctaaccccgagcattacataaaacacccactgcaaaatcggtgggctctgtggttctttaagaatgataagtcaaaaacctggcaggccaacctcagactgatttcaaagtttgataccgtggaggatttttgggcactatacaaccatatccaactgagttctaatctgatgccaggttgtgactacagtctctttaaggacggtattgagcccatgtgggaggatgaaaagaataaaaggggcggaagatggctgatcaccctcaataagcagcagcggagaagtgatcttgatcggttttggctcgagactttactgtgtcttattggcgaatcattcgacgactatagcgatgacgtctgtggagcagttgtaaacgtgcgggctaagggagataagatcgccatatggacaacagaatgtgagaatcgagaagctgtgacacacatcgggcgagtctataaggaacggctgggcctgccacctaagattgtcattggctatcaaagccacgccgacaccgccacaaagtcgggctccacgaccaaaaatcgttttgtggtgtag

SEQ ID NO: 48306 - protein, 248 aa, Artificial Sequence
  derived and/or modified sequence
MATVEPETTPTPNPPTTEEEKTESNQEVANPEHYIKHPLQNRWALWFFKNDKSKTWQANLRLISKFDTVEDFWALYNHIQLSSNLMPGCDYSLFKDGIEPMWEDEKNKRGGRWLITLNKQQRRSDLDRFWLETRWDLAMLPRLVSNFWPQVILPLQPPKVLELQLLCLIGESFDDYSDDVCGAVVNVRAKGDKIAIWTTECENREAVTHIGRVYKERLGLPPKIVIGYQSHADTATKSGSTTKNRFVV

SEQ ID NO: 48307 - DNA, 747 bp, Artificial Sequence
  derived and/or modified sequence
atggccaccgtggagcccgagaccacccccacccccaacccccccaccaccgaggaggagaagaccgagagcaaccaggaggtggccaaccccgagcactacatcaagcaccccctgcagaacagatgggccctgtggttcttcaagaacgacaagagcaagacctggcaggccaacctgagactgatcagcaagttcgacaccgtggaggacttctgggccctgtacaaccacatccagctgagcagcaacctgatgcccggctgcgactacagcctgttcaaggacggcatcgagcccatgtgggaggacgagaagaacaagagaggcggcagatggctgatcaccctgaacaagcagcagagaagaagcgacctggacagattctggctggagaccagatgggacctggccatgctgcccagactggtgagcaacttctggccccaggtgatcctgcccctgcagccccccaaggtgctggagctgcagctgctgtgcctgatcggcgagagcttcgacgactacagcgacgacgtgtgcggcgccgtggtgaacgtgagagccaagggcgacaagatcgccatctggaccaccgagtgcgagaacagagaggccgtgacccacatcggcagagtgtacaaggagagactgggcctgccccccaagatcgtgatcggctaccagagccacgccgacaccgccaccaagagcggcagcaccaccaagaacagattcgtggtgtag

SEQ ID NO: 48308 - DNA, 747 bp, Artificial Sequence
  derived and/or modified sequence
atggcgactgtagaaccagaaactacgccaacacccaaccctcccaccaccgaggaagaaaagacggagtcaaatcaagaagtcgcaaatccagaacactacatcaaacaccccctccaaaaccggtgggccctgtggttttttaaaaacgacaagtccaaaacatggcaggctaatttgcgtctgatatccaagttcgacacagtggaagacttctgggctctctacaaccatatacagctgtcctccaaccttatgccgggctgtgattattccctttttaaggacggaatcgagcctatgtgggaggatgagaaaaacaaaagaggcggacggtggctcattacactcaataagcaacaaaggaggtctgatcttgacaggttttggttagaaacccggtgggatctggcaatgcttcctcgcctggtgagcaacttttggccacaggtcatactccccttacagccacccaaagttctcgagctccagctgctctgtctgataggcgaatccttcgatgactatagcgacgacgtgtgcggcgctgtcgtgaacgtgagggcaaaaggggataagatcgccatttggacaaccgagtgcgagaatcgcgaggccgtaacccatataggaagagtatacaaggaaagactcgggctgccaccaaaaatcgtgatcggataccagtcacacgcagacacagcgaccaagtcaggctccaccacaaagaataggtttgttgtgtag

SEQ ID NO: 48309 - DNA, 898 bp, Artificial Sequence
  derived and/or modified sequence
gtgcgatcagatcgatctaagatggcgactgtcgaaccggaaaccacccctactcctaatcccccgactacagaagaggagaaaacggaatctaatcaggaggttgctaacccagaacactatattaaacatcccctacagaacagatgggcactctggttttttaaaaatgataaaagcaaaacttggcaagcaaacctgcggctgatctccaagtttgatactgttgaagacttttgggctctgtacaaccatatccagttgtctagtaatttaatgcctggctgtgactactcactttttaaggatggtattgagcctatgtgggaagatgagaaaaacaaacggggaggacgatggctaattacattgaacaaacagcagagacgaagtgacctcgatcgcttttggctagagacaagatgggatcttgctatgttgcccaggttggtctcaaacttctggcctcaagtgatcctcccacttcagcctcccaaagtgctggaattacagcttctgtgccttattggagaatcttttgatgactacagtgatgatgtatgtggcgctgttgttaatgttagagctaaaggtgataagatagcaatatggactactgaatgtgaaaacagagaagctgttacacatatagggagggtatacaaggaaaggttaggacttcctccaaagatagtgattggttatcagtcccacgcagacacagctactaagagcggctccaccactaaaaataggtttgttgtttaagaagacaccttctgagtattctcataggagactgcgtcaagcaatcgagatttgggagctgaaccaaagcctcttcaaaaagcagagtggactgcatttaaatttgatttccatcttaatgttactcaga

SEQ ID NO: 48310 - DNA, 747 bp, Artificial Sequence
  derived and/or modified sequence
atggccaccgtggagcctgagaccacccccacccccaacccccccaccacagaggaggagaagacagagagcaaccaggaggtggccaaccctgagcactacatcaagcaccccctgcagaaccgctgggccctgtggttcttcaagaatgacaagagcaagacctggcaggccaacctgcggctcatcagcaagtttgacacagtggaggacttctgggccctgtacaaccacatccagctgagcagcaacctgatgcctggctgtgactacagcctcttcaaggatggcatcgagcccatgtgggaggatgagaagaacaagaggggcggccgctggctgatcaccctgaacaagcagcagaggagaagtgacctggaccgcttctggctggagacccgctgggacctggccatgctgccccggctggtgagcaacttctggccccaggtgatcctgcccctgcagccccccaaggtgctggagctgcagctgctgtgcctgattggagagagctttgatgactacagtgatgatgtgtgtggggctgtggtgaatgtgcgggccaagggggacaagatcgccatctggaccacagaatgtgagaaccgggaggccgtgacccacatcggccgggtgtacaaggagcggctgggcctgccccccaagatcgtcatcggctaccagagccacgccgacacagccaccaagagcggcagcaccaccaagaacagatttgtggtgtag

SEQ ID NO: 48311 - DNA, 747 bp, Artificial Sequence
  derived and/or modified sequence
atggccaccgtggagcccgagaccacccccacccccaacccccccaccaccgaggaggagaaaaccgagtcgaaccaggaggtggcaaatccggagcattacataaagcatcccttacaaaacagatgggcactgtggttctttaagaatgataagagcaagacctggcaagctaacctgcggctcatctccaaatttgatactgtcgaagacttttgggcactgtacaatcatattcagctctcctcaaacttaatgcccgggtgtgactattccctgttcaaagacggcattgagccgatgtgggaagatgagaaaaataaacgtggcgggcggtggttgataacgctaaacaaacagcagcgaaggtctgacttggatcggttctggcttgaaacccggtgggatctcgccatgctgcctcgattagtgtctaacttttggccccaagtgattctaccattgcagcccccaaaggtgctggaattgcaattgctttgcctgatcggagaatcttttgacgactacagtgacgatgtgtgtggcgccgtcgtgaacgtacgggccaagggagacaagatagccatatggacgacagaatgtgaaaaccgggaggcagtgacccacatcgggcgcgtttacaaggaacggctgggccttcccccaaagatcgtgataggctaccagtcacacgccgatacagccacaaaaagtggttctactactaagaatcggttcgttgtctag

SEQ ID NO: 48312 - DNA, 747 bp, Artificial Sequence
  derived and/or modified sequence
atggccaccgtggaaccagagaccaccccgacacctaacccacctaccacagaggaggagaagacggaaagcaaccaagaggttgcgaatccggagcactacattaaacacccactccagaaccggtgggctttgtggttctttaagaatgacaaaagcaaaacttggcaagccaatcttaggctgatctctaagtttgataccgtcgaagacttctgggccctatataaccatattcaactgtctagtaacctgatgcctggctgcgactactctctgttcaaagatggaatcgaacccatgtgggaggacgagaagaataaacgcggaggccgttggctgatcacattaaataagcagcagcggaggagcgatctggataggttctggttggaaacacgctgggaccttgcaatgctacctaggctagttagcaatttctggccccaggttatactgccactccaacctccaaaggtgctggagctccagctgctgtgcctgattggagagtcctttgacgattattctgacgatgtgtgcggtgccgtggtgaacgtgcgggcaaaaggcgacaagatcgccatttggaccactgaatgtgagaacagagaagctgtgacacacatagggagggtgtacaaagagcgccttggcttgccacctaagatagtcattggttaccagagccatgcggacaccgcgacgaagagtgggtcaaccaccaagaatcgtttcgtggtttag

SEQ ID NO: 48313 - DNA, 1299 bp, Artificial Sequence
  derived and/or modified sequence
atgaagagcaccaagccaagcctgtccccgagcaagccccaaagctccctcgtgattccgacctcacttttctgcaagacttttccattccatttcatgtttgataaggacatgacaattttacaatttgggaacggaatcagacgattgatgaaccgacgggacttccaggggaagcctaattttgaggagtactttgagattctgacacccaagatcaatcagactttcagtggaatcatgacaatgctgaatatgcagttcgttgtacgagtgcggaggtgggataacagcgtgaagaagtcctctcgggtcatggacctgaaaggacagatgatttacattgtggagtcgagtgctatcctttttctcgggtccccctgcgtcgaccggctagaggacttcaccggccgaggcctctacctctcggatatacctatacacaacgctctgcgcgatgtggttctcatcggcgaacaggcccgagcccaggatggtctcaagaagaggcttggcaagcttaaggccacattggagcaggcccaccaggccctggaagaggagaaaaaaaagactgtcgacttactgtgttcaatattcccctgcgaagtggctcagcagttgtggcagggacaggtggtccaggccaagaaatttagcaacgttaccatgctcttctcagacattgtcgggtttacagcgatctgttcgcaatgttccccccttcaggttattacaatgctaaatgccttatacacacggttcgaccagcagtgtggggaacttgatgtgtataaagttgaaaccattggcgatgcgtactgcgtcgctgggggattgcataaagagtccgacacacacgctgtgcagatcgctctcatggctctgaaaatgatggaactgtcagacgaggtgatgtctccgcacggtgaacccatcaaaatgcgaattgggctgcactccggctcagtgttcgcgggcgtggtgggggtgaagatgccacggtactgtctgtttggcaataacgtgactttagcaaataaattcgagtcctgttctgttccaaggaagattaacgtcagccccaccacatatcgcctactgaaggactgccccgggttcgtgttcaccccgcgctccagagaagagctccctcccaatttcccttccgagatccctggtatctgccacttccttgacgcctaccagcaggggactaactcaaaaccttgctttcagaagaaagacgtcgaggacggaaatgccaactttctggggaaagctagtgggatagactag

SEQ ID NO: 48314 - DNA, 1299 bp, Artificial Sequence
  derived and/or modified sequence
atgaagagcaccaagcccagcctgagccccagcaagccccagagcagcctggtgatccccaccagcctcttctgcaagaccttccccttccacttcatgtttgacaaggacatgaccatcctgcagtttggaaatggcatccggcggctgatgaacagaagagacttccagggcaagcccaactttgaggagtactttgagatcctgacccccaagatcaaccagaccttcagcggcatcatgaccatgctgaacatgcagtttgtggtgcgggtgcggcgctgggacaacagcgtgaagaagagcagccgggtgatggacctgaagggccagatgatctacatcgtggagagcagcgccatcctcttcctgggcagcccctgtgtggaccggctggaggacttcaccggccggggcctgtacctgagtgacatccccatccacaatgccctgagagatgtggtgctgattggagagcaggcccgggcccaggacggcctgaagaagaggctgggcaagctgaaggccaccctggagcaggcccaccaggccctggaggaggagaagaagaagacagtggacctgctgtgcagcatcttcccctgtgaggtggcccagcagctgtggcagggccaggtggtgcaggccaagaagttcagcaatgtgaccatgctgttcagtgacatcgtgggcttcaccgccatctgcagccagtgcagccccctgcaggtgatcaccatgctgaatgccctgtacaccaggtttgaccagcagtgtggggagctggatgtgtacaaggtggagaccatcggagatgcctactgtgtggccggcggcctgcacaaggagagtgacacccatgctgtgcagatcgccctgatggccctgaagatgatggagctgagtgatgaggtgatgagcccccatggagagcccatcaagatgagaattggcctgcacagcggctctgtgtttgctggggtggtgggcgtgaagatgccccgctactgcctgtttggaaacaacgtgaccctggccaacaagtttgagagctgcagcgtgcccaggaagatcaacgtgagccccaccacctaccgcctgctgaaggactgccccggctttgtgttcacccccaggagccgggaggagctgccccccaacttccccagcgagatccctggcatctgccacttcctggatgcctaccagcagggcaccaacagcaagccctgcttccagaagaaggatgtggaggatggaaatgccaacttcctgggcaaggccagcggcattgattag

SEQ ID NO: 48315 - DNA, 1299 bp, Artificial Sequence
  derived and/or modified sequence
atgaagagcaccaagcccagcctgagccccagcaagccccagagctctctggttataccaaccagcctattttgcaaaacgtttcccttccacttcatgtttgataaggatatgaccattctgcagttcggcaacggaatccggagacttatgaacagacgggacttccagggtaagcctaactttgaggagtactttgagattctcacgccaaagattaatcagaccttcagcgggatcatgacaatgctcaacatgcaattcgtagtcagggtgagaagatgggataattcagtaaagaagagcagtagggtcatggacttgaagggccaaatgatctacatcgtggagagtagtgctatcctgtttctcggctctccatgtgtcgataggctggaagacttcacggggagaggcctatatctatctgatattcccatccacaacgccctcagagacgttgttctgataggtgagcaagcacgtgctcaggacggcctgaagaaacgtctgggaaagctgaaggccactctggagcaagcgcaccaggcgctggaggaggaaaaaaaaaaaactgttgatctcttatgcagcatctttccttgcgaagtggcacagcaactgtggcaggggcaggtcgtgcaggccaaaaaattcagcaacgtgacgatgctgttttcagatatcgtgggattcacagccatttgtagtcagtgtagccccttacaagtcataacgatgctgaatgccctgtatacccggttcgatcaacagtgcggagagcttgacgtttacaaagtggaaacaattggggatgcatactgtgtggcaggtggcttgcacaaagagtctgatacacacgccgtacagatcgcactcatggcgttgaaaatgatggaactcagcgacgaggtgatgtctcctcatggagaacctattaagatgcgcatcggtctgcacagcggaagcgtctttgcgggagttgtcggagtaaagatgcctaggtactgcctgttcggtaacaacgtgactcttgcaaataagtttgagtcttgttccgtgccccgtaaaatcaatgtcagcccaactacctatcgcctgcttaaggattgtcccgggtttgtgtttactccacggagcagggaagaacttcctccaaacttcccgtcggaaatccccggtatctgtcatttcctggatgcttaccagcagggcacaaattccaaaccctgcttccagaaaaaggacgtggaggacggcaatgctaactttctgggaaaagcttcggggatagactag

SEQ ID NO: 48316 - DNA, 1299 bp, Artificial Sequence
  derived and/or modified sequence
atgaagtcaacgaaaccttctctctcaccgagcaaaccccaaagtagtctggtcatccccacgagcctgttttgtaagacatttccctttcatttcatgttcgataaggacatgaccattctgcagtttggaaacgggataaggcggctcatgaacagaagggacttccaggggaagccgaattttgaggagtatttcgagatcttgacacccaaaatcaatcagaccttttcgggcatcatgaccatgctgaatatgcagtttgtggtcagagttaggcgatgggataattcagttaaaaagtcatctcgagtcatggatctgaaaggccagatgatctacattgtagaaagctctgctatactgtttctggggtctccatgtgtggaccggttagaagactttacgggaagggggctctatctgagcgatatccctattcacaatgcgctgcgggacgttgtgctgatcggcgaacaagcgagggcccaagacgggctgaagaaacgtctggggaagctgaaagcgacccttgaacaggctcaccaggctctggaagaggagaagaaaaaaacagtcgaccttttgtgtagtatttttccctgcgaagtggcccaacagctgtggcagggtcaggtggtacaggcaaagaagttcagcaatgtcacaatgctgttctccgacatagtggggttcacagctatttgttcccagtgctctccactgcaggtgataaccatgctgaatgcactttacactcggtttgatcagcaatgcggcgagctcgatgtatacaaggtggaaaccataggcgacgcctactgcgtggcagggggtctccataaagaaagcgacactcacgcggtgcaaattgccctgatggcacttaagatgatggagctgagcgacgaggtgatgagtcctcacggggaacctattaagatgcgaatcggactgcacagcggcagtgtgttcgctggagtcgtgggtgtgaaaatgcctcgatattgtctgtttggtaacaatgtcactctggcaaataagtttgagagctgctccgtgcccagaaagattaacgtgagtcccactacttacagactgctgaaggactgccccggtttcgtctttacaccacggagtagagaagagttacctccaaacttcccgagtgaaataccaggaatttgccactttttagacgcctatcagcaaggcaccaacagcaagccttgctttcagaaaaaggacgtggaagatggtaatgctaacttcctggggaaagcaagtggtatagactag

SEQ ID NO: 48317 - DNA, 1299 bp, Artificial Sequence
  derived and/or modified sequence
atgaagagcaccaagcccagcctgagccccagcaagccccagagcagcctggtgatccccaccagcctgttctgcaagaccttccccttccacttcatgttcgacaaggacatgaccatcctgcagttcggcaacggcatcagaagactgatgaacagaagagacttccagggcaagcccaacttcgaggagtacttcgagatcctgacccccaagatcaaccagaccttcagcggcatcatgaccatgctgaacatgcagttcgtggtgagagtgagaagatgggacaacagcgtgaagaagagcagcagagtgatggacctgaagggccagatgatctacatcgtggagagcagcgccatcctgttcctgggcagcccctgcgtggacagactggaggacttcaccggcagaggcctgtacctgagcgacatccccatccacaacgccctgagagacgtggtgctgatcggcgagcaggccagagcccaggacggcctgaagaagagactgggcaagctgaaggccaccctggagcaggcccaccaggccctggaggaggagaagaagaagaccgtggacctgctgtgcagcatcttcccctgcgaggtggcccagcagctgtggcagggccaggtggtgcaggccaagaagttcagcaacgtgaccatgctgttcagcgacatcgtgggcttcaccgccatctgcagccagtgcagccccctgcaggtgatcaccatgctgaacgccctgtacaccagattcgaccagcagtgcggcgagctggacgtgtacaaggtggagaccatcggcgacgcctactgcgtggccggcggcctgcacaaggagagcgacacccacgccgtgcagatcgccctgatggccctgaagatgatggagctgagcgacgaggtgatgagcccccacggcgagcccatcaagatgagaatcggcctgcacagcggcagcgtgttcgccggcgtggtgggcgtgaagatgcccagatactgcctgttcggcaacaacgtgaccctggccaacaagttcgagagctgcagcgtgcccagaaagatcaacgtgagccccaccacctacagactgctgaaggactgccccggcttcgtgttcacccccagaagcagagaggagctgccccccaacttccccagcgagatccccggcatctgccacttcctggacgcctaccagcagggcaccaacagcaagccctgcttccagaagaaggacgtggaggacggcaacgccaacttcctgggcaaggccagcggcatcgactag

SEQ ID NO: 48318 - protein, 624 aa, Artificial Sequence
  derived and/or modified sequence
MFCTKLKDLKITGECPFSLLAPGQVPNESSEEAAGSSESCKATVPICQDIPEKNIQESLPQRKTSRSRVYLHTLAESICKLIFPEFERLNVALQRTLAKHKIKESRKSLEREDFEKTIAEQAVAAGVPVEVIKESLGEEVFKICYEEDENILGVVGGTLKDFLNSFSTLLKQSSHCQEAGKRGRLEDASILCLDKEDDFLHVYYFFPKRTTSLILPGIIKAAAHVLYETEVEVSLMPPCFHNDCSEFVNQPYLLYSVHMKSTKPSLSPSKPQSSLVIPTSLFCKTFPFHFMFDKDMTILQFGNGIRRLMNRRDFQGKPNFEEYFEILTPKINQTFSGIMTMLNMQFVVRVRRWDNSVKKSSRVMDLKGQMIYIVESSAILFLGSPCVDRLEDFTGRGLYLSDIPIHNALRDVVLIGEQARAQDGLKKRLGKLKATLEQAHQALEEEKKKTVDLLCSIFPCEVAQQLWQGQVVQAKKFSNVTMLFSDIVGFTAICSQCSPLQVITMLNALYTRFDQQCGELDVYKVETIGDAYCVAGGLHKESDTHAVQIALMALKMMELSDEVMSPHGEPIKMRIGLHSGSVFAGVVGVKMPRYCLFGNNVTLANKFESCSVPRKINVSPTTYR

SEQ ID NO: 48319 - DNA, 1875 bp, Artificial Sequence
  derived and/or modified sequence
atgttttgcactaaacttaaagatttgaagatcaccggcgagtgcccattttccctcctggctccaggacaggtccctaatgagagctctgaggaagctgcaggtagctccgaaagctgcaaggcaacagttcctatttgccaggatatccccgaaaagaatatccaggagagtctcccgcaaagaaaaactagcagaagcagagtgtacttgcatacactcgcggagtcaatatgcaaattaattttccccgaatttgaacgacttaacgtagccttgcagcgcacactcgcgaagcataagattaaggagagccgaaagagcctggaaagggaggattttgaaaagacaatcgccgaacaagccgtagccgccggggtgcctgttgaagttattaaggagagcctgggggaagaggtcttcaagatctgttacgaggaggatgaaaatatattgggtgtggtgggtggtacactgaaagacttcctgaattccttttctactctactcaagcagtcatctcactgccaggaagccggaaaacgcgggaggctagaagacgcgagcatcctttgcctggataaggaggacgatttcctccatgtgtattatttctttccaaaaagaacaactagtcttatccttcccgggattatcaaagctgccgcacatgtgctgtacgagaccgaagtggaggttagtttgatgccgccatgttttcataatgactgcagcgaattcgtcaaccagccttacctcctgtacagcgtacatatgaagtcaaccaagccatccctaagcccatcaaaaccccagtcatccctcgtgatccccaccagcctgttttgtaaaaccttcccatttcactttatgtttgacaaggacatgacaatcctccagttcggcaatgggattcgtaggttaatgaaccgtcgagactttcagggcaaaccaaatttcgaggaatactttgaaatcctgacccccaaaataaaccagacatttagcgggattatgacgatgttgaacatgcagtttgttgttcgagttcggcggtgggataactctgttaaaaagagctctcgcgtaatggacctgaaaggccagatgatatatattgtcgagtcaagtgccattctgttccttggaagtccttgcgtagatcgtttagaagatttcacgggaagggggctctacttgtctgatattcctattcataacgcattaagggatgtggtcctgattggtgagcaggcgcgagcccaggatggactgaagaagagattgggtaagctcaaggccaccctggaacaagcgcaccaagcactggaggaggagaaaaaaaaaacagtcgacctattgtgctcaattttcccatgtgaagtggctcagcagctttggcagggtcaggttgtgcaggcaaagaagttttccaacgttactatgctgttctcagatatcgtggggttcacggcaatctgctcgcagtgtagccctttacaggtgatcacaatgctgaacgccctgtacacacggttcgatcaacagtgtggtgagctagacgtgtataaagtcgagactatcggagatgcttattgcgttgctggagggttacacaaggagagcgacacccatgcagtgcagatcgcgcttatggcacttaaaatgatggagctgtccgacgaggtaatgagtcctcacggtgagccaatcaagatgagaatcgggctgcacagcgggagtgtgttcgccggagttgtgggggtcaagatgccccggtattgcctgttcgggaataacgtgaccctagccaataaattcgagtcctgtagcgtgcccagaaagatcaacgtgtccccaacgacatatcggtag

SEQ ID NO: 48320 - DNA, 2552 bp, Artificial Sequence
  derived and/or modified sequence
acacttttcctgcgctagagcagcgagcagcctggaacagacccaggcggaggacacctgtgggggagggagcgcctggaggagcttagagaccccagccgggcgtgatctcaccatgtgcggatttgcgaggcgcgccctggagctgctagagatccggaagcacagccccgaggtgtgcgaagccaccaaacatcccagttaccagtgtccttgaattgatagtggcttctgtttgtcagtctcatataagaactacagctcatcaggaggagatcgcagcagggtaagagacaccaacaccatgttctgcacgaagctcaaggatctcaagatcacaggagagtgtcctttctccttactggcaccaggtcaagttcctaacgagtcttcagaggaggcagcaggaagctcagagagctgcaaagcaaccgtgcccatctgtcaagacattcctgagaagaacatacaagaaagtcttcctcaaagaaaaaccagtcggagccgagtctatcttcacactttggcagagagtatttgcaaactgattttcccagagtttgaacggctgaatgttgcacttcagagaacattggcaaagcacaaaataaaagaaagcaggaaatctttggaaagagaagactttgaaaaaacaattgcagagcaagcagttgcagcaggagttccagtggaggttatcaaagaatctcttggtgaagaggtttttaaaatatgttacgaggaagatgaaaacatccttggggtggttggaggcacccttaaagattttttaaacagcttcagtacccttctgaaacagagcagccattgccaagaagcaggaaaaaggggcaggcttgaggacgcctccattctatgcctggataaggaggatgattttctacatgtttactacttcttccctaagagaaccacctccctgattcttcccggcatcataaaggcagctgctcacgtattatatgaaacggaagtggaagtgtcgttaatgcctccctgcttccataatgattgcagcgagtttgtgaatcagccctacttgttgtactccgttcacatgaaaagcaccaagccatccctgtcccccagcaaaccccagtcctcgctggtgattcccacatcgctattctgcaagacatttccattccatttcatgtttgacaaagatatgacaattctgcaatttggcaatggcatcagaaggctgatgaacaggagagactttcaaggaaagcctaattttgaagaatactttgaaattctgactccaaaaatcaaccagacgtttagcgggatcatgactatgttgaatatgcagtttgttgtacgagtgaggagatgggacaactctgtgaaaaaatcttcaagggttatggacctcaaaggccaaatgatctacattgttgaatccagtgcaatcttgtttttggggtcaccctgtgtggacagattagaagattttacaggacgagggctctacctctcagacatcccaattcacaatgcactgagggatgtggtcttaataggggaacaagcccgagctcaagatggcctgaagaagaggctggggaagctgaaggctacccttgagcaagcccaccaagccctggaggaggagaagaaaaagacagtagaccttctgtgctccatatttccctgtgaggttgctcagcagctgtggcaagggcaagttgtgcaagccaagaagttcagtaatgtcaccatgctcttctcagacatcgttgggttcactgccatctgctcccagtgctcaccgctgcaggtcatcaccatgctcaatgcactgtacactcgcttcgaccagcagtgtggagagctggatgtctacaaggtggagaccattggcgatgcctattgtgtagctgggggattacacaaagagagtgatactcatgctgttcagatagcgctgatggccctgaagatgatggagctctctgatgaagttatgtctccccatggagaacctatcaagatgcgaattggactgcactctggatcagtttttgctggcgtcgttggagttaaaatgccccgttactgtctttttggaaacaatgtcactctggctaacaaatttgagtcctgcagtgtaccacgaaaaatcaatgtcagcccaacaacttacaggtagtaattatgttaaacacctaaaatctcttgtttttatttatatacaattgccatttgccccactgatttgattcattcttcataacttttttcttccttagtcgtaaggaaaaaagaaacgtgataacttttatcatcctcactttaacttttttacactgcttattagcctcctaagaatgacttgcctgaggtgtttgtggcccagccataaatccatgacagatattacatagtcttccatcattcttcttttagaagcacatattaatactcttagtatgttgataggtgttctgacatcaactagtacactgcagtgcagttctggcagtaaacacccagactcagcacagtcataaccacaagttaca

SEQ ID NO: 48321 - DNA, 1875 bp, Artificial Sequence
  derived and/or modified sequence
atgttctgcaccaagctgaaggacctgaagatcaccggggagtgccccttcagcctgctggcccctggccaggtgcccaatgaaagcagcgaggaggccgccggcagcagcgagagctgcaaggccaccgtgcccatctgccaggacatccctgagaagaacatccaggagagcctgccccagaggaagaccagccgcagccgggtgtacctgcacaccctggccgagagcatctgcaagctgatcttccctgagtttgagcggctgaatgtggccctgcagaggaccctggccaagcacaagatcaaggagagcaggaagagcctggagcgggaggactttgagaagaccatcgccgagcaggccgtggccgccggcgtgcctgtggaggtgatcaaggagagcctgggggaggaggtgttcaagatctgctatgaagaagatgagaacatcctgggcgtggtgggcggcaccctgaaggacttcctgaacagcttcagcaccctgctgaagcagagcagccactgccaggaggccggcaagaggggccgcctggaggatgccagcatcctgtgcctggacaaggaggatgacttcctgcacgtgtactacttcttccccaagaggaccaccagcctcatcctgcccggcatcatcaaggccgccgcccacgtgctgtatgaaacagaggtggaggtgtccctgatgccaccctgcttccacaatgactgcagcgagtttgtgaaccagccctacctgctgtacagcgtgcacatgaagagcaccaagcccagcctgagccccagcaagccccagagcagcctggtgatccccaccagcctcttctgcaagaccttccccttccacttcatgtttgacaaggacatgaccatcctgcagtttggaaatggcatccggcggctgatgaacagaagagacttccagggcaagcccaactttgaggagtactttgagatcctgacccccaagatcaaccagaccttcagcggcatcatgaccatgctgaacatgcagtttgtggtgcgggtgcggcgctgggacaacagcgtgaagaagagcagccgggtgatggacctgaagggccagatgatctacatcgtggagagcagcgccatcctcttcctgggcagcccctgtgtggaccggctggaggacttcaccggccggggcctgtacctgagtgacatccccatccacaatgccctgagagatgtggtgctgattggagagcaggcccgggcccaggacggcctgaagaagaggctgggcaagctgaaggccaccctggagcaggcccaccaggccctggaggaggagaagaagaagacagtggacctgctgtgcagcatcttcccctgtgaggtggcccagcagctgtggcagggccaggtggtgcaggccaagaagttcagcaatgtgaccatgctgttcagtgacatcgtgggcttcaccgccatctgcagccagtgcagccccctgcaggtgatcaccatgctgaatgccctgtacaccaggtttgaccagcagtgtggggagctggatgtgtacaaggtggagaccatcggagatgcctactgtgtggccggcggcctgcacaaggagagtgacacccatgctgtgcagatcgccctgatggccctgaagatgatggagctgagtgatgaggtgatgagcccccatggagagcccatcaagatgagaattggcctgcacagcggctctgtgtttgctggggtggtgggcgtgaagatgccccgctactgcctgtttggaaacaacgtgaccctggccaacaagtttgagagctgcagcgtgcccaggaagatcaacgtgagccccaccacctacagatag

SEQ ID NO: 48322 - DNA, 1875 bp, Artificial Sequence
  derived and/or modified sequence
atgttctgcaccaagctgaaggacctgaagatcaccggcgagtgccctttttcgcttttggcccccgggcaggtccccaatgaatcatcagaggaagctgccggcagctccgagtcttgtaaagcaacagtacctatttgtcaggacatacccgaaaaaaacatccaggagtctctccctcagagaaaaacatcccgtagcagagtctatcttcacacccttgccgagtcaatttgcaagctgatctttcctgaatttgagagactgaacgttgctctccagaggaccctggccaagcacaaaatcaaggaaagtaggaaatccctggaacgtgaggattttgaaaaaactattgccgaacaagctgttgcggctggggtaccagtagaagtgatcaaagagagcctgggagaggaggtcttcaagatctgctatgaggaggatgaaaacatcctcggggtggtcgggggaacactaaaggacttcctgaactccttctcaactctcctgaaacagtctagccactgccaggaggccggtaaaaggggtcggcttgaagatgccagcatattatgcctcgataaggaagatgattttctccacgtctattacttcttcccaaaacggaccacctcgctgatcctgcctggaatcatcaaggcggctgcacacgtgctgtatgagacagaagtagaagtttccctgatgcctccttgctttcataacgattgctccgaattcgtgaaccagccgtacttactgtacagcgtgcatatgaaaagcaccaaacccagcttgagccctagcaaacctcagtcctctctcgttattcccacttcgctgttctgcaagacgtttccattccacttcatgtttgacaaagacatgaccattctccagttcgggaacggtataaggcgcctcatgaacaggcgcgatttccagggaaagccaaactttgaggaatacttcgagatcctcacccctaaaattaatcaaacattttccgggatcatgactatgctgaatatgcagttcgtcgtaagagtgagacgatgggataacagcgtgaagaaaagctcacgagtcatggacctgaagggacaaatgatatatattgtagaatctagcgctattttatttctcgggagcccttgtgtcgacagacttgaggatttcaccgggcgaggtttatacctatctgacattcctatccacaacgcgctgcgggacgttgtgcttattggcgaacaggcacgagcccaagacggcctaaaaaagcgcctgggaaagctgaaagcaaccctggagcaggcccatcaggcattagaagaagaaaagaagaaaacagttgatctgctgtgttccatctttccttgtgaggtggcccagcaactgtggcagggtcaggttgttcaggcgaagaaattttcaaatgtgaccatgttgttttctgatattgttggcttcaccgctatctgctctcagtgcagcccactgcaagtgatcaccatgctgaacgcattgtacacccgcttcgatcaacagtgcggcgaattggacgtatataaggtggaaaccatcggtgacgcctactgtgttgctggcggactgcataaagagtcagacacacatgccgtgcagattgccttaatggcactgaaaatgatggagctttctgacgaggtcatgtcaccgcacggggaacctatcaagatgcggattggcttgcacagcggttctgtgttcgctggcgttgtgggggttaagatgccccgctactgtctttttggcaataacgtcaccctggccaataaatttgagtcctgtagtgttccccgcaaaatcaacgtgtcacctacgacttatcgctag

SEQ ID NO: 48323 - DNA, 1875 bp, Artificial Sequence
  derived and/or modified sequence
atgttctgcactaaactgaaagacctaaagatcacaggagagtgtccatttagcctactggccccaggccaggtgccaaatgaatcctctgaagaggccgctgggtcttctgaaagctgcaaggcaactgttccaatatgtcaagatatccccgaaaagaatattcaagagtccttgcctcagaggaagacatctaggagccgcgtgtacttacacacactggctgagtccatttgtaaactcatttttccagaattcgagcgcctgaatgtggcactgcagaggactcttgccaaacacaagattaaggagtcccgcaagtcattggaacgcgaggactttgagaagacaatcgccgaacaggcagtggccgctggcgtcccagtcgaagtcattaaggagagcctcggcgaagaggtgttcaagatctgttacgaagaagatgaaaatatacttggagtggtcgggggaactctcaaagatttcctcaatagtttcagtaccctgctgaagcagtcatcccactgtcaggaggcgggaaaaaggggcaggcttgaggacgcaagcatactatgcttagataaggaagatgacttcttacatgtatactacttcttccccaaaaggaccacgtctctcattctccctgggataattaaggccgcagcacatgtgctgtacgaaactgaagtagaggtgagtctgatgccaccctgtttccacaatgactgctctgaatttgtaaatcagccctacctgttgtattctgtgcacatgaaatccactaagccatcgttatcccctagcaagcctcaatcttctttagtcatccccacttctctcttttgcaaaacctttccctttcacttcatgtttgacaaagatatgacaatactgcagttcggaaacgggatccgacgactgatgaatcgcagagatttccagggcaaacccaactttgaggaatactttgagattcttactcctaaaattaatcagacctttagcgggatcatgactatgctgaacatgcagtttgtggttcgcgtgcggaggtgggataactccgtcaagaaaagctcccgggtgatggatcttaagggacagatgatttacatcgttgaaagttcagctatcttgttcttgggaagtccgtgcgtggaccgtctcgaggactttactggtcgcggtctgtacctgtctgacattccaatccacaatgcattgcgggatgtagtgctcatcggtgaacaagccagggcccaggacggcctgaagaaaagactaggaaagttaaaagccaccctggagcaggcccaccaggctctcgaagaggaaaagaaaaaaaccgttgatttgctgtgttccatcttcccctgcgaggtcgcccaacaattatggcaggggcaagtggtgcaggccaagaaattttccaatgtaacaatgctattctccgacatagtgggctttaccgctatctgcagccaatgtagccctctgcaagtgatcacaatgcttaatgcattatacacaaggtttgaccagcagtgcggggagctcgatgtatacaaagtagagactatcggtgacgcatattgtgttgctgggggactacataaggagtccgacacgcatgccgtccagatcgcattgatggcattgaagatgatggaattgagtgacgaagttatgtctcctcatggtgagcccatcaaaatgaggatcggtttgcacagcggctctgtgtttgccggagtggttggcgtgaagatgcccagatattgcctgttcggaaataacgtcactctggcaaataagttcgaaagctgcagcgtcccacggaaaataaatgtttctcctactacatatcgctag

SEQ ID NO: 48324 - DNA, 1875 bp, Artificial Sequence
  derived and/or modified sequence
atgttctgcaccaagctgaaggacctgaagatcaccggcgagtgccccttcagcctgctggcccccggccaggtgcccaacgagagcagcgaggaggccgccggcagcagcgagagctgcaaggccaccgtgcccatctgccaggacatccccgagaagaacatccaggagagcctgccccagagaaagaccagcagaagcagagtgtacctgcacaccctggccgagagcatctgcaagctgatcttccccgagttcgagagactgaacgtggccctgcagagaaccctggccaagcacaagatcaaggagagcagaaagagcctggagagagaggacttcgagaagaccatcgccgagcaggccgtggccgccggcgtgcccgtggaggtgatcaaggagagcctgggcgaggaggtgttcaagatctgctacgaggaggacgagaacatcctgggcgtggtgggcggcaccctgaaggacttcctgaacagcttcagcaccctgctgaagcagagcagccactgccaggaggccggcaagagaggcagactggaggacgccagcatcctgtgcctggacaaggaggacgacttcctgcacgtgtactacttcttccccaagagaaccaccagcctgatcctgcccggcatcatcaaggccgccgcccacgtgctgtacgagaccgaggtggaggtgagcctgatgcccccctgcttccacaacgactgcagcgagttcgtgaaccagccctacctgctgtacagcgtgcacatgaagagcaccaagcccagcctgagccccagcaagccccagagcagcctggtgatccccaccagcctgttctgcaagaccttccccttccacttcatgttcgacaaggacatgaccatcctgcagttcggcaacggcatcagaagactgatgaacagaagagacttccagggcaagcccaacttcgaggagtacttcgagatcctgacccccaagatcaaccagaccttcagcggcatcatgaccatgctgaacatgcagttcgtggtgagagtgagaagatgggacaacagcgtgaagaagagcagcagagtgatggacctgaagggccagatgatctacatcgtggagagcagcgccatcctgttcctgggcagcccctgcgtggacagactggaggacttcaccggcagaggcctgtacctgagcgacatccccatccacaacgccctgagagacgtggtgctgatcggcgagcaggccagagcccaggacggcctgaagaagagactgggcaagctgaaggccaccctggagcaggcccaccaggccctggaggaggagaagaagaagaccgtggacctgctgtgcagcatcttcccctgcgaggtggcccagcagctgtggcagggccaggtggtgcaggccaagaagttcagcaacgtgaccatgctgttcagcgacatcgtgggcttcaccgccatctgcagccagtgcagccccctgcaggtgatcaccatgctgaacgccctgtacaccagattcgaccagcagtgcggcgagctggacgtgtacaaggtggagaccatcggcgacgcctactgcgtggccggcggcctgcacaaggagagcgacacccacgccgtgcagatcgccctgatggccctgaagatgatggagctgagcgacgaggtgatgagcccccacggcgagcccatcaagatgagaatcggcctgcacagcggcagcgtgttcgccggcgtggtgggcgtgaagatgcccagatactgcctgttcggcaacaacgtgaccctggccaacaagttcgagagctgcagcgtgcccagaaagatcaacgtgagccccaccacctacagatag

SEQ ID NO: 48325 - protein, 209 aa, Artificial Sequence
  derived and/or modified sequence
MGKGDPNKPRGKMSSYAFFVQTCREEHKKKHPDSSVNFAEFSKKCSERWKTMSAKEKSKFEDMAKSDKARYDREMKNYVPPKGDKKGKKKDPNAPKRPPSAFFLFCSEHRPKIKSEHPGLSIGDTAKKLGEMWSEQSAKDKQPYEQKAAKLKEKYEKDIAAYRAKGKSEAGKKGPGRPTGSKKKNEPEDEEEEEEEEDEDEEEEDEDEE

SEQ ID NO: 48326 - DNA, 1527 bp, Artificial Sequence
  derived and/or modified sequence
ggggatgtggcccgtggcctagctcgtcaagttgccgtggcgcggagaactctgcaaaacaagaggctgaggattgcgttagagataaaccagttcacgccggagccccgtgagggaagcgtctccgttgggtccggccgctctgcgggactctgaggaaaagctcgcaccaggtggacgcggatctgtcaacatgggtaaaggagaccccaacaagccgcggggcaaaatgtcctcgtacgccttcttcgtgcagacctgccgggaagagcacaagaagaaacacccggactcttccgtcaatttcgcggaattctccaagaagtgttcggagagatggaagaccatgtctgcaaaggagaagtcgaagtttgaagatatggcaaaaagtgacaaagctcgctatgacagggagatgaaaaattacgttcctcccaaaggtgataagaaggggaagaaaaaggaccccaatgctcctaaaaggccaccatctgccttcttcctgttttgctctgaacatcgcccaaagatcaaaagtgaacaccctggcctatccattggggatactgcaaagaaattgggtgaaatgtggtctgagcagtcagccaaagataaacaaccatatgaacagaaagcagctaagctaaaggagaaatatgaaaaggatattgctgcatatcgtgccaagggcaaaagtgaagcaggaaagaagggccctggcaggccaacaggctcaaagaagaagaacgaaccagaagatgaggaggaggaggaggaagaagaagatgaagatgaggaggaagaggatgaagatgaagaataaatggctatcctttaatgatgcgtgtggaatgtgtgtgtgtgctcaggcaattattttgctaagaatgtgaattcaagtgcagctcaatactagcttcagtataaaaactgtacagatttttgtatagctgataagattctctgtagagaaaatacttttaaaaaatgcaggttgtagctttttgatgggctactcatacagttagattttacagcttctgatgttgaatgttcctaaatatttaatggtttttttaatttcttgtgtatggtagcacagcaaacttgtaggaattagtatcaatagtaaattttgggttttttaggatgttgcatttcgtttttttaaaaaaaattttgtaataaaattatgtatattatttctattgtctttgtcttaatatgctaagttaattttcactttaaaaaagccatttgaagaccagagctatgttgatttttttcggtatttctgcctagtagttcttagacacagttgacctagtaaaatgtttgagaattaaaaccaaacatgctcatatttgcaaaatgttctttaaaagttacatgttgaactcagtgaactttataagaatttatgcagttttacagaacgttaagttttgtacttgacgtttctgtttattagctaaattgttcctcaggtgtgtgtatatatatatacatatatatatatatatatat

SEQ ID NO: 48327 - DNA, 630 bp, Artificial Sequence
  derived and/or modified sequence
atgggaaagggagatcccaataaaccacgaggcaaaatgagcagttatgccttttttgtgcagacgtgtagggaagagcacaaaaagaagcatcccgattcaagcgtgaacttcgcagaattttccaaaaaatgcagcgaacgttggaagactatgtctgccaaggagaagtcaaaattcgaggacatggccaagtcggacaaagcgcggtatgaccgagagatgaaaaattatgtcccgccaaaaggcgacaagaaaggaaagaagaaggatcctaacgcgccaaagcgcccaccaagcgccttcttcctgttttgtagcgaacaccggccgaagatcaaaagtgaacatcctggactatccatcggggatacggcaaagaaattgggggagatgtggtctgaacaatccgccaaagacaagcaaccctacgaacagaaagccgcaaagcttaaagaaaaatatgagaaggatattgccgcatacagagccaagggaaagtccgaagcaggtaaaaaggggccgggaagacctaccggttcaaagaaaaagaacgagcccgaagacgaagaggaagaagaagaggaggaagatgaagatgaggaggaggaagatgaggatgaggaatag

SEQ ID NO: 48328 - DNA, 630 bp, Artificial Sequence
  derived and/or modified sequence
atggggaagggcgaccccaacaagcctcgtgggaagatgtcctcgtatgcgttttttgtgcagacctgtagagaggaacacaagaaaaaacacccagattcatcagtgaattttgcggagttttccaaaaagtgctcggagaggtggaagactatgagtgccaaggagaaaagcaagtttgaggatatggcaaagagcgataaggcaagatatgatagggaaatgaaaaattatgtgcccccaaagggtgacaaaaagggtaagaagaaggacccaaatgcacctaaacggccaccctctgccttcttcctgttttgcagcgagcaccgtccgaagattaagtccgaacaccccgggttgtctattggtgacactgccaagaaactgggggaaatgtggtccgagcaaagcgcaaaggataaacagccctatgagcaaaaggctgccaagctgaaggagaagtatgagaaggatattgcggcctaccgagccaaggggaagtccgaagccggaaagaaaggtcctgggagacccaccggctccaagaaaaaaaatgagccggaggacgaggaagaagaagaggaggaagaggatgaagacgaggaagaggaagacgaggacgaggaatag

SEQ ID NO: 48329 - DNA, 630 bp, Artificial Sequence
  derived and/or modified sequence
atggggaaaggggatcccaacaagcctcgcggtaagatgtcttcttacgctttcttcgtgcagacatgccgggaagagcacaagaaaaaacaccctgactcctctgtcaatttcgcggagttcagtaagaagtgtagcgaacggtggaagactatgtcggcgaaagaaaagtccaagtttgaagacatggcaaagtctgataaggccagatacgacagggaaatgaagaattacgtgccacccaaaggagataagaaaggtaagaaaaaagaccccaatgcccctaagaggcccccctccgctttttttctgttctgtagcgaacataggccaaagattaaatccgagcatcctggcctcagcattggggacacggctaagaagctaggcgaaatgtggtctgagcagtcagccaaggataagcagccttacgaacagaaggctgccaagctgaaggagaagtacgagaaggacattgccgcctacagagctaagggaaaaagcgaggccggcaaaaaagggcccggcaggcccacgggttcaaagaagaaaaacgaacctgaagacgaggaagaggaagaggaggaggaagatgaggatgaagaggaagaggacgaggacgaggaatag

SEQ ID NO: 48330 - DNA, 405 bp, Artificial Sequence
  derived and/or modified sequence
atggggaagggggatcctaataaaccgagggggaaaatgagctcctacgctttcttcgttcagacctgccgcgaagagcacaaaaagaagcaccccgatagcagtgtgaacttcgcagagttctcaaagaagtgctctgagcgctggaagacaatgtcggccaaggagaaatccaaattcgaggacatggccaagagcgacaaggcaagatatgaccgagagatgaagaactacgtaccacctaaaggtgataaaaaagggaaaaaaaaggacccaaacgcgcctaaacgccccccatctgccttttttctgttctgcagcgaacataggcccaagataaagtcggaacaccccgggttgagtataggggatactgccaagaaactgggagaaatgtggtcatag

SEQ ID NO: 48331 - DNA, 1889 bp, Artificial Sequence
  derived and/or modified sequence
cgggacgcgggaacggttccctcccggccccccgcgccctttccgaggttccctgccttgacttccccgagttctacgacaacctcagcgacagcgggaggagctgggcaatcggttttgcagggcaaactccaggctctcctcatttattattctctgggcggcgcacgggagaccctgcagggcaacagagcagagcgactacagctcccaggagccaacgctgcagggctgagccgacgcgggggacagacaggacctaaatggtggtcggaggaagggcaaggcagacctcttctgttaccttagcgccagcaaaccgagccgccgccgtcgccaagccaggagaccaacccccagtctcccgactaagtatttttaaatctggcggggctttccttcccgagccaaccactcccaccgtttacagccccaaccagtcagcgtgaggcccgccatttttcaaaccctcttcccgccgccaatcaggatcgagcagtacattcctctcctgaccggttctaacgggtctgggagttaacgacctgggcgacccaccgaacctgctaggctggggcgtggagggcgggtctggtaagacactgaccaatcgttagcctccgtggcaagggggcggggactatctgggtttgaataatcgtcagaaccaatcagattagtggggatgtggcccgtggcctagctcgtcaagttgccgtggcgcggagaactctgcaaaacaagaggctgaggattgcgttagagataaaccagttcacgccggagccccgtgagggaagcgtctccgttgggtccggccgctctgcgggactctgaggaaaagctcgcaccaggtggacgcggatctgtcaacatgggtaaaggagaccccaacaagccgcggggcaaaatgtcctcgtacgccttcttcgtgcagacctgccgggaagagcacaagaagaaacacccggactcttccgtcaatttcgcggaattctccaagaagtgttcggagagatggaagaccatgtctgcaaaggagaagtcgaagtttgaagatatggcaaaaagtgacaaagctcgctatgacagggagatgaaaaattacgttcctcccaaaggtgataagaaggggaagaaaaaggaccccaatgctcctaaaaggccaccatctgccttcttcctgttttgctctgaacatcgcccaaagatcaaaagtgaacaccctggcctatccattggggatactgcaaagaaattgggtgaaatgtggtctgagcagtcagccaaagataaacaaccatatgaacagaaagcagctaagctaaaggagaaatatgaaaaggatattgctgcatatcgtgccaagggcaaaagtgaagcaggaaagaagggccctggcaggccaacaggctcaaagaagaagaacgaaccagaagatgaggaggaggaggaggaagaagaagatgaagatgaggaggaagaggatgaagatgaagaataaatggctatcctttaatgatgcgtgtggaatgtgtgtgtgtgctcaggcaattattttgctaagaatgtgaattcaagtgcagctcaatactagcttcagtataaaaactgtacagatttttgtatagctgataagattctctgtagagaaaatacttttaaaaaatgcaggttgtagctttttgatgggctactcatacagttagattttacagcttctgatgttgaatgttcctaaatatttaatggtttttttaatttcttgtgtatggtagcacagcaaacttgtaggaattagtatcaatagtaaattttgggttttttaggatgttgcatttcgtttttttaaaaaaaattttgtaataaaattatgtatattatttcta

SEQ ID NO: 48332 - DNA, 1032 bp, Artificial Sequence
  derived and/or modified sequence
caggtggacgcggatctgtcaacatgggtaaaggagaccccaacaagccgcggggcaaaatgtcctcgtacgccttcttcgtgcagacctgccgggaagagcacaagaagaaacacccggactcttccgtcaatttcgcggaattctccaagaagtgttcggagagatggaagaccatgtctgcaaaggagaagtcgaagtttgaagatatggcaaaaagtgacaaagctcgctatgacagggagatgaaaaattacgttcctcccaaaggtgataagaaggggaagaaaaaggaccccaatgctcctaaaaggccaccatctgccttcttcctgttttgctctgaacatcgcccaaagatcaaaagtgaacaccctggcctatccattggggatactgcaaagaaattgggtgaaatgtggtctgagcagtcagccaaagataaacaaccatatgaacagaaagcagctaagctaaaggagaaatatgaaaaggatattgctgcatatcgtgccaagggcaaaagtgaagcaggaaagaagggccctggcaggccaacaggctcaaagaagaagaacgaaccagaagatgaggaggaggaggaggaagaagaagatgaagatgaggaggaagaggatgaagatgaagaataaatggctatcctttaatgatgcgtgtggaatgtgtgtgtgtgctcaggcaattattttgctaagaatgtgaattcaagtgcagctcaatactagcttcagtataaaaactgtacagatttttgtatagctgataagattctctgtagagaaaatacttttaaaaaatgcaggttgtagctttttgatgggctactcatacagttagattttacagcttctgatgttgaatgttcctaaatatttaatggtttttttaatttcttgtgtatggtagcacagcaaacttgtaggaattagtatcaatagtaaattttgggttttttaggatgttgcatttcgtttttttaaaaaaaattttgtaataaaattatgtatatta

SEQ ID NO: 48333 - DNA, 1175 bp, Artificial Sequence
  derived and/or modified sequence
gcaaaacaagaggctgaggattgcgttagagataaaccagttcacgccggagccccgtgagggaagcgtctccgttgggtccggccgctctgcgggactctgaggaaaagctcgcaccaggcaagaataccctccaataccctcgggtggacgcggatctgtcaacatgggtaaaggagaccccaacaagccgcggggcaaaatgtcctcgtacgccttcttcgtgcagacctgccgggaagagcacaagaagaaacacccggactcttccgtcaatttcgcggaattctccaagaagtgttcggagagatggaagaccatgtctgcaaaggagaagtcgaagtttgaagatatggcaaaaagtgacaaagctcgctatgacagggagatgaaaaattacgttcctcccaaaggtgataagaaggggaagaaaaaggaccccaatgctcctaaaaggccaccatctgccttcttcctgttttgctctgaacatcgcccaaagatcaaaagtgaacaccctggcctatccattggggatactgcaaagaaattgggtgaaatgtggtctgagcagtcagccaaagataaacaaccatatgaacagaaagcagctaagctaaaggagaaatatgaaaaggatattgctgcatatcgtgccaagggcaaaagtgaagcaggaaagaagggccctggcaggccaacaggctcaaagaagaagaacgaaccagaagatgaggaggaggaggaggaagaagaagatgaagatgaggaggaagaggatgaagatgaagaataaatggctatcctttaatgatgcgtgtggaatgtgtgtgtgtgctcaggcaattattttgctaagaatgtgaattcaagtgcagctcaatactagcttcagtataaaaactgtacagatttttgtatagctgataagattctctgtagagaaaatacttttaaaaaatgcaggttgtagctttttgatgggctactcatacagttagattttacagcttctgatgttgaatgttcctaaatatttaatggtttttttaatttcttgtgtatggtagcacagcaaacttgtaggaattagtatcaatagtaaattttgggttttttaggatgttgcatttcgtttttttaaaaaaaattttgtaataaaattatgtatatta

SEQ ID NO: 48334 - DNA, 629 bp, Artificial Sequence
  derived and/or modified sequence
tcgggttcgtggacctgcctttccccattccctcagagcctctactcggtctcggcgcagtggctctcggggtctgacccggcgagcggcatttggggtgcgggccggcgagggctgggtctgtggagggccggcgggcagtcggaggaggcggaaactgcccctgaccgggcccggttctgggagttttcaatgtcggtcacgaggtggacgcggatctgtcaacatgggtaaaggagaccccaacaagccgcggggcaaaatgtcctcgtacgccttcttcgtgcagacctgccgggaagagcacaagaagaaacacccggactcttccgtcaatttcgcggaattctccaagaagtgttcggagagatggaagaccatgtctgcaaaggagaagtcgaagtttgaagatatggcaaaaagtgacaaagctcgctatgacagggagatgaaaaattacgttcctcccaaaggtgataagaaggggaagaaaaaggaccccaatgctcctaaaaggccaccatctgccttcttcctgttttgctctgaacatcgcccaaagatcaaaagtgaacaccctggcctatccattggggatactgcaaagaaattgggtgaaatgtggtctg

SEQ ID NO: 48335 - DNA, 630 bp, Artificial Sequence
  derived and/or modified sequence
atgggcaaaggagaccccaacaagccccggggcaagatgagcagctatgccttctttgtgcagacctgccgggaggagcacaagaagaagcacccagacagctctgtgaactttgctgagttcagcaagaagtgcagcgagcgctggaagaccatgtctgccaaggagaagagcaagtttgaggacatggccaagagtgacaaggcccgctatgaccgggagatgaagaactacgtgccccccaagggggacaagaagggcaagaagaaggaccccaatgcccccaagaggcctcccagcgccttcttcctgttctgcagcgagcaccggcccaagatcaagtctgagcaccctggcctgagcatcggggacacagccaagaagctgggggagatgtggagcgagcagagcgccaaggacaagcagccctatgagcagaaggccgccaagctgaaggagaagtatgagaaggacattgctgcctaccgggccaagggcaagtctgaggccggcaagaagggccctggccggcccaccggcagcaagaagaagaatgaaccagaagatgaggaggaggaggaggaggaggaggatgaagatgaggaggaggaggatgaagatgaggagtag

SEQ ID NO: 48336 - DNA, 405 bp, Artificial Sequence
  derived and/or modified sequence
atgggcaaaggagaccccaacaagccccggggcaagatgagcagctatgccttctttgtgcagacctgccgggaggagcacaagaagaagcacccagacagctctgtgaactttgctgagttcagcaagaagtgcagcgagcgctggaagaccatgtctgccaaggagaagagcaagtttgaggacatggccaagagtgacaaggcccgctatgaccgggagatgaagaactacgtgccccccaagggggacaagaagggcaagaagaaggaccccaatgcccccaagaggcctcccagcgccttcttcctgttctgcagcgagcaccggcccaagatcaagtctgagcaccctggcctgagcatcggggacacagccaagaagctgggggagatgtggagctag

SEQ ID NO: 48337 - DNA, 630 bp, Artificial Sequence
  derived and/or modified sequence
atgggcaagggcgaccccaacaagccccggggcaagatgagcagctacgcattttttgtccagacctgtagagaagaacacaaaaagaagcaccccgacagtagcgtaaattttgcggaatttagcaaaaagtgttcggaacgatggaaaaccatgtcggccaaagaaaagtctaagttcgaagatatggccaaatccgacaaagcccgttatgatagggaaatgaagaactatgtacctcctaaaggagataaaaagggcaagaagaaagatcctaacgcccctaaacggccacctagcgcgttcttcctgttctgttcagaacaccgtccgaagatcaaaagtgaacatcctgggctttctatcggagatactgccaaaaagttgggggagatgtggtcagaacagtcagcaaaagataagcaaccatacgaacagaaagcggccaaactcaaagagaagtacgagaaagatatcgcggcctatagagcaaagggtaagagtgaagctggcaagaaaggccccggccggcccactgggtctaagaaaaaaaacgaacctgaggacgaggaggaagaggaagaagaagaggatgaagacgaggaggaggaagacgaggacgaggagtag

SEQ ID NO: 48338 - DNA, 630 bp, Artificial Sequence
  derived and/or modified sequence
atgggcaagggcgaccccaacaagccccggggcaagatgagcagctacgcattttttgtacaaacttgccgtgaggagcacaaaaaaaagcatccagactcatcagtgaactttgcggagttctctaagaaatgttctgagcggtggaagaccatgagcgcaaaggagaaatccaaattcgaagacatggctaaatcagataaggcaaggtatgatcgtgaaatgaagaattacgtgccccctaagggcgacaaaaagggaaagaaaaaagatccaaacgcacccaaacgccctccatccgcatttttcctgttttgtagcgaacatcgccccaaaatcaaatcagaacaccctggactgtccatcggggataccgctaagaagctgggagaaatgtggtcagagcagagtgccaaagacaagcaaccgtatgagcaaaaggcggctaagctgaaagaaaagtatgaaaaagatatcgcagcctaccgagcaaaggggaagagcgaggcaggcaagaagggtcctggaagaccaacaggcagtaagaagaaaaacgagccagaggatgaggaggaggaggaggaggaggaggacgaggacgaggaggaagaggacgaagatgaggagtag

SEQ ID NO: 48339 - DNA, 630 bp, Artificial Sequence
  derived and/or modified sequence
atgggcaagggcgaccccaacaagccccggggcaagatgagcagctatgcttttttcgtccaaacctgtcgcgaggagcataaaaagaaacatccagattcatccgttaatttcgctgaattctcaaaaaagtgcagtgaaaggtggaagacaatgtccgctaaggagaagtctaaattcgaggatatggccaaaagcgacaaggcccgctatgaccgagagatgaaaaactacgtgccaccaaagggagataagaaaggcaagaaaaaggacccgaacgctccgaagaggccaccaagcgcttttttccttttctgctctgagcataggccgaaaattaaatccgagcaccctgggttgagcataggcgacacagctaaaaaacttggtgagatgtggtccgaacaatcagccaaagacaagcagccatatgaacaaaaggctgcaaagttgaaagagaagtacgagaaagacatcgccgcctaccgcgctaagggcaaatctgaggctggaaaaaaaggacccgggcggcccacaggatccaagaaaaagaatgagccggaggatgaagaggaggaagaggaagaagaggatgaggatgaagaagaggaggacgaagatgaagagtag

SEQ ID NO: 48340 - DNA, 405 bp, Artificial Sequence
  derived and/or modified sequence
atgggcaagggcgaccccaacaagccccggggcaagatgagcagctacgcatttttcgtacaaacgtgccgagaagaacacaaaaaaaagcaccctgactcttccgttaattttgcagagttctcgaaaaaatgctccgagagatggaagaccatgtcggccaaggagaagagcaaatttgaagacatggccaaaagcgataaggcaagatacgacagggaaatgaagaattacgttcccccgaaaggcgacaagaagggaaagaaaaaggatcctaacgccccaaagagaccgccaagcgctttctttctgttttgcagcgaacacaggcccaaaatcaagagcgagcacccggggctcagcatcggggacacggctaagaaactgggtgagatgtggtcgtag

SEQ ID NO: 48341 - DNA, 630 bp, Artificial Sequence
  derived and/or modified sequence
atggggaagggtgatccgaacaagccacggggaaaaatgtctagttacgcgttctttgtgcagacttgtagagaggagcacaaaaagaaacaccctgattcctcagttaattttgctgagtttagcaaaaagtgcagcgaaaggtggaagaccatgtcagctaaagaaaaatctaagttcgaggatatggccaagagtgataaagctcgctatgatagggaaatgaaaaactacgttcctcctaagggagataagaaaggcaagaaaaaggaccctaacgctcccaaacgccctccttcagcatttttcttattctgctcagagcacagaccaaagattaagagtgagcaccctggcttgtctattggagacacagcaaagaaattaggcgaaatgtggagtgagcagagcgccaaagataaacagccgtatgaacagaaagccgctaagctgaaagagaaatacgaaaaagacatagccgcatacagggcaaagggcaagtctgaagctggaaaaaaaggcccaggaagaccgaccggatctaagaagaaaaatgagcccgaggatgaggaagaggaggaggaagaagaagacgaggacgaggaggaagaagacgaggatgaagagtag

SEQ ID NO: 48342 - DNA, 630 bp, Artificial Sequence
  derived and/or modified sequence
atgggcaagggggatcccaacaagccacggggaaaaatgtcctcatacgctttttttgtgcagacctgcagggaagaacataagaagaaacacccagactcttccgtcaattttgctgagttctcaaagaaatgcagtgagaggtggaagactatgagcgctaaggaaaagtctaagttcgaggacatggctaagtcggataaagcacgttacgaccgggagatgaaaaactatgtgccgccaaagggagataagaagggtaagaaaaaggaccctaacgctcccaaacggcctccttccgctttctttctcttttgcagcgagcaccgccctaaaattaagagcgagcaccctgggctgtctataggggatacagctaaaaagctaggagaaatgtggtccgagcagtccgctaaagataagcagccttatgagcagaaggccgctaaactgaaagaaaagtacgagaaggacattgctgcctacagggccaagggtaagagtgaagcaggaaagaaagggccagggcgtccgaccggcagcaaaaagaagaatgaaccagaagatgaagaagaagaggaggaagaggaagatgaagacgaggaagaggaggacgaggatgaagaatag

SEQ ID NO: 48343 - DNA, 630 bp, Artificial Sequence
  derived and/or modified sequence
atgggtaagggagatcccaacaagccaaggggtaagatgagtagctatgcctttttcgttcaaacctgcagggaggagcacaagaagaaacaccccgatagtagcgtgaactttgcagagttcagtaagaagtgcagcgaacgctggaagacaatgtccgcgaaggagaagagcaaattcgaggacatggcgaagtccgacaaggcgaggtacgatcgagaaatgaagaactatgtgcctcccaaaggcgataaaaagggaaagaagaaagacccaaatgcacccaaacggccaccaagtgccttctttctcttttgctctgaacacaggcccaagattaagagtgagcatccaggtctgagcatcggtgatactgccaagaaactcggggagatgtggtccgagcaaagcgcaaaggacaagcagccttacgagcagaaagcagcgaaactcaaagagaaatacgaaaaagatatcgctgcctatcgcgcaaaaggcaaaagcgaggcgggaaaaaagggcccaggtcgacccactggctccaaaaaaaaaaacgagccggaggacgaggaggaagaagaagaagaggaggatgaagacgaagaggaagaggacgaagacgaggaatag

SEQ ID NO: 48344 - DNA, 405 bp, Artificial Sequence
  derived and/or modified sequence
atgggaaaaggtgacccaaataagccgagagggaaaatgagttcctacgcattttttgtgcagacctgtcgtgaagaacacaaaaaaaagcatcccgattcgagcgtgaactttgctgagttttcaaaaaagtgctctgaaagatggaagactatgtccgcaaaggaaaagtctaagttcgaagatatggccaagtccgataaggctaggtacgacagagaaatgaagaattatgtaccgccaaaaggggataagaaagggaagaaaaaggacccaaatgctcccaaaaggcctcccagcgccttctttctcttctgctccgagcatcgcccaaaaatcaagtccgaacaccccggattgtcaattggagacacagctaaaaaactaggagaaatgtggagttag

SEQ ID NO: 48345 - DNA, 630 bp, Artificial Sequence
  derived and/or modified sequence
atgggcaagggcgaccccaacaagcccagaggcaagatgagcagctacgccttcttcgtgcagacctgcagagaggagcacaagaagaagcaccccgacagcagcgtgaacttcgccgagttcagcaagaagtgcagcgagagatggaagaccatgagcgccaaggagaagagcaagttcgaggacatggccaagagcgacaaggccagatacgacagagagatgaagaactacgtgccccccaagggcgacaagaagggcaagaagaaggaccccaacgcccccaagagaccccccagcgccttcttcctgttctgcagcgagcacagacccaagatcaagagcgagcaccccggcctgagcatcggcgacaccgccaagaagctgggcgagatgtggagcgagcagagcgccaaggacaagcagccctacgagcagaaggccgccaagctgaaggagaagtacgagaaggacatcgccgcctacagagccaagggcaagagcgaggccggcaagaagggccccggcagacccaccggcagcaagaagaagaacgagcccgaggacgaggaggaggaggaggaggaggaggacgaggacgaggaggaggaggacgaggacgaggagtag

SEQ ID NO: 48346 - DNA, 405 bp, Artificial Sequence
  derived and/or modified sequence
atgggcaagggcgaccccaacaagcccagaggcaagatgagcagctacgccttcttcgtgcagacctgcagagaggagcacaagaagaagcaccccgacagcagcgtgaacttcgccgagttcagcaagaagtgcagcgagagatggaagaccatgagcgccaaggagaagagcaagttcgaggacatggccaagagcgacaaggccagatacgacagagagatgaagaactacgtgccccccaagggcgacaagaagggcaagaagaaggaccccaacgcccccaagagaccccccagcgccttcttcctgttctgcagcgagcacagacccaagatcaagagcgagcaccccggcctgagcatcggcgacaccgccaagaagctgggcgagatgtggagctag

SEQ ID NO: 48347 - protein, 789 aa, Artificial Sequence
  derived and/or modified sequence
MEDGPSNNASCFRRLTECFLSPSLTDEKVKAYLSLHPQVLDEFVSESVSAETVEKWLKRKNNKSEDESAPKEVSRYQDTNMQGVVYELNSYIEQRLDTGGDNQLLLYELSSIIKIATKADGFALYFLGECNNSLCIFTPPGIKEGKPRLIPAGPITQGTTVSAYVAKSRKTLLVEDILGDERFPRGTGLESGTRIQSVLCLPIVTAIGDLIGILELYRHWGKEAFCLSHQEVATANLAWASVAIHQVQVCRGLAKQTELNDFLLDVSKTYFDNIVAIDSLLEHIMIYAKNLVNADRCALFQVDHKNKELYSDLFDIGEEKEGKPVFKKTKEIRFSIEKGIAGQVARTGEVLNIPDAYADPRFNREVDLYTGYTTRNILCMPIVSRGSVIGVVQMVNKISGSAFSKTDENNFKMFAVFCALALHCANMYHRIRHSECIYRVTMEKLSYHSICTSEEWQGLMQFTLPVRLCKEIELFHFDIGPFENMWPGIFVYMVHRSCGTSCFELEKLCRFIMSVKKNYRRVPYHNWKHAVTVAHCMYAILQNNHTLFTDLERKGLLIACLCHDLDHRGFSNSYLQKFDHPLAALYSTSTMEQHHFSQTVSILQLEGHNIFSTLSSSEYEQVLEIIRKAIIATDLALYFGNRKQLEEMYQTGSLNLNNQSHRDRVIGLMMTACDLCSVTKLWPVTKLTANDIYAEFWAEGDEMKKLGIQPIPMMDRDKKDEVPQGQLGFYNAVAIPCYTTLTQILPPTEPLLKACRDNLSQWEKVIRGEETATWISSPSVAQKAAASED

SEQ ID NO: 48348 - protein, 807 aa, Artificial Sequence
  derived and/or modified sequence
QGASFALAAAAALLFGSDMEDGPSNNASCFRRLTECFLSPSLTDEKVKAYLSLHPQVLDEFVSESVSAETVEKWLKRKNNKSEDESAPKEVSRYQDTNMQGVVYELNSYIEQRLDTGGDNQLLLYELSSIIKIATKADGFALYFLGECNNSLCIFTPPGIKEGKPRLIPAGPITQGTTVSAYVAKSRKTLLVEDILGDERFPRGTGLESGTRIQSVLCLPIVTAIGDLIGILELYRHWGKEAFCLSHQEVATANLAWASVAIHQVQVCRGLAKQTELNDFLLDVSKTYFDNIVAIDSLLEHIMIYAKNLVNADRCALFQVDHKNKELYSDLFDIGEEKEGKPVFKKTKEIRFSIEKGIAGQVARTGEVLNIPDAYADPRFNREVDLYTGYTTRNILCMPIVSRGSVIGVVQMVNKISGSAFSKTDENNFKMFAVFCALALHCANMYHRIRHSECIYRVTMEKLSYHSICTSEEWQGLMQFTLPVRLCKEIELFHFDIGPFENMWPGIFVYMVHRSCGTSCFELEKLCRFIMSVKKNYRRVPYHNWKHAVTVAHCMYAILQNNHTLFTDLERKGLLIACLCHDLDHRGFSNSYLQKFDHPLAALYSTSTMEQHHFSQTVSILQLEGHNIFSTLSSSEYEQVLEIIRKAIIATDLALYFGNRKQLEEMYQTGSLNLNNQSHRDRVIGLMMTACDLCSVTKLWPVTKLTANDIYAEFWAEGDEMKKLGIQPIPMMDRDKKDEVPQGQLGFYNAVAIPCYTTLTQILPPTEPLLKACRDNLSQWEKVIRGEETATWISSPSVAQKAAASED

SEQ ID NO: 48349 - DNA, 2370 bp, Artificial Sequence
  derived and/or modified sequence
atggaggacggccccagcaacaacgccagctgcttcagaagactgaccgagtgcttcctgagccccagcctgaccgacgagaaggtgaaggcctacctgagcctgcacccccaggtgctggacgagttcgtgagcgagagcgtgagcgccgagaccgtggagaagtggctgaagagaaagaacaacaagagcgaggacgagagcgcccccaaggaggtgagcagataccaggacaccaacatgcagggcgtggtgtacgagctgaacagctacatcgagcagagactggacaccggcggcgacaaccagctgctgctgtacgagctgagcagcatcatcaagatcgccaccaaggccgacggcttcgccctgtacttcctgggcgagtgcaacaacagcctgtgcatcttcaccccccccggcatcaaggagggcaagcccagactgatccccgccggccccatcacccagggcaccaccgtgagcgcctacgtggccaagagcagaaagaccctgctggtggaggacatcctgggcgacgagagattccccagaggcaccggcctggagagcggcaccagaatccagagcgtgctgtgcctgcccatcgtgaccgccatcggcgacctgatcggcatcctggagctgtacagacactggggcaaggaggccttctgcctgagccaccaggaggtggccaccgccaacctggcctgggccagcgtggccatccaccaggtgcaggtgtgcagaggcctggccaagcagaccgagctgaacgacttcctgctggacgtgagcaagacctacttcgacaacatcgtggccatcgacagcctgctggagcacatcatgatctacgccaagaacctggtgaacgccgacagatgcgccctgttccaggtggaccacaagaacaaggagctgtacagcgacctgttcgacatcggcgaggagaaggagggcaagcccgtgttcaagaagaccaaggagatcagattcagcatcgagaagggcatcgccggccaggtggccagaaccggcgaggtgctgaacatccccgacgcctacgccgaccccagattcaacagagaggtggacctgtacaccggctacaccaccagaaacatcctgtgcatgcccatcgtgagcagaggcagcgtgatcggcgtggtgcagatggtgaacaagatcagcggcagcgccttcagcaagaccgacgagaacaacttcaagatgttcgccgtgttctgcgccctggccctgcactgcgccaacatgtaccacagaatcagacacagcgagtgcatctacagagtgaccatggagaagctgagctaccacagcatctgcaccagcgaggagtggcagggcctgatgcagttcaccctgcccgtgagactgtgcaaggagatcgagctgttccacttcgacatcggccccttcgagaacatgtggcccggcatcttcgtgtacatggtgcacagaagctgcggcaccagctgcttcgagctggagaagctgtgcagattcatcatgagcgtgaagaagaactacagaagagtgccctaccacaactggaagcacgccgtgaccgtggcccactgcatgtacgccatcctgcagaacaaccacaccctgttcaccgacctggagagaaagggcctgctgatcgcctgcctgtgccacgacctggaccacagaggcttcagcaacagctacctgcagaagttcgaccaccccctggccgccctgtacagcaccagcaccatggagcagcaccacttcagccagaccgtgagcatcctgcagctggagggccacaacatcttcagcaccctgagcagcagcgagtacgagcaggtgctggagatcatcagaaaggccatcatcgccaccgacctggccctgtacttcggcaacagaaagcagctggaggagatgtaccagaccggcagcctgaacctgaacaaccagagccacagagacagagtgatcggcctgatgatgaccgcctgcgacctgtgcagcgtgaccaagctgtggcccgtgaccaagctgaccgccaacgacatctacgccgagttctgggccgagggcgacgagatgaagaagctgggcatccagcccatccccatgatggacagagacaagaaggacgaggtgccccagggccagctgggcttctacaacgccgtggccatcccctgctacaccaccctgacccagatcctgccccccaccgagcccctgctgaaggcctgcagagacaacctgagccagtgggagaaggtgatcagaggcgaggagaccgccacctggatcagcagccccagcgtggcccagaaggccgccgccagcgaggactag

SEQ ID NO: 48350 - DNA, 8189 bp, Artificial Sequence
  derived and/or modified sequence
gcggcggcggccaaactccgcggcgtccccagggcgccagcttcgccctcgccgccgcggccgcgctgctcttcggctccgacatggaagatggaccttctaataatgcgagctgcttccgaaggctgaccgagtgcttcctgagccccagtttgacagatgaaaaagtgaaggcatatctttctcttcacccccaggtattagatgaatttgtatctgaaagtgttagtgcagagacagtagagaaatggctgaagaggaagaacaacaaatcagaagatgaatcagctcctaaggaagtcagcaggtaccaagatacgaatatgcagggagttgtatatgaactaaacagctatatagaacaacggttggacacaggaggagacaaccagctactcctctatgaactgagcagcatcattaaaatagccacaaaagccgatggatttgcactgtatttccttggagagtgcaataatagcctgtgtatattcacgccacctgggataaaggaaggaaaaccccgcctcatccctgctgggcccatcactcagggcaccaccgtctctgcttatgtggccaagtccaggaaaacactgctagtagaagacatccttggagatgaacgatttccaagaggtactggactggaatcagggactcgtatccagtctgttctttgcttaccaattgtcactgcaattggtgacttgattggtattctcgagctgtatcggcactggggcaaagaagccttctgtcttagtcaccaggaggttgcaacagcaaatcttgcctgggcttcagtagcaatacatcaggtgcaggtatgcagaggccttgccaaacagacagaattgaatgacttcctactcgacgtatcaaaaacatattttgataacatagttgcaatagattctctacttgaacacataatgatatatgcaaaaaacctggtgaatgccgatcgttgtgcgcttttccaggtggaccataagaacaaggagttatattcagacctttttgatattggagaggaaaaggaaggaaaacctgtcttcaagaagaccaaagagataagattttcaattgagaaaggaattgctggccaagtagcaagaacaggggaagtcctgaacattccagatgcctatgcagacccacgctttaacagagaagtagacttgtacacaggctacaccacgcggaacatcctgtgcatgcccatcgtcagccgaggcagcgtgataggtgtggtgcagatggtcaacaaaatcagtggcagtgccttctctaaaacagatgaaaacaacttcaaaatgtttgccgtcttttgtgctttagccttacactgtgctaatatgtatcatagaattcgccactcagagtgcatttaccgggtaacgatggaaaagctgtcctaccatagcatttgtacttcagaagagtggcaaggtctcatgcaattcacccttcccgtgcgtctctgcaaagaaattgaattattccactttgacattggtccttttgaaaacatgtggcctggaatttttgtctacatggttcatcggtcctgtgggacatcctgctttgagcttgaaaagttgtgtcgttttattatgtctgtgaagaagaactatcggcgggttccttatcacaactggaagcatgcggtcactgtagcacactgcatgtatgccatacttcagaacaatcacacgcttttcacagaccttgagcgcaaaggactgctgattgcgtgtctgtgtcatgacctggaccacaggggcttcagtaacagctacctgcagaagttcgaccaccctctggccgctctctactccacttccaccatggagcagcaccacttctcccagactgtgtccatcctccagttggaagggcacaatatcttctccactctgagctccagtgaatatgagcaggtgcttgagatcatccgcaaagccatcattgccacagaccttgctttatactttggaaacaggaagcagttggaagagatgtaccagaccggatcactaaaccttaataatcaatcacatagagaccgtgtaattggtttgatgatgactgcctgtgacctttgttctgtgacaaaactgtggcccgttacaaaattgacggcaaatgatatatatgcagaattctgggctgagggtgatgaaatgaagaaattgggaatacagcctattcctatgatggacagagacaagaaggatgaagtcccccaaggccagcttgggttctacaatgccgtggccattccctgctatacaacccttacccagatcctccctcccacggagcctcttctgaaagcatgcagggataatctcagtcagtgggagaaggtgattcgaggggaggagactgcaacctggatttcatccccatccgtggctcagaaggcagctgcatctgaagattgagcactggtcaccctgacacgctgtcccacctacagatcctcatcttgcttctttgacattcttttcctttttttggggggggtggggggaacctgcacctggtaactggggtgcaaacctcttcaagaaggtaacatcaaataaataagtcaagcagaggacttcctgccaatctcttctgtgaggcatcatagacactgagcaaccaggaccacccccacgttcagaaatcagctggccaagtgactccatttgacttgcaaaccagccttttctaataggctaatattgctgaggccttaaaggaaatggacaaaaattatccagaaggggtacttttccattgtatctttctaataagggtttaaaatggtactattatggtattgtacttgggctttaacatcaatgttgctttgatgttgttggatataaataggaatttttacacattactattgtgaatggtgaatgttcatgtatgacctacttgtaattaacttgagttgtagtccacagcctcaggacaaatgtcgttgaggttacagagtaagaaatgatggcaaaacgtcaaactcttatttcagagcttcatgaatttagttagactaaacataattctttaagttcaacctaaagggctgagatcaataaatttaacactagacgaagtagacttcctgtctttttgagaagagatgaggtatatgttacaataaatctcagaacttcaagtagcagttcaaaagatgtcagtttttaaaattgtttttgttgttgtcttggcagttttactgaaccctttgcataaagaacaaaataaaagctcggcattgtaatttttttaatggacaagtcttatggatacgaagggtacatttttcataatgattcctttatattttcactttgtgtcattgcagaattttagactctcattcacaatgaaaagtttattttaaacattgtttaattaaaataccatacagttctcttttaaacatcaaaccataaaaagtgtattttgtaattttactctgacctgccgcagtcacctctcacttatctcttccacgtactgcacggtcgtatttcatgagctttctgtccatagcacagaaacagagcagaaagtagtacaatcatgttggaccttctttctgttctctttactcttctcacagatcagatcactccatagaagcctgtgggtttcgatggtttcttctatacacctttttggttgaccagtattactatacaatgtaagtgttttaaaaaatacgaaagtaatactctgcaccccttcctacaaagatgataaagcagtcacttctggcgcattttaataatttaaagatttttagtgcaatggcacggtaacctccaaacctgaattagacagagactcactcaggaagtgacaggcccatcatatcaaataacttattcacttttcatgtggcaggaaactggaatatcgcttttaataaaatggaaaaatatgcttctacatatttaccaccataggcgttttgttcatatgagcctggtttgtgcaaaattaaatcagaggcttctacaacatggtttatttatgttgtagcaaagttggctctacataaacattgttcttattttaaaattaacactatgtgttcagttttcttgtgggcttctgaaagttgccatcttccctccgtggagctccatttgctattttcattatacactatgaggtaaaatgtaataacaaaagagagagaagtaccactgtggctagatatatacacacacatatatatatggatggatgtaatatatgtagaacacacacatagatgtatataggatacacactcatgtatgtaaacgtatacatatgtgtatatatgatacatacacatacacacacacgagagacagaaggaaagagaggaagagagaagcaaacatgtaggaaaaaatataaatcagccccattctcccattctttaagaacaatgatttttcttgatggaaaatgcatatcacttgacagttgacaagaaagtgtcatttttgtgttagtgtatcatataattgaatttgaacaagatacatatttttctgcatacaaatttatgaagctggagtctaccaaacacagctttagtcacaaaagttagtttagttatctcatttcgcttggagatggaatttcaggaagggatatattatttaagattattgtttaattacaagaattttaaaagaatgtatgaattctgttttttaatatagaaaataattatggagttaggaatctcatggctacatttacatttttaggttattacagaaaattctcttaatttattatagtcaagtgtattatgtaatctctatttagaacagtttcccaaaggaatgtgattggatttactggttggttaatttcttgtgaaatattgtcataatagaagcacagcttgaacaaaagactgaattctgatataaactgtcaatattgcttttaccatgtgtaagatttacttagtaatcacagatttacctaaaataaaaggacccgggttgcagtgatatttagttaatgatttgttttggaaaacatgcagttaggagtatttttgtattttgtcagatgtttaggagacagactttcgggtcatgtttcttgtcttgttcccagatcttttcttaaaagaacagtgtgacaccagaagccaagagatggtttttactaacaacagctttgatgagttcctattaaggtcgtattgtgtattgtgccaaattttccacccagtataaatttagtaacccgctatgagcatatgtaggatattcaatttgcagatacttttgttggttatgttggtttataatagacaagttttatggtcatatgcaattattccattatctttttggacacagtgaatatgttttttagctaaaaatgtccttggaaacataaatgcctgccaataacatggaatattgaattcgggcaatgtgaattgattaattagaaaagggtcaaaagaaatacaatggatgtggaaactaattctaaaaaatagccctattaatagggcagagactctggtccatttcccagctgtacttctctctaagaggtgtatgaaaaacccatcttgcaaaagagaccaaaatattagacacaatcgttcccattcctgactcttcaatggaaaaggaaggtacagatgtttacagtggtgccccaggtgactcgttctcaccacaacaaaagcaactaattggaaactagatgtgttcaataatagatttcctcttttttggcatgctttttagattttttttcattttgtaaaatctcagttaatttttctttattggtatatttgtgtatgcgagacaaatcctgtattgtacaggatataaatagatgcataaatccttagatacctgggttttttaataggtttaggtttgggtattgtgtttctggtcttttaactcaaaattaaggtttgagctttaataggactaaattattcacctgccttggcctgtgcctttattttaaatactgcaattttacttcttcattcatgtatttattattttgcttttcttgcttaagtataattgaaaatatttgcaggaacgcacaattcattttatcaagttgaatgaataggaccattctctcctcatcagatttctgttctttatttgacttcattgacatataccctggtgactataaccagtgaactgttcagagtcagtcttttcggcaagaacttcagagaactgtgacactggttatgatgtgattttggggggtttcaggtacctaagcatgatttttaaaatcacttctctctttacatatttcgaacatatgtttgctttctacactttgcagattttatttaggatttaattctttaaagactatattcatttagtcactatagtggatctcttctactgcaagtattcatctgatttttaaattatgtaaaatgtaaatcagccaagtatgtcatccgttatagtttccccatgctttcagcgcatggccatgagatttttacatgtgcataagtatttagccaatacacattttgctgacttctttaaccatttatattgtttaaattagtaatatccaatgcagtgcacacttttttgtcttttttccaacggaatattttggttgtctgtagcgttggaagcattttatatgataaaaatagcaagaaaaaattaaaaagtgtcaacggtgtgctggttctaaattaagaagatagaacaaagagaaagacattaatgttacctaagaaacacatttaacatccgaagaagcaatgctgtcctcacttgatgtttctcttctcaacccagcaatggagagcagggcttgcaaagccgtacagagcctacgtgctctttcctgcaagtgggagaaaactaatcaatggcacacagggccaggtgtggccctgtgaggcaaaggataatgtcacctcaggaccaaggtggaaacttacagctgaatccagggcttactaagtagggaagtcagtttacatatttcagttttcctctgatgtttttgaggtactgtgtatttgcagaagtttaagcagaagggttttgtttctattgtaagttaggttctaaaagtgtataatctgatactctagcccaactgaaatattatatcttgggcgttacagcctttgtctttttctttagtcaccttaatacccagtcctatgctgtatctctgatagcctatataaatgacatataggaatattattttccatatgatctgttgtatggtgtatatgctatgtgttcatttcgtgtgcaagttcagagtgtaatagatttacccagagaaggtgtttctatacaatgcccctacctatttgaaattacatgcttgcccaacacactgtgaaatagttaccaaaatttgtacaaatgcagcatcttcattctttctgagaagacaagatggttttctttacatgaacaaatgaacaaaagagatcctagatccataacgtagctaaggcatctaagagtttgctgttgataatcttgctgaccaaaaactactggagagtaacacaggttatatgccatcacaaatacaatgctcatgaagaactgatttgtagagtcaatgaacctgtgtccagaattttaataggctctctattggaaggagaaagaatttcaagttaacagtatctaactttatcatagttgatgttagtaaattttaaaaaatgattttatatgtatgacaaaaatctttgtaaaatgcgcaagtgcaataatttaaagaggtcttaactttgcatttataaattataaatattgtacatgtgtgtaattttttcatgtattcatttgcagtctttgtatttaaaaaacatttactgttatgtttgtataatagaacagtaatcatttattataatctaggcaagttgtaaataaattcataattcaaacagccagtatatatgcatatatgagtgttatattgcaaaatctttgttttacttacatggttaaagcagcaagaattcttttgttgatatgtaattatacacataaaatatatatatgtatgatacatgaaatatatttagaaatgttcataattttaatggatatcctttggtgtgaataattgaatacagagtttttaaaata

SEQ ID NO: 48351 - DNA, 2424 bp, Artificial Sequence
  derived and/or modified sequence
cagggcgccagcttcgccctggccgccgccgccgccctgctgttcggcagcgacatggaggacggccccagcaacaacgccagctgcttcagaagactgaccgagtgcttcctgagccccagcctgaccgacgagaaggtgaaggcctacctgagcctgcacccccaggtgctggacgagttcgtgagcgagagcgtgagcgccgagaccgtggagaagtggctgaagagaaagaacaacaagagcgaggacgagagcgcccccaaggaggtgagcagataccaggacaccaacatgcagggcgtggtgtacgagctgaacagctacatcgagcagagactggacaccggcggcgacaaccagctgctgctgtacgagctgagcagcatcatcaagatcgccaccaaggccgacggcttcgccctgtacttcctgggcgagtgcaacaacagcctgtgcatcttcaccccccccggcatcaaggagggcaagcccagactgatccccgccggccccatcacccagggcaccaccgtgagcgcctacgtggccaagagcagaaagaccctgctggtggaggacatcctgggcgacgagagattccccagaggcaccggcctggagagcggcaccagaatccagagcgtgctgtgcctgcccatcgtgaccgccatcggcgacctgatcggcatcctggagctgtacagacactggggcaaggaggccttctgcctgagccaccaggaggtggccaccgccaacctggcctgggccagcgtggccatccaccaggtgcaggtgtgcagaggcctggccaagcagaccgagctgaacgacttcctgctggacgtgagcaagacctacttcgacaacatcgtggccatcgacagcctgctggagcacatcatgatctacgccaagaacctggtgaacgccgacagatgcgccctgttccaggtggaccacaagaacaaggagctgtacagcgacctgttcgacatcggcgaggagaaggagggcaagcccgtgttcaagaagaccaaggagatcagattcagcatcgagaagggcatcgccggccaggtggccagaaccggcgaggtgctgaacatccccgacgcctacgccgaccccagattcaacagagaggtggacctgtacaccggctacaccaccagaaacatcctgtgcatgcccatcgtgagcagaggcagcgtgatcggcgtggtgcagatggtgaacaagatcagcggcagcgccttcagcaagaccgacgagaacaacttcaagatgttcgccgtgttctgcgccctggccctgcactgcgccaacatgtaccacagaatcagacacagcgagtgcatctacagagtgaccatggagaagctgagctaccacagcatctgcaccagcgaggagtggcagggcctgatgcagttcaccctgcccgtgagactgtgcaaggagatcgagctgttccacttcgacatcggccccttcgagaacatgtggcccggcatcttcgtgtacatggtgcacagaagctgcggcaccagctgcttcgagctggagaagctgtgcagattcatcatgagcgtgaagaagaactacagaagagtgccctaccacaactggaagcacgccgtgaccgtggcccactgcatgtacgccatcctgcagaacaaccacaccctgttcaccgacctggagagaaagggcctgctgatcgcctgcctgtgccacgacctggaccacagaggcttcagcaacagctacctgcagaagttcgaccaccccctggccgccctgtacagcaccagcaccatggagcagcaccacttcagccagaccgtgagcatcctgcagctggagggccacaacatcttcagcaccctgagcagcagcgagtacgagcaggtgctggagatcatcagaaaggccatcatcgccaccgacctggccctgtacttcggcaacagaaagcagctggaggagatgtaccagaccggcagcctgaacctgaacaaccagagccacagagacagagtgatcggcctgatgatgaccgcctgcgacctgtgcagcgtgaccaagctgtggcccgtgaccaagctgaccgccaacgacatctacgccgagttctgggccgagggcgacgagatgaagaagctgggcatccagcccatccccatgatggacagagacaagaaggacgaggtgccccagggccagctgggcttctacaacgccgtggccatcccctgctacaccaccctgacccagatcctgccccccaccgagcccctgctgaaggcctgcagagacaacctgagccagtgggagaaggtgatcagaggcgaggagaccgccacctggatcagcagccccagcgtggcccagaaggccgccgccagcgaggactag

SEQ ID NO: 48352 - DNA, 2370 bp, Artificial Sequence
  derived and/or modified sequence
atggaggacggcccgtcaaacaatgcaagttgttttaggagactaaccgagtgttttctgagcccaagcctgaccgacgaaaaggtaaaggcatatctgagcctgcaccctcaagtgctggatgagttcgtatccgaatcagtctctgcagaaactgtggaaaagtggttgaagcgaaagaataataagagcgaggatgagtctgctccaaaggaagtgagtcggtatcaagatacgaacatgcagggggtggtatacgagttgaattcttatatcgagcagcgcctggacaccgggggcgataaccaactcctgctgtatgaattaagttccataattaagattgctacaaaagcagacggcttcgccctctactttctgggagagtgcaacaatagcttgtgtatcttcaccccgccagggattaaggagggaaaacctagactcataccagccggtccaattactcagggtacaacagtttccgcttatgtggcaaagtcccggaagaccctgctggtagaggacatcctgggcgacgagagatttcccaggggcaccgggcttgagagcggaacccggatccagtctgtcctctgcctgcccattgtcaccgcgataggagatcttatcggtatattggaactctatcggcactggggcaaggaggccttttgcctctctcaccaggaggtagccacagccaacctggcctgggcttcagtagccatccaccaggttcaggtctgccgagggttggctaaacagactgaactgaacgacttccttctggatgtgtcaaaaacatactttgacaatatcgttgccatcgactcactgcttgagcacatcatgatttacgctaagaatcttgtgaacgctgacagatgcgctttgtttcaggtagatcataaaaacaaggagctatactccgacttattcgatatcggtgaagaaaaagagggaaaacccgtgttcaaaaaaacaaaagaaatccgtttcagcatcgagaaaggaatagccgggcaagtagccaggaccggcgaggttctcaacattcccgacgcctacgccgacccaagatttaaccgggaggtcgacctctataccggttataccacgcgcaacatcctgtgtatgcctatagtgtcaagaggatccgttattggcgttgtccaaatggttaataagatctctgggtcagccttttccaagaccgatgaaaataacttcaagatgttcgcagtattctgcgctctggctttgcactgcgcaaatatgtaccaccgcatccggcactctgagtgcatttatagggtgacgatggaaaagctctcctaccacagcatctgcacctcagaggaatggcaaggccttatgcagttcacgttgcccgtgaggttatgcaaggaaatcgagctgttccatttcgatatcggcccgtttgaaaacatgtggcctggcatcttcgtctatatggtgcatagatcatgcggcacctcatgctttgaattagaaaagttatgtcgattcatcatgtcggttaagaagaattacagacgggtgccatatcataactggaagcatgctgtcactgtcgcccattgcatgtacgccatcttgcaaaataatcacaccctgttcactgatctcgaacgtaaaggtctgctcatcgcatgtctgtgccacgacttggaccatcggggcttttccaattcatacctgcaaaagtttgaccatcccctggccgccctctattcaacgtcaaccatggaacagcatcacttctctcaaacagtaagcattctacagctggaggggcataatatcttctccacgctctcttcttctgaatacgaacaagtgctcgagattattaggaaggcaatcattgcaaccgaccttgccctgtacttcggtaatcgcaaacagctggaggagatgtaccagactggatcactcaatctgaacaatcagtctcatcgggaccgggtgatcgggctcatgatgactgcctgtgatttgtgctcagtgactaaactctggccagtaacaaagctaacggccaatgacatttacgctgagttttgggccgagggcgacgaaatgaagaagctgggcatccagcccattccgatgatggatagggacaagaaggatgaggtgccacagggccagctcggcttctacaatgctgtggccatcccctgttataccactctcactcagatcctgccgcccacagagcccctcctgaaggcatgcagggacaacctgagccaatgggagaaggtgataaggggagaggagaccgctacatggatttcatcccctagcgtggcacagaaagcagctgcttccgaggattag

SEQ ID NO: 48353 - DNA, 2424 bp, Artificial Sequence
  derived and/or modified sequence
cagggggcgtcattcgccttggctgctgctgccgcattgctgtttggctctgatatggaagatggaccgtctaacaacgcttcctgttttcgcagactcacagaatgctttttgtccccgtcgcttacagacgagaaggtgaaggcctacctatccttacaccctcaggtgctggacgagttcgtgtccgaatctgtttctgccgaaactgttgagaagtggctgaagaggaagaataataagtcagaagatgaatccgcgcctaaggaagtttctagataccaggacaccaatatgcaaggagtggtgtatgaactcaacagttatattgagcagcggctggacactggcggtgataaccagttgctcttgtacgagctctcctccatcatcaagatcgcaaccaaggcagacggattcgcactctattttttgggcgaatgtaacaattccctgtgtatcttcaccccgcccgggattaaggagggcaaacctagacttattcccgccggacccatcacccagggcactacagtctccgcatatgtcgcgaaatcccgtaagacactgcttgtggaagatatcctgggagacgaaagatttcccagggggacgggcctcgagagcggaaccaggatccagagcgtgctctgtctccccatcgtgaccgcaattggagatctgatcggaatactggagctgtacagacactggggcaaggaggcattttgtctgtcccatcaagaggtggcgaccgccaatctcgcttgggcttctgtggctatccaccaagtgcaggtgtgtagaggtctagccaagcagacggaactaaatgattttttgctagacgtgagcaagacctacttcgataacatagtggccatcgactcattgttagaacacatcatgatctacgctaagaacctcgtgaacgcagacaggtgcgccctttttcaggtcgaccacaagaacaaggaactatactcagacctgtttgatatcggagaagaaaaagagggcaaaccagtcttcaagaaaaccaaggaaattcgcttctctattgaaaaaggcatagcagggcaggtggcacgtacaggcgaagtgctgaatatcccagacgcctacgctgaccccaggtttaatagggaggtcgacctttataccgggtacactactcgcaatatactgtgtatgcctatcgtgagccgcggcagtgtgatcggggtcgtccagatggtcaataaaatctccgggtccgccttctctaaaactgacgagaataattttaaaatgtttgcagtcttttgtgccctggccctgcattgcgcaaacatgtaccataggattcgacattctgagtgtatttaccgagtcactatggaaaagctttcctatcactcaatctgcactagcgaggagtggcagggcctcatgcagttcaccctccccgttcgcctgtgtaaggaaatagagttgttccacttcgacattggcccattcgagaatatgtggcccggaatcttcgtatatatggttcaccgttcctgcgggacatcatgcttcgaattggagaagctgtgtagattcataatgtcagtgaagaaaaattataggagggtcccctaccataattggaaacacgccgtcaccgtggcccactgtatgtatgccatcctccaaaacaatcacactttgttcacagatcttgagagaaagggtctgctcatcgcatgcctgtgtcacgacctcgatcacagaggattttcaaactcctacctgcagaaatttgaccacccccttgcggccctgtattcaacgtctacaatggagcaacatcacttctcgcagactgtcagcattctccagctggaaggacataacatcttcagcacactgagcagcagcgagtacgaacaagttctggagatcatacgcaaagccatcatagccactgatctcgccctgtatttcggtaatcggaagcaactcgaggagatgtatcagacaggcagtctgaacttgaacaaccagtcccatagggaccgcgtgattggcctgatgatgactgcttgcgacctgtgttctgtcactaaactatggcccgttactaaacttaccgcaaacgatatttatgcagagttctgggccgagggggacgagatgaagaagctcggaatccagcccattcccatgatggatagggataagaaagacgaggtccctcaggggcagttgggcttttacaacgcagtggcgattccttgctacaccacactaacacagatccttccgcccaccgagcctctcttgaaagcctgtcgcgataaccttagtcagtgggagaaggtcatccgcggcgaggaaacagccacgtggatctcctcccctagcgttgctcaaaaggcagccgcctcagaagactag

SEQ ID NO: 48354 - DNA, 2370 bp, Artificial Sequence
  derived and/or modified sequence
atggaggatggccccagcaacaatgccagctgcttccggcggctgacagagtgcttcctgagccccagcctgacagatgagaaggtgaaggcctacctgagcctgcacccccaggtgctggatgaatttgtgtctgagagcgtgtctgctgagaccgtggagaagtggctgaagaggaagaacaacaagtcagaagatgagagcgcccccaaggaggtgagccgctaccaggacaccaacatgcagggcgtggtgtatgagctgaacagctacatcgagcagaggctggacaccggcggggacaaccagctgctgctgtatgagctgagcagcatcatcaagatcgccaccaaggcagatggctttgccctgtacttcctgggggagtgcaacaacagcctgtgcatcttcaccccacctggcatcaaggagggcaagcccaggctcatcccagctggccccatcacccagggcaccaccgtgtctgcctacgtggccaagagcaggaagaccctgctggtggaggacatcctgggagatgagcgcttcccccggggcaccggcctggagagcggcacccgcatccagagcgtgctgtgcctgcccatcgtgacagccatcggggacctgattggcatcctggagctgtaccgccactggggcaaggaggccttctgcctgagccaccaggaggtggccacagccaacctggcctgggcctctgtggccatccaccaggtgcaggtgtgccggggcctggccaagcagacagagctgaatgacttcctgctggatgtgtccaagacctactttgacaacatcgtggccatcgacagcctgctggagcacatcatgatctatgccaagaacctggtgaatgctgacagatgtgccctcttccaggtggaccacaagaacaaggagctgtacagcgacctgtttgacatcggggaggagaaggagggcaagcctgtgttcaagaagaccaaggagatccgcttcagcattgagaagggcattgctggccaggtggccaggactggagaggtgctgaacatcccagatgcctatgctgacccccgcttcaaccgggaggtggacctgtacacaggctacaccaccaggaacatcctgtgcatgcccatcgtgtcccggggctctgtgattggagtggtgcagatggtgaacaagatcagcggcagcgccttcagcaagacagatgagaacaacttcaagatgtttgctgtgttctgtgccctggccctgcactgtgccaacatgtaccaccgcatccgccacagcgagtgcatctacagagtgaccatggagaagctgagctaccacagcatctgcaccagcgaggagtggcagggcctgatgcagttcaccctgcctgtgcggctgtgcaaggagattgagctgttccactttgatattggcccctttgagaacatgtggccaggcatctttgtgtacatggtgcacaggagctgtggcaccagctgctttgagctggagaagctgtgccgcttcatcatgtctgtgaagaagaactaccgccgggtgccctaccacaactggaagcatgctgtgacagtggcccactgcatgtatgccatcctgcagaacaaccacaccctcttcacagacctggagaggaagggcctgctgattgcctgcctgtgccacgacctggaccaccggggcttcagcaacagctacctgcagaagtttgaccaccccctggccgccctgtacagcaccagcaccatggagcagcaccacttcagccagacagtgtccatcctgcagctggagggccacaacatcttcagcaccctgagcagcagtgaatatgagcaggtgctggagatcatcaggaaggccatcatcgccacagacctggccctgtactttggaaacaggaagcagctggaggagatgtaccagacaggcagcctgaacctgaacaaccagagccaccgggacagagtcatcggcctgatgatgacagcctgtgacctgtgcagcgtgaccaagctgtggcctgtgaccaagctgacagccaatgacatctatgcagagttctgggccgagggagatgagatgaagaagctgggcatccagcccatccccatgatggaccgggacaagaaggatgaggtgccccagggccagctgggcttctacaatgctgtggccatcccctgctacaccaccctgacccagatcctgcccccaacagagcccctgctgaaggcctgccgggacaacctgagccagtgggagaaggtgatccggggggaggagacagccacctggatcagcagccccagcgtggcccagaaggctgctgccagcgaggactag

SEQ ID NO: 48355 - DNA, 2424 bp, Artificial Sequence
  derived and/or modified sequence
cagggcgccagctttgccctggccgctgctgctgccctgctgtttggaagtgacatggaggatggccccagcaacaatgccagctgcttccggcggctgacagagtgcttcctgagccccagcctgacagatgagaaggtgaaggcctacctgagcctgcacccccaggtgctggatgaatttgtgtctgagagcgtgtctgctgagaccgtggagaagtggctgaagaggaagaacaacaagtcagaagatgagagcgcccccaaggaggtgagccgctaccaggacaccaacatgcagggcgtggtgtatgagctgaacagctacatcgagcagaggctggacaccggcggggacaaccagctgctgctgtatgagctgagcagcatcatcaagatcgccaccaaggcagatggctttgccctgtacttcctgggggagtgcaacaacagcctgtgcatcttcaccccacctggcatcaaggagggcaagcccaggctcatcccagctggccccatcacccagggcaccaccgtgtctgcctacgtggccaagagcaggaagaccctgctggtggaggacatcctgggagatgagcgcttcccccggggcaccggcctggagagcggcacccgcatccagagcgtgctgtgcctgcccatcgtgacagccatcggggacctgattggcatcctggagctgtaccgccactggggcaaggaggccttctgcctgagccaccaggaggtggccacagccaacctggcctgggcctctgtggccatccaccaggtgcaggtgtgccggggcctggccaagcagacagagctgaatgacttcctgctggatgtgtccaagacctactttgacaacatcgtggccatcgacagcctgctggagcacatcatgatctatgccaagaacctggtgaatgctgacagatgtgccctcttccaggtggaccacaagaacaaggagctgtacagcgacctgtttgacatcggggaggagaaggagggcaagcctgtgttcaagaagaccaaggagatccgcttcagcattgagaagggcattgctggccaggtggccaggactggagaggtgctgaacatcccagatgcctatgctgacccccgcttcaaccgggaggtggacctgtacacaggctacaccaccaggaacatcctgtgcatgcccatcgtgtcccggggctctgtgattggagtggtgcagatggtgaacaagatcagcggcagcgccttcagcaagacagatgagaacaacttcaagatgtttgctgtgttctgtgccctggccctgcactgtgccaacatgtaccaccgcatccgccacagcgagtgcatctacagagtgaccatggagaagctgagctaccacagcatctgcaccagcgaggagtggcagggcctgatgcagttcaccctgcctgtgcggctgtgcaaggagattgagctgttccactttgatattggcccctttgagaacatgtggccaggcatctttgtgtacatggtgcacaggagctgtggcaccagctgctttgagctggagaagctgtgccgcttcatcatgtctgtgaagaagaactaccgccgggtgccctaccacaactggaagcatgctgtgacagtggcccactgcatgtatgccatcctgcagaacaaccacaccctcttcacagacctggagaggaagggcctgctgattgcctgcctgtgccacgacctggaccaccggggcttcagcaacagctacctgcagaagtttgaccaccccctggccgccctgtacagcaccagcaccatggagcagcaccacttcagccagacagtgtccatcctgcagctggagggccacaacatcttcagcaccctgagcagcagtgaatatgagcaggtgctggagatcatcaggaaggccatcatcgccacagacctggccctgtactttggaaacaggaagcagctggaggagatgtaccagacaggcagcctgaacctgaacaaccagagccaccgggacagagtcatcggcctgatgatgacagcctgtgacctgtgcagcgtgaccaagctgtggcctgtgaccaagctgacagccaatgacatctatgcagagttctgggccgagggagatgagatgaagaagctgggcatccagcccatccccatgatggaccgggacaagaaggatgaggtgccccagggccagctgggcttctacaatgctgtggccatcccctgctacaccaccctgacccagatcctgcccccaacagagcccctgctgaaggcctgccgggacaacctgagccagtgggagaaggtgatccggggggaggagacagccacctggatcagcagccccagcgtggcccagaaggctgctgccagcgaggactag

SEQ ID NO: 48356 - DNA, 2370 bp, Artificial Sequence
  derived and/or modified sequence
atggaggacggccccagcaacaacgccagctgcttccggcggctgactgaatgctttttgagcccaagcctgacagatgagaaagtcaaagcctacctttccttgcacccacaagttctagacgagttcgtgtctgagagtgtgtcggccgaaactgtggaaaagtggctcaaacgcaagaacaataagtcagaagatgaatctgccccaaaggaggtgagccgctatcaggacacaaacatgcaaggtgtcgtctacgagctaaacagctacatcgaacaacgcctggacactggtggcgataatcagctgctgttgtatgaactgtcctcaatcatcaagatcgctacaaaggccgacggattcgcattatatttcctgggggagtgtaacaactcactctgcatttttactccacctggcatcaaagagggaaagcctaggttaattccggctgggcccattacacaaggtacaactgtgtctgcatacgtggctaaaagccgcaaaacattgctggtggaagatatattaggggatgaacggtttcccaggggaacaggattggagtctggaactagaatacaaagtgttttgtgtctacccattgtgaccgcgatcggcgatctgatcggtattttggagctttatagacactggggtaaagaggccttctgtcttagccaccaagaggttgccactgctaacctggcttgggcctccgttgccatccaccaggtacaagtttgcagagggttggcgaagcagaccgaactcaatgattttttgctggacgtgtctaaaacctactttgataatattgtcgctattgattctctgttggagcacatcatgatctatgcaaaaaatcttgtcaacgccgaccgctgcgccctattccaggtggaccacaagaataaagaactgtattcagacttgtttgacattggcgaggagaaagagggcaagccggtttttaaaaaaactaaggaaatcagattctctatcgaaaagggtatagcaggccaggtcgccaggacaggcgaggtcctgaatatcccggacgcatatgcagatccccggttcaacagggaagtggacttatacaccggatacaccaccagaaatattttgtgcatgccgatcgtgtcgagaggtagcgtaattggcgtcgtgcaaatggtcaacaagatctctggctccgctttttctaaaactgacgagaacaattttaagatgttcgcagtgttttgtgcacttgccctgcactgtgctaacatgtaccatcgtataagacactccgagtgcatatacagggtgacaatggagaaactaagttaccactctatttgcacatccgaagagtggcagggcctcatgcagtttactctgccagtacgactgtgcaaggaaatcgagttattccacttcgacatcggtccattcgaaaacatgtggccaggaatttttgtctacatggtgcatcggagttgcggcacctcgtgttttgagttggagaaactctgcaggttcataatgagtgtaaagaaaaattatcgaagggtgccctatcataactggaaacacgctgtcactgttgcacactgtatgtacgccattctgcagaataaccacacactttttacagatctggagcgaaaaggccttttgattgcttgtctctgccatgatctggaccatcgtggtttttcaaacagctatctgcagaagttcgatcacccactggccgctctgtattccacctcaactatggagcagcaccatttcagtcagacagtgagcatcctgcaacttgaagggcataacattttcagtacactctccagctcagaatatgaacaggttctggagattatccgcaaggctatcatagccacagaccttgccttgtattttgggaatcggaaacaattagaggagatgtatcaaaccggttcccttaacctgaacaatcaaagtcatagggatcgtgtaataggtctgatgatgaccgcatgcgatctttgttcagtgacgaaactgtggccagttaccaaattgaccgcaaatgatatctacgcggaattctgggcagaaggcgacgaaatgaagaagttaggaatccagcccattcccatgatggacagggacaagaaagatgaagttccacaaggccagctgggattctataacgctgtggcgatcccttgttacacaactctgactcaaattctcccgcctaccgagccattattgaaagcctgtcgcgacaatctctcccagtgggaaaaggtcattcggggtgaggaaacggccacttggatatcatccccttccgttgcccagaaagccgctgccagcgaggactag

SEQ ID NO: 48357 - DNA, 2424 bp, Artificial Sequence
  derived and/or modified sequence
cagggcgccagcttcgccctggccgccgccgccgccctgctgttcgggagcgacatggaagatggtccgtctaacaacgcttcctgcttcaggagattgaccgagtgcttcctgtcaccctcactaactgatgaaaaggtcaaggcatacctgtcactgcacccacaggtcttggacgagttcgtgtccgagtccgtttcggctgaaacagtggagaagtggctcaagcggaagaacaacaaaagcgaagatgagagtgctcccaaggaggtttctcgctatcaagacaccaacatgcagggggttgtgtatgaattgaattcctatatcgagcagcgcttggacaccggaggagacaaccagctgcttctctacgagctgtcctctataatcaaaatagcgactaaggctgacggctttgctctgtatttcctgggcgaatgtaacaactccctgtgcattttcaccccccccggcattaaagaaggcaaaccaagactgatccctgcagggccgataactcagggcacaaccgtaagcgcctatgtcgcaaagagtcggaagacgcttttagtcgaagatattctcggagacgaaaggttcccaaggggtacaggactggagtcaggcactaggatccagtccgtgctgtgcctgcccattgtcaccgccattggtgaccttatagggattctcgaactttaccgacactggggaaaggaagcattttgcctctctcaccaggaagtggccaccgctaatcttgcgtgggcctccgtggctatccaccaggtgcaggtgtgtcgcggtttggccaagcaaaccgagctaaacgactttcttctggatgtatccaagacatactttgacaatattgtggctatcgactcactgcttgaacacataatgatatatgcaaagaatctggtaaatgctgaccgctgtgccctgttccaggtggaccacaaaaataaggagctgtattccgatctgttcgatattggtgaggaaaaggagggcaaacccgtttttaagaagacaaaggagatcaggtttagtattgaaaagggtattgccggccaggtggcccgcaccggagaggtgctgaatattcctgacgcatacgcggatccaaggtttaatagagaagtcgacctgtacaccgggtatacaactcgtaatatcctttgtatgcccatcgtgtcaagagggtcggtcattggcgtggtgcagatggtcaacaagatttctggttctgcgttttcaaagaccgacgaaaacaactttaaaatgtttgccgtgttctgtgccctagcgctccactgtgcaaacatgtatcacaggatacgacacagtgaatgtatttatagagttactatggaaaaactatcttaccactcaatttgtacgtccgaagaatggcagggccttatgcagtttactctgccagttagactgtgcaaagagatcgagctgttccatttcgacatcggaccgttcgagaatatgtggccaggtatttttgtgtacatggtgcaccggtcttgtggtacaagctgctttgagctggagaaactgtgccgtttcatcatgtccgttaagaagaactatcgacgggtgccctatcacaactggaaacacgcagtgaccgtggctcactgcatgtatgccatactccagaataatcacactctgttcactgacctcgaacggaaaggtctcttgattgcatgtctgtgccacgacctagaccaccgcggatttagcaactcttacctccagaagttcgatcaccctctggctgcgctgtatagtacttcaactatggagcaacaccatttctctcagacggtgtccattttacagctggagggacacaacatcttctccacgttatcctcatcagaatatgaacaggtcctcgagattattcgaaaagcaatcatcgctacagatctcgcactgtatttcggcaatcggaagcagctggaggagatgtaccagaccggctcactaaatctgaataaccagtcccatcgagacagggttatcggtttgatgatgacagcctgcgatctctgctcagtgacgaaactttggcccgtgaccaaactaaccgccaatgatatttatgctgaattctgggctgagggggacgagatgaaaaaactaggcatacaacccatacccatgatggaccgagacaagaaagacgaagttcctcagggacaactcggcttctataacgcggtcgcgatcccatgctacaccacactgactcagatcctacctcccaccgagccactcctcaaagcgtgtcgggacaacctgagccagtgggagaaagtgatccggggagaggagacagccacttggatcagctcaccctctgtcgcacaaaaggcagccgctagtgaggactag

SEQ ID NO: 48358 - DNA, 2370 bp, Artificial Sequence
  derived and/or modified sequence
atggaagacggcccttcaaataatgcctcatgtttccggagacttaccgagtgtttcctgagcccctccctgaccgacgaaaaggtgaaggcctatctttctctgcaccctcaggtgctggatgagttcgtcagtgagtctgtctctgcagagaccgtagagaaatggctgaaacggaaaaataataagagcgaagatgagagcgccccaaaggaggtatctcgatatcaagacacaaatatgcagggggtggtgtacgaactcaacagctacatcgagcaaagactggacacagggggtgataaccagttgttactctatgaactttcaagcattattaagattgcgactaaagctgacggatttgctctttattttttgggcgagtgcaacaactctctctgcatcttcactcccccagggattaaggaaggcaaaccccgactaataccggcagggccaatcacacagggcaccaccgtgagcgcctatgtcgccaaatcacgtaaaaccctgctcgtggaagatatcttgggtgatgagagatttcctcgcggtactggactggagtcaggaacacgaattcagagcgtgctgtgtttgccaatcgttacggcgatcggtgacttgatcggcatcctcgagctgtatagacactgggggaaagaagcattttgcctgtcacatcaggaggtagctaccgcgaacctcgcatgggccagtgtagctatacatcaggtccaggtgtgtcgtggcctggccaaacaaaccgaactcaacgactttctgctggacgtaagtaaaacctactttgacaacatcgtggcaatagatagcctgttggagcatatcatgatctacgctaagaatcttgttaatgctgatcgctgcgctctttttcaggttgaccataagaacaaggagctctacagtgacctctttgacatcggggaggaaaaggaggggaaacccgtgtttaagaaaacaaaagagatccgcttttctatagagaaaggcatcgccggacaagtggcccgtacgggtgaagttctcaacatccctgacgcttatgcagacccaaggttcaaccgggaagtggacttgtatactggctacactacaaggaacatactgtgtatgccaatagtgagccggggatccgtcataggagtggtgcagatggtgaataaaattagcggatccgcattttctaaaaccgatgaaaacaactttaaaatgttcgctgtattttgcgccctggccctacactgcgctaacatgtatcatcgcatccgtcactccgaatgcatttaccgagtgactatggagaagctgagctaccatagtatttgcacctccgaagagtggcagggattaatgcaatttacattacccgtgagactttgtaaggagattgagctgttccacttcgacattggcccatttgaaaacatgtggcctggtatctttgtgtatatggtgcataggtcctgcggaacctcttgtttcgagctggaaaagctgtgtcggtttatcatgtcagttaaaaaaaattatagacgcgtgccctaccataactggaagcatgccgtgactgtcgcccactgtatgtacgctattctgcagaacaaccatacactcttcacagaccttgagcggaagggacttttgatcgcctgtctgtgtcacgatctggatcaccggggattctccaactcatacctgcagaagttcgaccacccattggcagcgctttatagcacatccactatggagcagcatcacttttcccagaccgtatcgatcctgcagctggagggacacaacatctttagtacattatcaagttcagagtatgagcaagtgctcgagataatcaggaaggccattatcgctactgatcttgccctgtacttcggcaaccgaaaacagttggaagagatgtatcagaccgggtcactgaaccttaacaaccagtcacaccgggacagggttattggactcatgatgaccgcttgtgatctgtgttcagtgaccaagctttggccagtgacaaagctcaccgccaacgacatctatgctgaattctgggcagaaggcgatgagatgaagaagctagggatccagcctattcccatgatggatcgcgataaaaaagacgaggtaccccaaggccaactcggattctataacgccgttgccataccctgttatacaactctcacccagatcctgccaccaactgagccactgcttaaagcttgtcgcgataacctgtcacagtgggaaaaagttataagaggcgaggaaacggcaacatggataagttcaccaagcgtcgctcagaaagcggctgcctccgaggactag

SEQ ID NO: 48359 - DNA, 2424 bp, Artificial Sequence
  derived and/or modified sequence
cagggggctagcttcgccctcgccgctgcagcagccctgctgttcgggtctgatatggaggacggcccaagcaacaatgcttcctgtttccgcagactcactgaatgctttttaagccctagtctgacagacgagaaggtgaaggcctacctgagccttcacccacaggtgctggacgaatttgtgagcgaaagtgtgagcgctgaaaccgtcgagaagtggttaaagcggaagaacaacaaatccgaggacgaaagcgccccaaaagaggtatctagataccaggataccaatatgcagggggtcgtatatgagcttaactcgtatatcgagcagaggctggacactggtggggataaccagctgctgctctacgagctcagtagcattatcaagatcgccactaaagctgacggatttgccctgtactttttaggggaatgcaataatagcctatgtatattcactccaccgggaataaaggagggaaaacctcgcctgatacctgctgggcctatcacgcaagggaccacggtgtccgcatacgtagccaagagccgaaaaaccttgctagtggaggatatcctgggcgatgagcgcttccccaggggcaccggcctggaaagcggcacaaggatccagagcgtgttgtgcctgccgatcgttactgctatcggggacctgataggcatcctggagctgtacaggcattggggtaaagaggctttctgcctgagccaccaagaggtagccactgccaacttagcctgggcatccgtcgcaattcaccaagtgcaggtgtgccgcggactggcaaagcagactgaactgaatgatttcctgctggatgtatccaagacatatttcgataatatcgtggccattgacagtttgctggagcacattatgatttatgccaaaaacctggtaaatgccgatcggtgtgctctgtttcaggtcgaccataaaaacaaggagctgtatagcgacttgtttgatatcggcgaggaaaaggaggggaaacccgtctttaaaaagactaaggagatccgatttagtattgagaaggggattgccggtcaagtagctaggacaggagaggtgctgaatatccccgatgcatacgccgacccgaggttcaacagggaggtggatttgtacacggggtatactacaagaaacatcctgtgcatgcccatagttagtcggggatctgtcatcggggtggtgcagatggtgaacaaaattagcggatccgctttttctaagacagatgagaacaatttcaagatgttcgcagtgttctgtgctttagccctgcattgtgccaacatgtaccaccggattcggcattccgagtgcatttacagggtcacgatggagaaattgagctatcatagcatctgcacgtctgaagagtggcagggacttatgcagttcaccttgcccgtccggctgtgcaaggaaattgaactgtttcatttcgatataggacctttcgaaaacatgtggcccggaatcttcgtctacatggttcatcggagctgtggcactagctgcttcgaattggagaaactatgcaggtttatcatgtcggtgaagaaaaactatcgccgagtcccctatcacaactggaaacatgccgtcaccgttgcccactgcatgtatgcgatccttcaaaataatcataccctcttcaccgaccttgagagaaaggggttgctgatcgcatgcctgtgccacgatctcgatcatcgagggttcagcaacagctatctccaaaagtttgatcaccccctcgccgcactctactccacaagcacaatggagcagcaccactttagtcagacagtgtccatccttcagctcgagggtcataacattttttccaccctcagctcctccgaatatgaacaggtgcttgaaatcatcaggaaggctatcatcgccaccgacctggccctgtatttcggcaataggaaacagctggaagaaatgtaccagacaggctccctgaatttgaacaatcagtctcatagggaccgggttatcggtctgatgatgacagcctgtgatttgtgcagcgtgaccaagctgtggcccgtcaccaaattgactgcaaacgacatctacgcggaattttgggcagagggcgacgagatgaaaaaattgggcatccagcctattccaatgatggatagagacaaaaaagatgaggtgccacagggtcagctcggcttctataacgcagtggccataccttgctacactacactgactcagatcctcccccctaccgagcctctgctcaaagcgtgccgcgacaacctttctcaatgggagaaagttataagaggtgaagagacagccacatggatctccagcccttctgtcgcacagaaagcggctgccagcgaggactag

SEQ ID NO: 48360 - protein, 511 aa, Artificial Sequence
  derived and/or modified sequence
MSEPKAIDPKLSTTDRVVKAVPFPPSHRLTAKEVFDNDGKPRVDILKAHLMKEGRLEESVALRIITEGASILRQEKNLLDIDAPVTVCGDIHGQFFDLMKLFEVGGSPANTRYLFLGDYVDRGYFSIECVLYLWALKILYPKTLFLLRGNHECRHLTEYFTFKQECKIKYSERVYDACMDAFDCLPLAALMNQQFLCVHGGLSPEINTLDDIRKLDRFKEPPAYGPMCDILWSDPLEDFGNEKTQEHFTHNTVRGCSYFYSYPAVCEFLQHNNLLSILRAHEAQDAGYRMYRKSQTTGFPSLITIFSAPNYLDVYNNKAAVLKYENNVMNIRQFNCSPHPYWLPNFMDVFTWSLPFVGEKVTEMLVNVLNICSDDELGSEEDGFDGATAAARKEVIRNKIRAIGKMARVFSVLREESESVLTLKGLTPTGMLPSGVLSGGKQTLQSAIKGFSPQHKITSFEEAKGLDRINERMPPRRDAMPSDANLNSINKALTSETNGTDSNGSNSSNIQ

SEQ ID NO: 48361 - DNA, 1536 bp, Artificial Sequence
  derived and/or modified sequence
atgagcgagcccaaggccatcgaccccaagctgagcaccaccgacagagtggtgaaggccgtgcccttcccccccagccacagactgaccgccaaggaggtgttcgacaacgacggcaagcccagagtggacatcctgaaggcccacctgatgaaggagggcagactggaggagagcgtggccctgagaatcatcaccgagggcgccagcatcctgagacaggagaagaacctgctggacatcgacgcccccgtgaccgtgtgcggcgacatccacggccagttcttcgacctgatgaagctgttcgaggtgggcggcagccccgccaacaccagatacctgttcctgggcgactacgtggacagaggctacttcagcatcgagtgcgtgctgtacctgtgggccctgaagatcctgtaccccaagaccctgttcctgctgagaggcaaccacgagtgcagacacctgaccgagtacttcaccttcaagcaggagtgcaagatcaagtacagcgagagagtgtacgacgcctgcatggacgccttcgactgcctgcccctggccgccctgatgaaccagcagttcctgtgcgtgcacggcggcctgagccccgagatcaacaccctggacgacatcagaaagctggacagattcaaggagccccccgcctacggccccatgtgcgacatcctgtggagcgaccccctggaggacttcggcaacgagaagacccaggagcacttcacccacaacaccgtgagaggctgcagctacttctacagctaccccgccgtgtgcgagttcctgcagcacaacaacctgctgagcatcctgagagcccacgaggcccaggacgccggctacagaatgtacagaaagagccagaccaccggcttccccagcctgatcaccatcttcagcgcccccaactacctggacgtgtacaacaacaaggccgccgtgctgaagtacgagaacaacgtgatgaacatcagacagttcaactgcagcccccacccctactggctgcccaacttcatggacgtgttcacctggagcctgcccttcgtgggcgagaaggtgaccgagatgctggtgaacgtgctgaacatctgcagcgacgacgagctgggcagcgaggaggacggcttcgacggcgccaccgccgccgccagaaaggaggtgatcagaaacaagatcagagccatcggcaagatggccagagtgttcagcgtgctgagagaggagagcgagagcgtgctgaccctgaagggcctgacccccaccggcatgctgcccagcggcgtgctgagcggcggcaagcagaccctgcagagcgccatcaagggcttcagcccccagcacaagatcaccagcttcgaggaggccaagggcctggacagaatcaacgagagaatgccccccagaagagacgccatgcccagcgacgccaacctgaacagcatcaacaaggccctgaccagcgagaccaacggcaccgacagcaacggcagcaacagcagcaacatccagtag

SEQ ID NO: 48362 - DNA, 1536 bp, Artificial Sequence
  derived and/or modified sequence
atgtctgaaccaaaagccatcgatcccaagctatctaccacagaccgtgtggtaaaggctgttcccttcccccctagtcatagactcaccgccaaagaggtcttcgataatgatgggaagccacgagtggatattttgaaggcacacctgatgaaagaagggcgcctcgaagaaagcgtggcgctgaggataattactgaaggtgcgtctatcttacgacaggagaaaaacttgctggacatcgacgcaccagtcaccgtgtgtggtgacattcacggtcagttcttcgatctaatgaagctttttgaggtgggggggagtcccgctaatacccgctatctctttttgggggactacgtcgaccgcggctacttctccatcgaatgtgtactgtatctgtgggccctgaagatcctgtacccaaaaactctctttctcctcagaggtaatcacgagtgtaggcatttgacagagtacttcaccttcaagcaagagtgcaagattaagtattcagagcgagtttatgatgcctgcatggacgcgttcgattgcctgcctcttgcagcactgatgaatcaacaatttctatgtgtgcacggcggactttccccagaaattaataccctggacgacatacgtaagctggaccggttcaaagagcctcctgcatatgggcctatgtgcgacattctgtggtctgacccactggaggacttcggtaacgagaaaactcaggaacacttcacacacaacacggtgagaggctgctcctacttttattcgtatcccgctgtctgcgagtttttacaacataacaatctgctcagcatcctcagagcacatgaagcacaagatgctgggtatcggatgtaccggaagtctcagacaaccgggttcccctcgctcatcacaatcttttctgccccaaattatttggacgtttacaacaacaaagccgctgtgctaaaatatgagaataacgtcatgaacatcaggcagttcaattgctcaccccacccttattggttgcccaacttcatggacgtgttcacctggtctctgccattcgtgggcgagaaggtgacagaaatgcttgtgaacgtgcttaatatctgttctgatgatgagctaggaagcgaggaagacggctttgacggcgctactgctgccgccagaaaggaggtgatacgtaataagattagagcaatcggcaagatggcacgagttttcagcgtactgcgggaagaatccgaatccgtgctcactctcaagggattgacacccacggggatgttgccctccggtgttctctccggaggcaagcagacattgcaaagcgcaatcaagggattttcaccccaacacaaaatcacttctttcgaagaggccaaaggtctggacagaatcaacgagagaatgcctccaagacgcgacgccatgcctagtgacgccaatctgaattctattaataaagccttgacttctgaaacaaacggcaccgactccaatggttcaaactctagcaacattcagtag

SEQ ID NO: 48363 - DNA, 1536 bp, Artificial Sequence
  derived and/or modified sequence
atgtctgagcccaaggccatcgaccccaagctgagcaccacagacagagtggtgaaggctgtgcccttcccccccagccaccggctgacagccaaggaggtgtttgacaatgatggcaagccccgggtggacatcctgaaggcccacctgatgaaggagggccgcctggaggagagcgtggccctgcgcatcatcacagagggcgccagcatcctgcggcaggagaagaacctgctggacattgatgcccctgtgacagtgtgtggggacatccacggccagttctttgacctgatgaagctgtttgaggtgggcggcagccctgccaacacccgctacctgttcctgggggactatgtggaccggggctacttcagcattgaatgtgtgctgtacctgtgggccctgaagatcctgtaccccaagaccctcttcctgctgcggggcaaccacgagtgccgccacctgacagagtacttcaccttcaagcaggagtgcaagatcaagtacagcgagcgggtgtatgatgcctgcatggatgcctttgactgcctgcccctggccgccctgatgaaccagcagttcctgtgtgtgcatggaggcctgagccctgagatcaacaccctggatgacatcaggaagctggaccgcttcaaggagcccccagcctacggccccatgtgtgacatcctgtggagcgaccccctggaggactttggaaatgagaagacccaggagcacttcacccacaacacagtgcggggctgcagctacttctacagctacccagctgtgtgtgagttcctgcagcacaacaacctgctgagcatcctgcgggcccacgaggcccaggatgctggctacaggatgtacaggaagagccagaccaccggcttccccagcctcatcaccatcttcagcgcccccaactacctggatgtgtacaacaacaaggctgctgtgctgaagtatgaaaataatgtgatgaacatccggcagttcaactgcagcccccacccctactggctgcccaacttcatggatgtgttcacctggagcctgccctttgtgggggagaaggtgacagagatgctggtgaatgtgctgaacatctgcagtgatgatgagctgggctctgaagaagatggctttgatggagccacagctgctgccaggaaggaggtgatccggaacaagatccgggccatcggcaagatggcccgggtcttctctgtgctgcgggaggagagcgagagcgtgctgaccctgaagggcctgacccccaccggcatgctgcccagcggcgtgctgagcggcggcaagcagaccctgcagagcgccatcaagggcttcagcccccagcacaagatcaccagctttgaggaggccaagggcctggaccgcatcaatgaaagaatgccacccaggagagatgccatgcccagtgatgccaacctgaacagcatcaacaaggccctgaccagcgagaccaacggcacagacagcaatggcagcaacagcagcaacatccagtag

SEQ ID NO: 48364 - DNA, 1536 bp, Artificial Sequence
  derived and/or modified sequence
atgagcgagcccaaggccatcgaccccaagctgagcaccaccgacagggtggtcaaagctgtgcccttccccccgtctcatagacttacggccaaggaagtattcgataatgacggaaaacctagagtagatattctcaaggcacatttgatgaaggagggcagattggaggagtccgtcgccctgcgtattattacagagggagccagcattctcagacaggaaaagaatctcctagacatcgatgcccccgtgactgtctgcggggatattcatgggcagtttttcgacctcatgaaacttttcgaggtcggtggcagtccagcaaatactcgctacctattcctgggggattacgtggacagaggttatttctctatcgagtgcgtgctgtatctctgggccctcaagatcttgtaccctaagaccctcttcctgctgagaggcaaccatgagtgcaggcacctcaccgaatatttcacctttaagcaggagtgtaaaatcaagtactccgaaagagtgtacgacgcttgtatggacgccttcgactgcctgcccttagctgctctgatgaatcagcagttcctgtgtgttcacgggggactgtctcccgagatcaacacgctagatgacatccgcaagctggaccgcttcaaagagccacccgcctatggccctatgtgcgatatcctgtggtcagaccctctggaggacttcggaaatgaaaagacacaagaacacttcacacacaatactgttagagggtgctcttacttttactcctacccggctgtatgcgagtttctgcagcataataacttactatccattctgcgcgcccatgaggcccaagatgcagggtaccgtatgtatcggaagtcgcagaccacaggattcccaagcctgatcacaattttttccgccccaaattatctggatgtctataacaacaaggccgcagtactcaagtacgaaaacaacgtgatgaacatccgccaattcaattgttctccgcatccatactggctgcctaatttcatggatgtgtttacttggagcctccctttcgtgggagaaaaggtgaccgaaatgctggtcaatgtgctgaatatatgctcagacgacgagcttgggagcgaggaggacggtttcgacggagccaccgccgctgcccgcaaagaggtgataaggaataaaatacgtgccataggaaagatggccagggtgtttagcgtgctgcgggaggaatccgaaagtgtccttacgctgaaggggctaacccccacaggcatgctgccctccggggtcctcagtggaggcaaacagacactgcagtctgccataaagggattctcaccccaacataagatcacatctttcgaagaagctaaaggactagaccgcattaatgaacgcatgccgccaaggagggacgctatgccaagcgacgcgaatttaaacagcatcaacaaggctctcacaagtgagaccaacgggacagactccaacggcagcaatagctcgaacatccagtag

SEQ ID NO: 48365 - DNA, 1536 bp, Artificial Sequence
  derived and/or modified sequence
atgtccgaacccaaagccattgaccctaaactgagtacgactgatagggtcgtcaaggcggtgccctttcccccaagccaccgtcttacagcaaaagaggtgttcgacaatgatggaaagcctagagtcgatatcctaaaggctcacctcatgaaggagggcagactcgaggagtcggtagctctgagaattatcacagagggcgcatctatattacggcaagaaaaaaatctgctggatatcgatgccccagtaacggtctgcggcgacatacatggccagttcttcgatctgatgaagttgttcgaagtgggtggctcacccgctaacacgaggtacctcttcctcggtgactatgttgatagggggtacttctctatcgagtgtgtcctctacttgtgggctctgaagatcctctacccgaaaacactgtttttgctgaggggaaatcatgaatgccggcatttgaccgagtactttacattcaaacaggagtgcaagataaagtattccgaaagagtctacgacgcgtgcatggacgcttttgactgccttccacttgccgctcttatgaaccaacagtttctgtgtgtccatggagggctgagccccgaaatcaatactcttgacgatataaggaagctcgaccggtttaaagagcctcctgcctacggacccatgtgtgacatcttatggagcgaccccctcgaggactttggcaatgagaagacccaggaacactttacacataataccgtgcggggatgctcttatttctatagctacccagctgtgtgtgaattcctccagcataataatttgctatccatcctgcgcgcacatgaggcccaggacgcagggtatagaatgtatagaaaaagtcagactacaggttttccctcgctaatcaccatttttagcgcacccaactatttagatgtgtacaataacaaagctgccgtcctgaagtacgagaacaatgtgatgaacatcaggcagttcaattgttcgccacatccctattggctgccaaactttatggacgtgtttacttggtctctgccttttgtgggagagaaagttacagaaatgctggttaatgttctgaatatctgcagcgacgatgagcttggatcagaagaagatggcttcgatggagccactgcggcagccaggaaggaggtgattcgaaataagattagggccatcgggaagatggccagagtgttcagtgtgctgagagaagagtccgaatccgtgctcaccctgaagggactgacacccacagggatgttaccaagcggcgttctctctggcggaaagcagacactgcagagtgctattaagggattcagcccgcagcacaaaatcaccagctttgaggaagcaaagggattagaccgaattaatgagcgcatgcccccaagaagagatgccatgcctagtgacgcaaacctgaattccatcaataaagccctaacgagtgaaacaaacggcactgatagcaatggatccaattcttccaacattcagtag

SEQ ID NO: 48366 - DNA, 3604 bp, Artificial Sequence
  derived and/or modified sequence
agcagcggcggccgcctctccgccgccggggacgccaaggtgcggctggtggcactgacatcggcggccctgcctctcctccctcgcccccggccttccccatgtgatcggtcttaatcctggccgtgtgtgcgcgcgtggggctccattccgcggtgctgggtctccgtgccggggtgggtgctcgtgtgtgcgcttctcctccccatcccccttcccccaagaataaaagaagaaccgggaggcgtgctcagaaaataaataaataaccaccacacacgcgcagcccggagcgagtcggcggggctggcggcagcggcggaggaggagtgaaggcggcggcggcggaggagggacgcgcggaaaaggcagcaactttaaagccagctcagagcctagacctccagccgagcggtttgcagcgcggcggcggcggcggcggcggcggcgttgagtgtctggcccgccggtccggtcggggtgtgcagtcggacggacgagcagcgcgtcgctgtcctccggcagctggagatgtccgagcccaaggcaattgatcccaagttgtcgacgaccgacagggtggtgaaagctgttccatttcctccaagtcaccggcttacagcaaaagaagtgtttgataatgatggaaaacctcgtgtggatatcttaaaggcgcatcttatgaaggagggaaggctggaagagagtgttgcattgagaataataacagagggtgcatcaattcttcgacaggaaaaaaatttgctggatattgatgcgccagtcactgtttgtggggacattcatggacaattctttgatttgatgaagctctttgaagtcgggggatctcctgccaacactcgctacctcttcttaggggactatgttgacagagggtacttcagtattgaatgtgtgctgtatttgtgggccttgaaaattctctaccccaaaacactgtttttacttcgtggaaatcatgaatgtagacatctaacagagtatttcacatttaaacaagaatgtaaaataaagtattcagaacgcgtatatgatgcctgtatggatgcctttgactgccttcccctggctgccctgatgaaccaacagttcctgtgtgtgcatggtggtttgtctccagagattaacactttagatgatatcagaaaattagaccgattcaaagaaccacctgcatatggacctatgtgtgatatcctgtggtcagaccccctggaagattttggaaatgagaagactcaggaacatttcactcacaacacagtcagggggtgttcatacttctacagttacccggctgtatgtgaattcttacagcacaataacttgttatctatactccgagcccacgaagcccaagatgcagggtaccgcatgtacaggaaaagccaaacaacaggcttcccttctctaattacaattttttcagcaccaaattacttagatgtatacaataacaaagctgcagtattgaagtatgagaacaatgttatgaatatcaggcaattcaactgttctcctcatccatactggcttccaaatttcatggatgtttttacttggtcccttccatttgttggggaaaaagtgactgagatgctggtaaatgtcctcaacatctgctcagatgatgaactagggtcagaagaagatggatttgatggtgcaacagctgcagcccggaaagaggtgataaggaacaagatccgagcaataggcaaaatggccagagtgttctcagtgctcagagaagagagtgagagtgtgctgacgctgaaaggcttgaccccaactggcatgctccccagcggagtactttctggagggaagcaaaccctgcaaagcgctatcaaaggattttcaccacaacataagatcactagcttcgaggaagccaagggcttagaccgaattaatgagaggatgccgcctcgcagagatgccatgccctctgacgccaaccttaactccatcaacaaggctctcacctcagagactaacggcacggacagcaatggcagtaatagcagcaatattcagtgaccacttcctgttcactttttttttttttttttttttttttttttgagctgcggggcatgatggggattgctgcatatcagcagttggatgttcttgcctctgacagtagcttatttgctctgggggccaggaattggattcagtttacactatcattaaaaaagagggagagagataataaactatattttggtggggatggtgattaaacacctcttttgggtatgccttttaaaaatgcttatagagaaaaaaaattttaaaaagaaagctaatgctagtatatactgcaatgttaggggaatgaacatgttttcctactgcattggggacttctagataggttaatgaaaggccttttattctgttactggacatgaaaactttgtctaatttcttactctattgtacgtttacagtcgcagcactaaaaatggatgacatcaaacatttttaacaaaatgatgtacaaactaaggactatttattgataatgttttgctactcttgtcagacaatggctataaactgaattaggcagtcttaaaaaaaaaaaaaaacagaaaaagaaaaaaaagaacgttgcaaatttgttaaaatgccaaaaaggacagtttaattttgtacagattatgcttacctcaggtttctttagtgtgcttgaatgcccttctttccatataacacttatcttcttcttaattcggcaatggaatatcttttaagttttaaaaaaactggaataattatatctatcttttttgccgtttatatttaggggtttttgttgataaaatcaagtcttggttgtggcttgctgaattaaatatttatgagtggtgcatttttaagtatagtgaacaagacaccatattaagtacagtgataaagcatctatattctgtaaaaaaaaaaaaaatctgcctatgcatgttttttaagaaaaaaaaaatggctgtatcggcctgtatgggactgtaatgcgcttagtggtctgacatatactggaaatgtatgtatactggcgtactttatattctctaaaatgcttaatgcctttgaaattttgtaatcaaaaaaaagctttgaaaaaatctaaaggggagagtattctttaaagtttttaacataagcttgtcaatgcacatgtagatggttagcatgtttagcaaaccttgtgaaattataataagtttgtagttacatgtgaaactctaaatgcatggcaactgttaatgtcataacagtttagttattttgttctgttctgtcatgtgccacaaaatatgtacttttttcacttttttccctttgtatatcagttacgggttacaactggttcattctgaaaacaacaacaacaaaagtccattcatattttttaacaattgtataagtgcccaagtaattcactacagcctaaagccttgcctttgtaatttgacttctgacatgttggcaatcaaagcatgcacttgtaacaatgaaaaagaaaaagcattttatattactactcaataaaatgtgcatgaactta

SEQ ID NO: 48367 - protein, 469 aa, Artificial Sequence
  derived and/or modified sequence
MSEPKAIDPKLSTTDRVVKAVPFPPSHRLTAKEVFDNDGKPRVDILKAHLMKEGRLEESVALRIITEGASILRQEKNLLDIDAPVTVCGDIHGQFFDLMKLFEVGGSPANTRYLFLGDYVDRGYFSIECVLYLWALKILYPKTLFLLRGNHECRHLTEYFTFKQECKIKYSERVYDACMDAFDCLPLAALMNQQFLCVHGGLSPEINTLDDIRKLDRFKEPPAYGPMCDILWSDPLEDFGNEKTQEHFTHNTVRGCSYFYSYPAVCEFLQHNNLLSILRAHEAQDAGYRMYRKSQTTGFPSLITIFSAPNYLDVYNNKVTEMLVNVLNICSDDELGSEEDGFDGATAAARKEVIRNKIRAIGKMARVFSVLREESESVLTLKGLTPTGMLPSGVLSGGKQTLQSAIKGFSPQHKITSFEEAKGLDRINERMPPRRDAMPSDANLNSINKALTSETNGTDSNGSNSSNIQ

SEQ ID NO: 48368 - protein, 147 aa, Artificial Sequence
  derived and/or modified sequence
MKEGRLEESVALRIITEGASILRQEKNLLDIDAPVTVCGDIHGQFFDLMKLFEVGGSPANTRYLFLGDYVDRGYFSIECVLYLWALKILYPKTLFLLRGNHECRHLTEYFTFKQECKIKYSERVYDACMDAFDCLPLAALMNQQFLC

SEQ ID NO: 48369 - DNA, 1410 bp, Artificial Sequence
  derived and/or modified sequence
atgagcgagcccaaggccatcgaccccaagctgagcaccaccgacagagtggtgaaggccgtgcccttcccccccagccacagactgaccgccaaggaggtgttcgacaacgacggcaagcccagagtggacatcctgaaggcccacctgatgaaggagggcagactggaggagagcgtggccctgagaatcatcaccgagggcgccagcatcctgagacaggagaagaacctgctggacatcgacgcccccgtgaccgtgtgcggcgacatccacggccagttcttcgacctgatgaagctgttcgaggtgggcggcagccccgccaacaccagatacctgttcctgggcgactacgtggacagaggctacttcagcatcgagtgcgtgctgtacctgtgggccctgaagatcctgtaccccaagaccctgttcctgctgagaggcaaccacgagtgcagacacctgaccgagtacttcaccttcaagcaggagtgcaagatcaagtacagcgagagagtgtacgacgcctgcatggacgccttcgactgcctgcccctggccgccctgatgaaccagcagttcctgtgcgtgcacggcggcctgagccccgagatcaacaccctggacgacatcagaaagctggacagattcaaggagccccccgcctacggccccatgtgcgacatcctgtggagcgaccccctggaggacttcggcaacgagaagacccaggagcacttcacccacaacaccgtgagaggctgcagctacttctacagctaccccgccgtgtgcgagttcctgcagcacaacaacctgctgagcatcctgagagcccacgaggcccaggacgccggctacagaatgtacagaaagagccagaccaccggcttccccagcctgatcaccatcttcagcgcccccaactacctggacgtgtacaacaacaaggtgaccgagatgctggtgaacgtgctgaacatctgcagcgacgacgagctgggcagcgaggaggacggcttcgacggcgccaccgccgccgccagaaaggaggtgatcagaaacaagatcagagccatcggcaagatggccagagtgttcagcgtgctgagagaggagagcgagagcgtgctgaccctgaagggcctgacccccaccggcatgctgcccagcggcgtgctgagcggcggcaagcagaccctgcagagcgccatcaagggcttcagcccccagcacaagatcaccagcttcgaggaggccaagggcctggacagaatcaacgagagaatgccccccagaagagacgccatgcccagcgacgccaacctgaacagcatcaacaaggccctgaccagcgagaccaacggcaccgacagcaacggcagcaacagcagcaacatccagtag

SEQ ID NO: 48370 - DNA, 399 bp, Artificial Sequence
  derived and/or modified sequence
atgaaggagggcagactggaggagagcgtggccctgagaatcatcaccgagggcgccagcatcctgagacaggagaagaacctgctggacatcgacgcccccgtgaccgtgtgcggcgacatccacggccagttcttcgacctgatgaagctgttcgaggtgggcggcagccccgccaacaccagatacctgttcctgggcgactacgtggacagaggctacttcagcatcgagtgcgtgctgtacctgtgggccctgaagatcctgtaccccaagaccctgttcctgctgagaggcaaccacgagtgcagacacctgaccgagtacttcaccttcaagcaggagtgcaagatcaagtacagcgagagagtgtacgacgcctgcatggacgccttctag

SEQ ID NO: 48371 - DNA, 444 bp, Artificial Sequence
  derived and/or modified sequence
atgaaggagggcagactggaggagagcgtggccctgagaatcatcaccgagggcgccagcatcctgagacaggagaagaacctgctggacatcgacgcccccgtgaccgtgtgcggcgacatccacggccagttcttcgacctgatgaagctgttcgaggtgggcggcagccccgccaacaccagatacctgttcctgggcgactacgtggacagaggctacttcagcatcgagtgcgtgctgtacctgtgggccctgaagatcctgtaccccaagaccctgttcctgctgagaggcaaccacgagtgcagacacctgaccgagtacttcaccttcaagcaggagtgcaagatcaagtacagcgagagagtgtacgacgcctgcatggacgccttcgactgcctgcccctggccgccctgatgaaccagcagttcctgtgctag

SEQ ID NO: 48372 - DNA, 1410 bp, Artificial Sequence
  derived and/or modified sequence
atgagcgaacccaaggcaattgatccaaaactttcaaccacggatcgagtggtcaaggccgttccctttcccccatcccaccgtctgaccgccaaggaggtctttgataacgacggcaagccccgtgtcgatatattgaaagcccatttaatgaaggaaggtcggctcgaggagtccgtagcgctgaggattatcacggagggagcatctatattgaggcaggagaagaacctgctcgacattgacgctccggtcacagtatgtggggacattcacggtcaattttttgacctcatgaagctctttgaagttggagggtcccccgctaatacacgttacctgttcttgggcgactatgtggaccggggctatttttctattgagtgcgtgttatacctgtgggccctgaaaatattatatccaaaaacactgtttctactaagaggtaaccatgagtgcaggcacctgaccgaatactttacgtttaagcaggaatgcaaaatcaaatattccgagagggtgtatgacgcctgtatggacgctttcgattgtctgccattggctgctctgatgaaccaacagtttctgtgtgtccatggaggcttatctccggaaatcaataccctagatgacatccgcaaactcgaccggttcaaagagccaccagcgtacggcccaatgtgcgatattctgtggtctgaccctttggaagacttcggcaatgaaaaaacacaggaacattttactcacaatacagtaagggggtgttcttacttttatagctatcctgccgtttgcgagtttcttcagcacaacaacctcctgtctatcttgcgagcgcatgaggcccaggacgcaggttatagaatgtatcgcaagtctcagaccactgggtttccctctctgatcaccatcttttccgcacccaattacttggatgtgtacaacaacaaggttacggagatgcttgtcaacgtgctgaatatctgtagcgacgatgagttgggatccgaagaggacggatttgacggcgctaccgccgccgcacgcaaggaggtgattaggaacaaaataagggcgatcggcaagatggcacgcgtcttttcggttctgcgcgaggagtccgagtcagtgttgaccctcaaggggctgacgccgactggcatgctgccaagtggcgtcctttcgggcggaaaacagactttgcagtctgcaattaaaggattctcaccccagcacaaaatcacttctttcgaagaggccaaaggactggaccggatcaacgaacgcatgcctcctagaagggacgccatgccctcggatgccaaccttaactccatcaacaaagcccttacctcggaaaccaatggtactgacagcaacggtagtaactcctctaatatccagtag

SEQ ID NO: 48373 - DNA, 399 bp, Artificial Sequence
  derived and/or modified sequence
atgaaagaagggaggctggaggagtctgttgcacttcggatcattacagagggtgcttcaattcttaggcaggagaagaacttgctagacattgacgcgcctgtgaccgtatgcggggatatccatggccagttttttgatctgatgaagcttttcgaggttggcggttcaccggccaatacacgctatctctttctaggcgactacgtagacaggggatatttttcaatagagtgtgttctgtacctgtgggccttaaagatcttataccctaaaactctgttcctactaaggggcaaccacgaatgtaggcacctgacagagtacttcacatttaaacaagagtgtaagatcaaatactccgaacgagtatacgacgcttgcatggatgccttctag

SEQ ID NO: 48374 - DNA, 444 bp, Artificial Sequence
  derived and/or modified sequence
atgaaagaagggcgtttagaggagagcgtggctctccggatcattacagaaggggccagcatcttaagacaagaaaagaacctgctagatatagacgcaccagtgactgtttgcggcgatattcatggacaatttttcgacctcatgaagctgttcgaggtcgggggcagccctgccaatacgcggtaccttttcttaggcgactacgttgacaggggatacttttccatcgaatgtgtgttgtacctgtgggccttgaagatactctacccaaagactctcttcctgctcagaggaaaccacgaatgccggcatctgactgagtactttaccttcaagcaggagtgcaaaataaagtactcagaaagggtttatgacgcctgcatggatgccttcgattgcctgccactagcagcccttatgaaccagcagttcctgtgctag

SEQ ID NO: 48375 - DNA, 1410 bp, Artificial Sequence
  derived and/or modified sequence
atgtctgagcccaaggccatcgaccccaagctgagcaccacagacagagtggtgaaggctgtgcccttcccccccagccaccggctgacagccaaggaggtgtttgacaatgatggcaagccccgggtggacatcctgaaggcccacctgatgaaggagggccgcctggaggagagcgtggccctgcgcatcatcacagagggcgccagcatcctgcggcaggagaagaacctgctggacattgatgcccctgtgacagtgtgtggggacatccacggccagttctttgacctgatgaagctgtttgaggtgggcggcagccctgccaacacccgctacctgttcctgggggactatgtggaccggggctacttcagcattgaatgtgtgctgtacctgtgggccctgaagatcctgtaccccaagaccctcttcctgctgcggggcaaccacgagtgccgccacctgacagagtacttcaccttcaagcaggagtgcaagatcaagtacagcgagcgggtgtatgatgcctgcatggatgcctttgactgcctgcccctggccgccctgatgaaccagcagttcctgtgtgtgcatggaggcctgagccctgagatcaacaccctggatgacatcaggaagctggaccgcttcaaggagcccccagcctacggccccatgtgtgacatcctgtggagcgaccccctggaggactttggaaatgagaagacccaggagcacttcacccacaacacagtgcggggctgcagctacttctacagctacccagctgtgtgtgagttcctgcagcacaacaacctgctgagcatcctgcgggcccacgaggcccaggatgctggctacaggatgtacaggaagagccagaccaccggcttccccagcctcatcaccatcttcagcgcccccaactacctggatgtgtacaacaacaaggtgacagagatgctggtgaatgtgctgaacatctgcagtgatgatgagctgggctctgaagaagatggctttgatggagccacagctgctgccaggaaggaggtgatccggaacaagatccgggccatcggcaagatggcccgggtcttctctgtgctgcgggaggagagcgagagcgtgctgaccctgaagggcctgacccccaccggcatgctgcccagcggcgtgctgagcggcggcaagcagaccctgcagagcgccatcaagggcttcagcccccagcacaagatcaccagctttgaggaggccaagggcctggaccgcatcaatgaaagaatgccacccaggagagatgccatgcccagtgatgccaacctgaacagcatcaacaaggccctgaccagcgagaccaacggcacagacagcaatggcagcaacagcagcaacatccagtag

SEQ ID NO: 48376 - DNA, 399 bp, Artificial Sequence
  derived and/or modified sequence
atgaaggagggccgcctggaggagagcgtggccctgcgcatcatcacagagggcgccagcatcctgcggcaggagaagaacctgctggacattgatgcccctgtgacagtgtgtggggacatccacggccagttctttgacctgatgaagctgtttgaggtgggcggcagccctgccaacacccgctacctgttcctgggggactatgtggaccggggctacttcagcattgaatgtgtgctgtacctgtgggccctgaagatcctgtaccccaagaccctcttcctgctgcggggcaaccacgagtgccgccacctgacagagtacttcaccttcaagcaggagtgcaagatcaagtacagcgagcgggtgtatgatgcctgcatggatgccttctag

SEQ ID NO: 48377 - DNA, 444 bp, Artificial Sequence
  derived and/or modified sequence
atgaaggagggccgcctggaggagagcgtggccctgcgcatcatcacagagggcgccagcatcctgcggcaggagaagaacctgctggacattgatgcccctgtgacagtgtgtggggacatccacggccagttctttgacctgatgaagctgtttgaggtgggcggcagccctgccaacacccgctacctgttcctgggggactatgtggaccggggctacttcagcattgaatgtgtgctgtacctgtgggccctgaagatcctgtaccccaagaccctcttcctgctgcggggcaaccacgagtgccgccacctgacagagtacttcaccttcaagcaggagtgcaagatcaagtacagcgagcgggtgtatgatgcctgcatggatgcctttgactgcctgcccctggccgccctgatgaaccagcagttcctgtgctag

SEQ ID NO: 48378 - DNA, 1410 bp, Artificial Sequence
  derived and/or modified sequence
atgagcgagcccaaggccatcgaccccaagctgagcaccaccgacagagttgtgaaagctgtaccatttcccccatcacaccgcctcactgctaaggaagtgtttgataatgatggaaaaccccgagttgacattcttaaagcacacttaatgaaggagggtcgcctcgaggaatctgtagcgctgaggatcatcacagagggagcgtcaatcctgcggcaggaaaaaaatctgctcgacatagatgctccggtcacagtatgtggtgatattcacggacaattttttgacctgatgaagctgttcgaagtcggtggtagccctgctaacactagatatctgtttctgggtgattatgtggacagggggtacttttcgattgaatgcgtgctgtacctttgggccctgaaaatcctttatccgaaaactctctttctcctgagaggtaatcatgagtgtcgtcatctgaccgaatatttcactttcaagcaagagtgcaagataaaatattctgaacgcgtctacgacgcgtgcatggatgccttcgactgcctgccactggcggcgctcatgaatcagcaattcctctgcgtgcacggtggtctgtcaccagaaatcaatactctggacgatattcggaaactggaccgctttaaggagccaccagcatacggccccatgtgcgatatattgtggtcggacccactcgaggactttggcaacgagaaaactcaagaacacttcacacataatactgtacgaggctgcagctacttctactcgtatccagccgtctgtgaatttctgcagcacaacaacctcctgtctattttgcgcgctcacgaagcccaagatgccggttaccgcatgtatcggaagagccagaccacgggattcccaagtttgataacgattttttccgcacccaattatctggacgtctataataacaaagtgactgaaatgctggttaacgttttaaacatttgttcggacgacgagctcggtagcgaggaagatggctttgatggagctactgctgcggccaggaaggaggtcatcagaaataagatccgggcaatcggcaagatggccagagtgttctcagtgctgagggaagaatcagagagcgtactgaccctgaagggcctaacgcctaccggcatgcttccgagcggggtgctgtctgggggcaaacagacactgcaatccgccattaaggggttctcacctcagcataaaattaccagctttgaagaggctaaaggcctagaccggattaacgagcgtatgcctccccgacgagatgccatgccttctgacgccaatcttaattctattaacaaggctctgaccagcgagacaaacggaactgactctaatgggtccaactctagcaatattcagtag

SEQ ID NO: 48379 - DNA, 399 bp, Artificial Sequence
  derived and/or modified sequence
atgaaggagggccggctggaggagagcgtggccctgcggatcatcactgagggagcaagcattttgcgccaggagaagaatttacttgatatcgacgcaccagttaccgtttgcggcgacatacatggacaatttttcgacctgatgaagctctttgaggtgggaggctctccggctaacaccaggtacctatttctgggagattacgtagatcgggggtacttcagtatcgaatgtgtgctttatctctgggctttgaaaatcctgtatcccaagacactttttttgctccgcgggaaccacgagtgccggcatctgacagaatacttcacatttaagcaggagtgcaaaattaaatatagtgaaagggtctatgatgcttgcatggacgcattctag

SEQ ID NO: 48380 - DNA, 444 bp, Artificial Sequence
  derived and/or modified sequence
atgaaggagggccggctggaggagagcgtggccctgcggatcatcactgaaggcgccagcatactaaggcaggagaaaaacctgctggatatcgatgcccccgttactgtgtgcggggatattcacggccagttctttgatttgatgaaactatttgaagtaggcgggtccccagccaacacaaggtacctgtttctcggggattatgtggaccggggttacttttcgatagagtgtgtcctctacctgtgggccttaaaaattctttatcccaaaactctttttctcctgcgtggtaaccatgaatgccgtcacttaaccgagtatttcacttttaagcaagagtgtaagataaaatatagcgaaagggtgtacgacgcatgcatggacgccttcgattgtttgcctctcgccgcactcatgaaccagcaattcctatgctag

SEQ ID NO: 48381 - DNA, 1410 bp, Artificial Sequence
  derived and/or modified sequence
atgtccgagcctaaagcaatcgacccgaagctaagcactaccgatcgagtggtgaaggcagttcctttccctcctagtcatcgactcacagctaaagaggtcttcgataacgatggtaagccccgagtggacatactgaaagctcatctcatgaaggaggggaggctggaggagtctgtggctttaagaatcatcaccgaaggcgcatcaatcctgcgccaggaaaagaatctgcttgacatcgacgcaccggtgacggtttgcggggatatacacgggcagttcttcgatctgatgaagctatttgaggtgggcggaagccctgccaacacaagatacttgttcctaggggactacgtggatcgcggatacttctcaattgagtgtgtcctgtacctgtgggcactcaaaatcctctacccaaaaaccctgttcctcctcagaggcaaccacgagtgccggcacctgactgagtacttcacgtttaaacaggagtgcaagatcaaatattcagagcgcgtatacgatgcctgcatggatgcctttgattgcttgccactcgcagccttgatgaatcagcagtttctctgtgttcatggcggtctatcccccgaaatcaacacactggatgatatccggaagttagaccggttcaaagagcctcctgcctatggaccaatgtgtgatatcttgtggagcgacccgttagaggatttcgggaacgagaaaacacaggaacactttactcacaatacagttcgcggatgtagctacttttattcataccctgccgtgtgcgagtttttgcagcataataatttattgtccattctccgtgcacacgaggcccaggacgctggataccggatgtataggaagagtcagacaaccggattccccagccttattacaatattcagcgccccaaactatctggatgtatacaataataaggtgactgaaatgctcgtgaatgtgttgaatatttgttcagatgacgaactgggatccgaagaagacggttttgatggcgctacagccgctgccagaaaggaggtgatacggaataagattagagctatcggtaaaatggcaagggtgttctcagtattacgcgaggaatcggaatctgtattgaccttgaagggtctgacccctaccggtatgctgccatccggagtcctgtctggcggaaagcaaactctgcagtctgcaatcaaaggattttcccctcagcataagataacttcattcgaggaagccaagggtctggatcggattaacgagcgaatgccccctcgcagggacgcaatgccttcagacgcgaacttaaattccataaataaagccttaacctctgagactaacggaacagattctaatggctctaattccagcaacattcagtag

SEQ ID NO: 48382 - DNA, 399 bp, Artificial Sequence
  derived and/or modified sequence
atgaaggagggacggctggaggaatctgtcgcattgagaattatcaccgaaggggcatcgattctcaggcaggaaaagaatctcttggacattgatgcacccgttaccgtctgcggcgacatccacggccagttcttcgatctcatgaagctgtttgaggtcggcggttcccccgcaaacacccgctatctgtttttaggagattatgtcgaccggggatattttagcattgaatgcgtgttgtacttgtgggccctgaagatactatacccaaagaccctgtttttgttgcggggaaatcacgaatgcagacacctaactgaatactttaccttcaaacaggagtgtaagataaaatactctgagcgggtgtatgatgcctgcatggacgccttctag

SEQ ID NO: 48383 - DNA, 444 bp, Artificial Sequence
  derived and/or modified sequence
atgaaagaggggcgtctggaggagagcgtggccctgaggatcatcaccgagggggcttcaattcttagacaggagaagaatcttctggacattgacgctcctgtgaccgtgtgcggggatatccacggtcaattctttgatctaatgaagctctttgaagtggggggtagccccgcaaatacgagatacctgtttctcggggattatgtggacaggggctacttctcaattgagtgtgtgctatacctgtgggccctgaagatcctctatcctaaaacgttattcctcctccggggaaatcacgagtgccgtcatttaacagagtacttcacattcaagcaggagtgcaagattaagtattctgagagagtctatgacgcctgtatggatgctttcgactgcctgccactagccgcactgatgaatcagcaatttctgtgctag

SEQ ID NO: 48384 - DNA, 4519 bp, Artificial Sequence
  derived and/or modified sequence
aggagcggcgcggggaggcagaggcgagcgcgggcgatcgcggcggcgggacgtctccggcggccgcggcaccagcggcggcgctctgtgtggagaagcaggggcagcggcagcagcaacagcggcagcggcagcagcagcggcagcagcggcggccgcctctccgccgccggggacgccaaggtgcggctggtggcactgacatcggcggccctgcctctcctccctcgcccccggccttccccatgtgatcggtcttaatcctggccgtgtgtgcgcgcgtggggctccattccgcggtgctgggtctccgtgccggggtgggtgctcgtgtgtgcgcttctcctccccatcccccttcccccaagaataaaagaagaaccgggaggcgtgctcagaaaataaataaataaccaccacacacgcgcagcccggagcgagtcggcggggctggcggcagcggcggaggaggagtgaaggcggcggcggcggaggagggacgcgcggaaaaggcagcaactttaaagccagctcagagcctagacctccagccgagcggtttgcagcgcggcggcggcggcggcggcggcggcgttgagtgtctggcccgccggtccggtcggggtgtgcagtcggacggacgagcagcgcgtcgctgtcctccggcagctggagatgtccgagcccaaggcaattgatcccaagttgtcgacgaccgacagggtggtgaaagctgttccatttcctccaagtcaccggcttacagcaaaagaagtgtttgataatgatggaaaacctcgtgtggatatcttaaaggcgcatcttatgaaggagggaaggctggaagagagtgttgcattgagaataataacagagggtgcatcaattcttcgacaggaaaaaaatttgctggatattgatgcgccagtcactgtttgtggggacattcatggacaattctttgatttgatgaagctctttgaagtcgggggatctcctgccaacactcgctacctcttcttaggggactatgttgacagagggtacttcagtattgaatgtgtgctgtatttgtgggccttgaaaattctctaccccaaaacactgtttttacttcgtggaaatcatgaatgtagacatctaacagagtatttcacatttaaacaagaatgtaaaataaagtattcagaacgcgtatatgatgcctgtatggatgcctttgactgccttcccctggctgccctgatgaaccaacagttcctgtgtgtgcatggtggtttgtctccagagattaacactttagatgatatcagaaaattagaccgattcaaagaaccacctgcatatggacctatgtgtgatatcctgtggtcagaccccctggaagattttggaaatgagaagactcaggaacatttcactcacaacacagtcagggggtgttcatacttctacagttacccggctgtatgtgaattcttacagcacaataacttgttatctatactccgagcccacgaagcccaagatgcagggtaccgcatgtacaggaaaagccaaacaacaggcttcccttctctaattacaattttttcagcaccaaattacttagatgtatacaataacaaagtgactgagatgctggtaaatgtcctcaacatctgctcagatgatgaactagggtcagaagaagatggatttgatggtgcaacagctgcagcccggaaagaggtgataaggaacaagatccgagcaataggcaaaatggccagagtgttctcagtgctcagagaagagagtgagagtgtgctgacgctgaaaggcttgaccccaactggcatgctccccagcggagtactttctggagggaagcaaaccctgcaaagcgctatcaaaggattttcaccacaacataagatcactagcttcgaggaagccaagggcttagaccgaattaatgagaggatgccgcctcgcagagatgccatgccctctgacgccaaccttaactccatcaacaaggctctcacctcagagactaacggcacggacagcaatggcagtaatagcagcaatattcagtgaccacttcctgttcactttttttttttttttttttttttttttttgagctgcggggcatgatggggattgctgcatatcagcagttggatgttcttgcctctgacagtagcttatttgctctgggggccaggaattggattcagtttacactatcattaaaaaagagggagagagataataaactatattttggtggggatggtgattaaacacctcttttgggtatgccttttaaaaatgcttatagagaaaaaaaattttaaaaagaaagctaatgctagtatatactgcaatgttaggggaatgaacatgttttcctactgcattggggacttctagataggttaatgaaaggccttttattctgttactggacatgaaaactttgtctaatttcttactctattgtacgtttacagtcgcagcactaaaaatggatgacatcaaacatttttaacaaaatgatgtacaaactaaggactatttattgataatgttttgctactcttgtcagacaatggctataaactgaattaggcagtcttaaaaaaaaaaaaaaacagaaaaagaaaaaaaagaacgttgcaaatttgttaaaatgccaaaaaggacagtttaattttgtacagattatgcttacctcaggtttctttagtgtgcttgaatgcccttctttccatataacacttatcttcttcttaattcggcaatggaatatcttttaagttttaaaaaaactggaataattatatctatcttttttgccgtttatatttaggggtttttgttgataaaatcaagtcttggttgtggcttgctgaattaaatatttatgagtggtgcatttttaagtatagtgaacaagacaccatattaagtacagtgataaagcatctatattctgtaaaaaaaaaaaaaatctgcctatgcatgttttttaagaaaaaaaaaatggctgtatcggcctgtatgggactgtaatgcgcttagtggtctgacatatactggaaatgtatgtatactggcgtactttatattctctaaaatgcttaatgcctttgaaattttgtaatcaaaaaaaagctttgaaaaaatctaaaggggagagtattctttaaagtttttaacataagcttgtcaatgcacatgtagatggttagcatgtttagcaaaccttgtgaaattataataagtttgtagttacatgtgaaactctaaatgcatggcaactgttaatgtcataacagtttagttattttgttctgttctgtcatgtgccacaaaatatgtacttttttcacttttttccctttgtatatcagttacgggttacaactggttcattctgaaaacaacaacaacaaaagtccattcatattttttaacaattgtataagtgcccaagtaattcactacagcctaaagccttgcctttgtaatttgacttctgacatgttggcaatcaaagcatgcacttgtaacaatgaaaaagaaaaagcattttatattactactcaataaaatgtgcatgaacttacagaattctcatccttccactgagtccgctgaagggatttatgtgcacaaccaccatgtgtcttctaggtgctggcccaccaccacacatcacaggctgatttccacaggcttcttcctaggggcctcgtgatctgaggggtggtgcctacttccactgtaagaaagaatcttggtggatttgtgtctcaaatcagataagagaagcctgtttaaagagcagatgccatcttctggcttcctcaaggagccagttaaaaaaccagagcattcctttttattgaaaaataaaattaatttgttatcaggttgtttcagttgtattggatgccctatctatctgctaaagcaaaaagtactaggctactaagtgcattttcatcacagaaaagagttgcatttgtattaacaagaaatttgtatacccacgcttcagctactatctaatcatcacccgaagatttaagatacaccaaatttcagtttgtttgtaacattgttcatctttagtgcactttgttttatataataaagtatgcctgttatattaaataataagaatatggcaattagcgatatagcatacccaaacaaagatgttctcgatacagtctggcaaagactatcccaaggttattttaatgaattcagacattttttcctgtggatatttctccatcctaaaaaaagtggcaaccaaggaaaatatttagatgcaacttactagagtgatgatgtgaaagaaatggtgattctggtatcatggtgtttattttctttcttataactgcagagaaaatatcctgactaaaaaaaattcatttttttggattcctttcttttacaaattgtgctgaggcaactatggcatagaaataaacatttgacattaaaataa

SEQ ID NO: 48385 - DNA, 569 bp, Artificial Sequence
  derived and/or modified sequence
ggtgttggcggcggcggcggcggcggaggggggtaggttgtgcccgggactgtgtctgccgagctcggcggctgtgccttgctgttccatttcctccaagtcaccggcttacagcaaaagaagtgtttgataatgatggaaaacctcgtgtggatatcttaaaggcgcatcttatgaaggagggaaggctggaagagagtgttgcattgagaataataacagagggtgcatcaattcttcgacaggaaaaaaatttgctggatattgatgcgccagtcactgtttgtggggacattcatggacaattctttgatttgatgaagctctttgaagtcgggggatctcctgccaacactcgctacctcttcttaggggactatgttgacagagggtacttcagtattgaatgtgtgctgtatttgtgggccttgaaaattctctaccccaaaacactgtttttacttcgtggaaatcatgaatgtagacatctaacagagtatttcacatttaaacaagaatgtaaaataaagtattcagaacgcgtatatgatgcctgtatggatgccttt

SEQ ID NO: 48386 - DNA, 579 bp, Artificial Sequence
  derived and/or modified sequence
aaaaacaaccgtacaccgcatcgcagtcgtagctcttctccgcaagctgttccatttcctccaagtcaccggcttacagcaaaagaagtgtttgataatgatggaaaacctcgtgtggatatcttaaaggcgcatcttatgaaggagggaaggctggaagagagtgttgcattgagaataataacagagggtgcatcaattcttcgacaggaaaaaaatttgctggatattgatgcgccagtcactgtttgtggggacattcatggacaattctttgatttgatgaagctctttgaagtcgggggatctcctgccaacactcgctacctcttcttaggggactatgttgacagagggtacttcagtattgaatgtgtgctgtatttgtgggccttgaaaattctctaccccaaaacactgtttttacttcgtggaaatcatgaatgtagacatctaacagagtatttcacatttaaacaagaatgtaaaataaagtattcagaacgcgtatatgatgcctgtatggatgcctttgactgccttcccctggctgccctgatgaaccaacagttcctgtgt

SEQ ID NO: 48387 - protein, 921 aa, Artificial Sequence
  derived and/or modified sequence
MSTKVRKCKEQARVTFPAPEEEEDEGEDEGAEPQRRRRGWRGVNGGLEPRSAPSQREPHGYCPPPFSHGPDLSMEGSPSLRRMTVMREKGRRQAVRGPAFMFNDRGTSLTAEEERFLDAAEYGNIPVVRKMLEESKTLNVNCVDYMGQNALQLAVGNEHLEVTELLLKKENLARIGDALLLAISKGYVRIVEAILNHPGFAASKRLTLSPCEQELQDDDFYAYDEDGTRFSPDITPIILAAHCQKYEVVHMLLMKGARIERPHDYFCKCGDCMEKQRHDSFSHSRSRINAYKGLASPAYLSLSSEDPVLTALELSNELAKLANIEKEFKNDYRKLSMQCKDFVVGVLDLCRDSEEVEAILNGDLESAEPLEVHRHKASLSRVKLAIKYEVKKFVAHPNCQQQLLTIWYENLSGLREQTIAIKCLVVLVVALGLPFLAIGYWIAPCSRLGKILRSPFMKFVAHAASFIIFLGLLVFNASDRFEGITTLPNITVTDYPKQIFRVKTTQFTWTEMLIMVWVLGMMWSECKELWLEGPREYILQLWNVLDFGMLSIFIAAFTARFLAFLQATKAQQYVDSYVQESDLSEVTLPPEIQYFTYARDKWLPSDPQIISEGLYAIAVVLSFSRIAYILPANESFGPLQISLGRTVKDIFKFMVLFIMVFFAFMIGMFILYSYYLGAKVNAAFTTVEESFKTLFWSIFGLSEVTSVVLKYDHKFIENIGYVLYGIYNVTMVVVLLNMLIAMINSSYQEIEDDSDVEWKFARSKLWLSYFDDGKTLPPPFSLVPSPKSFVYFIMRIVNFPKCRRRRLQKDIEMGMGNSKSRLNLFTQSNSRVFESHSFNSILNQPTRYQQIMKRLIKRYVLKAQVDKENDEVNEGELKEIKQDISSLRYELLEDKSQATEELAILIHKLSEKLNPSMLRCE

SEQ ID NO: 48388 - DNA, 2547 bp, Artificial Sequence
  derived and/or modified sequence
atggagggcagccccagcctgagaagaatgaccgtgatgagagagaagggcagaagacaggccgtgagaggccccgccttcatgttcaacgacagaggcaccagcctgaccgccgaggaggagagattcctggacgccgccgagtacggcaacatccccgtggtgagaaagatgctggaggagagcaagaccctgaacgtgaactgcgtggactacatgggccagaacgccctgcagctggccgtgggcaacgagcacctggaggtgaccgagctgctgctgaagaaggagaacctggccagaatcggcgacgccctgctgctggccatcagcaagggctacgtgagaatcgtggaggccatcctgaaccaccccggcttcgccgccagcaagagactgaccctgagcccctgcgagcaggagctgcaggacgacgacttctacgcctacgacgaggacggcaccagattcagccccgacatcacccccatcatcctggccgcccactgccagaagtacgaggtggtgcacatgctgctgatgaagggcgccagaatcgagagaccccacgactacttctgcaagtgcggcgactgcatggagaagcagagacacgacagcttcagccacagcagaagcagaatcaacgcctacaagggcctggccagccccgcctacctgagcctgagcagcgaggaccccgtgctgaccgccctggagctgagcaacgagctggccaagctggccaacatcgagaaggagttcaagaacgactacagaaagctgagcatgcagtgcaaggacttcgtggtgggcgtgctggacctgtgcagagacagcgaggaggtggaggccatcctgaacggcgacctggagagcgccgagcccctggaggtgcacagacacaaggccagcctgagcagagtgaagctggccatcaagtacgaggtgaagaagttcgtggcccaccccaactgccagcagcagctgctgaccatctggtacgagaacctgagcggcctgagagagcagaccatcgccatcaagtgcctggtggtgctggtggtggccctgggcctgcccttcctggccatcggctactggatcgccccctgcagcagactgggcaagatcctgagaagccccttcatgaagttcgtggcccacgccgccagcttcatcatcttcctgggcctgctggtgttcaacgccagcgacagattcgagggcatcaccaccctgcccaacatcaccgtgaccgactaccccaagcagatcttcagagtgaagaccacccagttcacctggaccgagatgctgatcatggtgtgggtgctgggcatgatgtggagcgagtgcaaggagctgtggctggagggccccagagagtacatcctgcagctgtggaacgtgctggacttcggcatgctgagcatcttcatcgccgccttcaccgccagattcctggccttcctgcaggccaccaaggcccagcagtacgtggacagctacgtgcaggagagcgacctgagcgaggtgaccctgccccccgagatccagtacttcacctacgccagagacaagtggctgcccagcgacccccagatcatcagcgagggcctgtacgccatcgccgtggtgctgagcttcagcagaatcgcctacatcctgcccgccaacgagagcttcggccccctgcagatcagcctgggcagaaccgtgaaggacatcttcaagttcatggtgctgttcatcatggtgttcttcgccttcatgatcggcatgttcatcctgtacagctactacctgggcgccaaggtgaacgccgccttcaccaccgtggaggagagcttcaagaccctgttctggagcatcttcggcctgagcgaggtgaccagcgtggtgctgaagtacgaccacaagttcatcgagaacatcggctacgtgctgtacggcatctacaacgtgaccatggtggtggtgctgctgaacatgctgatcgccatgatcaacagcagctaccaggagatcgaggacgacagcgacgtggagtggaagttcgccagaagcaagctgtggctgagctacttcgacgacggcaagaccctgcccccccccttcagcctggtgcccagccccaagagcttcgtgtacttcatcatgagaatcgtgaacttccccaagtgcagaagaagaagactgcagaaggacatcgagatgggcatgggcaacagcaagagcagactgaacctgttcacccagagcaacagcagagtgttcgagagccacagcttcaacagcatcctgaaccagcccaccagataccagcagatcatgaagagactgatcaagagatacgtgctgaaggcccaggtggacaaggagaacgacgaggtgaacgagggcgagctgaaggagatcaagcaggacatcagcagcctgagatacgagctgctggaggacaagagccaggccaccgaggagctggccatcctgatccacaagctgagcgagaagctgaaccccagcatgctgagatgcgagtag

SEQ ID NO: 48389 - DNA, 2766 bp, Artificial Sequence
  derived and/or modified sequence
atgagcaccaaggtgagaaagtgcaaggagcaggccagagtgaccttccccgcccccgaggaggaggaggacgagggcgaggacgagggcgccgagccccagagaagaagaagaggctggagaggcgtgaacggcggcctggagcccagaagcgcccccagccagagagagccccacggctactgccccccccccttcagccacggccccgacctgagcatggagggcagccccagcctgagaagaatgaccgtgatgagagagaagggcagaagacaggccgtgagaggccccgccttcatgttcaacgacagaggcaccagcctgaccgccgaggaggagagattcctggacgccgccgagtacggcaacatccccgtggtgagaaagatgctggaggagagcaagaccctgaacgtgaactgcgtggactacatgggccagaacgccctgcagctggccgtgggcaacgagcacctggaggtgaccgagctgctgctgaagaaggagaacctggccagaatcggcgacgccctgctgctggccatcagcaagggctacgtgagaatcgtggaggccatcctgaaccaccccggcttcgccgccagcaagagactgaccctgagcccctgcgagcaggagctgcaggacgacgacttctacgcctacgacgaggacggcaccagattcagccccgacatcacccccatcatcctggccgcccactgccagaagtacgaggtggtgcacatgctgctgatgaagggcgccagaatcgagagaccccacgactacttctgcaagtgcggcgactgcatggagaagcagagacacgacagcttcagccacagcagaagcagaatcaacgcctacaagggcctggccagccccgcctacctgagcctgagcagcgaggaccccgtgctgaccgccctggagctgagcaacgagctggccaagctggccaacatcgagaaggagttcaagaacgactacagaaagctgagcatgcagtgcaaggacttcgtggtgggcgtgctggacctgtgcagagacagcgaggaggtggaggccatcctgaacggcgacctggagagcgccgagcccctggaggtgcacagacacaaggccagcctgagcagagtgaagctggccatcaagtacgaggtgaagaagttcgtggcccaccccaactgccagcagcagctgctgaccatctggtacgagaacctgagcggcctgagagagcagaccatcgccatcaagtgcctggtggtgctggtggtggccctgggcctgcccttcctggccatcggctactggatcgccccctgcagcagactgggcaagatcctgagaagccccttcatgaagttcgtggcccacgccgccagcttcatcatcttcctgggcctgctggtgttcaacgccagcgacagattcgagggcatcaccaccctgcccaacatcaccgtgaccgactaccccaagcagatcttcagagtgaagaccacccagttcacctggaccgagatgctgatcatggtgtgggtgctgggcatgatgtggagcgagtgcaaggagctgtggctggagggccccagagagtacatcctgcagctgtggaacgtgctggacttcggcatgctgagcatcttcatcgccgccttcaccgccagattcctggccttcctgcaggccaccaaggcccagcagtacgtggacagctacgtgcaggagagcgacctgagcgaggtgaccctgccccccgagatccagtacttcacctacgccagagacaagtggctgcccagcgacccccagatcatcagcgagggcctgtacgccatcgccgtggtgctgagcttcagcagaatcgcctacatcctgcccgccaacgagagcttcggccccctgcagatcagcctgggcagaaccgtgaaggacatcttcaagttcatggtgctgttcatcatggtgttcttcgccttcatgatcggcatgttcatcctgtacagctactacctgggcgccaaggtgaacgccgccttcaccaccgtggaggagagcttcaagaccctgttctggagcatcttcggcctgagcgaggtgaccagcgtggtgctgaagtacgaccacaagttcatcgagaacatcggctacgtgctgtacggcatctacaacgtgaccatggtggtggtgctgctgaacatgctgatcgccatgatcaacagcagctaccaggagatcgaggacgacagcgacgtggagtggaagttcgccagaagcaagctgtggctgagctacttcgacgacggcaagaccctgcccccccccttcagcctggtgcccagccccaagagcttcgtgtacttcatcatgagaatcgtgaacttccccaagtgcagaagaagaagactgcagaaggacatcgagatgggcatgggcaacagcaagagcagactgaacctgttcacccagagcaacagcagagtgttcgagagccacagcttcaacagcatcctgaaccagcccaccagataccagcagatcatgaagagactgatcaagagatacgtgctgaaggcccaggtggacaaggagaacgacgaggtgaacgagggcgagctgaaggagatcaagcaggacatcagcagcctgagatacgagctgctggaggacaagagccaggccaccgaggagctggccatcctgatccacaagctgagcgagaagctgaaccccagcatgctgagatgcgagtag

SEQ ID NO: 48390 - DNA, 2382 bp, Artificial Sequence
  derived and/or modified sequence
atggagggcagccccagcctgagaagaatgaccgtgatgagagagaagggcagaagacaggccgtgagaggccccgccttcatgttcaacgacagaggcaccagcctgaccgccgaggaggagagattcctggacgccgccgagtacggcaacatccccgtggtgagaaagatgctggaggagagcaagaccctgaacgtgaactgcgtggactacatgggccagaacgccctgcagctggccgtgggcaacgagcacctggaggtgaccgagctgctgctgaagaaggagaacctggccagaatcggcgacgccctgctgctggccatcagcaagggctacgtgagaatcgtggaggccatcctgaaccaccccggcttcgccgccagcaagagactgaccctgagcccctgcgagcaggagctgcaggacgacgacttctacgcctacgacgaggacggcaccagattcagccccgacatcacccccatcatcctggccgcccactgccagaagtacgaggtggtgcacatgctgctgatgaagggcgccagaatcgagagaccccacgactacttctgcaagtgcggcgactgcatggagaagcagagacacgacagcttcagccacagcagaagcagaatcaacgcctacaagggcctggccagccccgcctacctgagcctgagcagcgaggaccccgtgctgaccgccctggagctgagcaacgagctggccaagctggccaacatcgagaaggagttcaagaacgactacagaaagctgagcatgcagtgcaaggacttcgtggtgggcgtgctggacctgtgcagagacagcgaggaggtggaggccatcctgaacggcgacctggagagcgccgagcccctggaggtgcacagacacaaggccagcctgagcagagtgaagctggccatcaagtacgaggtgaagaagctgggcaagatcctgagaagccccttcatgaagttcgtggcccacgccgccagcttcatcatcttcctgggcctgctggtgttcaacgccagcgacagattcgagggcatcaccaccctgcccaacatcaccgtgaccgactaccccaagcagatcttcagagtgaagaccacccagttcacctggaccgagatgctgatcatggtgtgggtgctgggcatgatgtggagcgagtgcaaggagctgtggctggagggccccagagagtacatcctgcagctgtggaacgtgctggacttcggcatgctgagcatcttcatcgccgccttcaccgccagattcctggccttcctgcaggccaccaaggcccagcagtacgtggacagctacgtgcaggagagcgacctgagcgaggtgaccctgccccccgagatccagtacttcacctacgccagagacaagtggctgcccagcgacccccagatcatcagcgagggcctgtacgccatcgccgtggtgctgagcttcagcagaatcgcctacatcctgcccgccaacgagagcttcggccccctgcagatcagcctgggcagaaccgtgaaggacatcttcaagttcatggtgctgttcatcatggtgttcttcgccttcatgatcggcatgttcatcctgtacagctactacctgggcgccaaggtgaacgccgccttcaccaccgtggaggagagcttcaagaccctgttctggagcatcttcggcctgagcgaggtgaccagcgtggtgctgaagtacgaccacaagttcatcgagaacatcggctacgtgctgtacggcatctacaacgtgaccatggtggtggtgctgctgaacatgctgatcgccatgatcaacagcagctaccaggagatcgaggacgacagcgacgtggagtggaagttcgccagaagcaagctgtggctgagctacttcgacgacggcaagaccctgcccccccccttcagcctggtgcccagccccaagagcttcgtgtacttcatcatgagaatcgtgaacttccccaagtgcagaagaagaagactgcagaaggacatcgagatgggcatgggcaacagcaagagcagactgaacctgttcacccagagcaacagcagagtgttcgagagccacagcttcaacagcatcctgaaccagcccaccagataccagcagatcatgaagagactgatcaagagatacgtgctgaaggcccaggtggacaaggagaacgacgaggtgaacgagggcgagctgaaggagatcaagcaggacatcagcagcctgagatacgagctgctggaggacaagagccaggccaccgaggagctggccatcctgatccacaagctgagcgagaagctgaaccccagcatgctgagatgcgagtag

SEQ ID NO: 48391 - DNA, 2547 bp, Artificial Sequence
  derived and/or modified sequence
atggagggatctccgtcactgcgccgaatgacagtgatgagagaaaagggtaggcgccaggctgtgcgcggtccagcattcatgttcaacgatcggggaacgtcccttactgctgaagaggagagattcctggacgccgccgaatatgggaatatacccgtcgtgcgaaagatgcttgaagagagtaagaccctcaatgtgaactgtgtcgattacatgggtcaaaacgccctgcagctcgctgtcgggaacgagcacctggaggtcaccgagctcctgctaaagaaagaaaatcttgccaggattggtgatgccctgctgctggcaatctcaaaggggtacgtgagaattgtcgaggcaattctgaaccatccagggttcgccgcctccaagagattgaccctgtctccttgcgaacaggaacttcaggatgatgatttttacgcatacgatgaagatggaaccagattttcccctgacatcactcccatcattctggccgcacactgtcagaagtacgaagtagttcacatgctattaatgaagggggctcggatcgaaagaccccacgactatttttgcaaatgcggagactgtatggaaaaacagagacatgattctttttcccacagcagaagcagaattaatgcttataaaggccttgcttccccagcttacctttcactgtcttccgaggatcctgtgcttactgcacttgagttgagcaacgaattggcgaagctggcgaatatcgaaaaagagttcaagaacgattaccgcaagctgtctatgcaatgcaaagatttcgttgtgggcgtgcttgatctgtgccgggattctgaggaagtggaagcaatcctcaatggggacctggagagcgcggagcccctcgaagttcaccggcataaagccagtctcagtagagtgaaactggccataaaatacgaagtgaagaagtttgtggcccaccccaattgccaacagcagctattgactatctggtacgagaacttatccgggctgagggagcagaccatcgccatcaaatgtctggtggttctggtcgtggccttggggctgccctttctggcaataggctattggatcgctccttgcagccgtttgggtaagattctgagatccccctttatgaagttcgtggctcacgctgcctcatttattatcttcctaggccttttggtcttcaacgctagtgaccggttcgaggggattaccaccctgcccaacatcacagtgaccgactaccctaagcaaatctttcgcgtcaaaactacccaatttacatggaccgagatgctgattatggtgtgggtgctgggaatgatgtggtctgaatgcaaagaattgtggctagaaggccctagggagtacatcctccagctctggaacgtactggacttcggtatgctatcaatcttcattgccgccttcaccgccaggttcctagcattcctgcaggccaccaaggcccagcagtacgtggacagttacgtgcaggaatccgacttatccgaagtgactctgcctcccgaaatacagtacttcacctacgcacgcgacaagtggttgcctagtgatcctcagattatcagtgaagggctgtatgcaattgctgtcgtattatctttctctaggatagcttatatcttgcccgcgaacgagtcctttggtccactccagatatccctcggccgcacagtgaaggatatctttaaattcatggtgctattcattatggtgttctttgctttcatgatcgggatgttcattctgtatagctattacctaggagcgaaggtcaacgcagcattcaccaccgtggaagaatctttcaaaacattgttctggagcatttttggcctgagcgaggttacatcagtggtgcttaagtatgatcacaaattcattgagaacatcgggtatgtgctctacgggatctataatgtgacgatggtcgtcgtgctactcaatatgttaattgccatgattaactcatcctatcaggagatagaggatgattcagatgtcgagtggaagtttgcacgatcaaagctctggctgagctattttgatgacggcaagaccctgcctccccctttctccttggtcccttctcccaagtcttttgtctactttataatgagaattgtgaacttccccaagtgtcggagaagacggctacagaaagatatcgaaatgggcatgggaaattctaagagtcggctcaatctctttactcagtccaatagccgagtattcgagagccattcgtttaattccatactcaatcaacctacacgctatcagcagatcatgaagagattgatcaagaggtacgttctgaaagctcaggtagacaaagagaacgatgaggtaaatgagggtgaattgaaggaaatcaagcaggacatcagttctctaaggtatgagctgctggaagataagagccaggctacagaggagctcgctatattaatccataagctgtctgagaagcttaatccgtcaatgctgcgctgtgaatag

SEQ ID NO: 48392 - DNA, 2766 bp, Artificial Sequence
  derived and/or modified sequence
atgtcaactaaggtccggaaatgtaaagaacaggcacgcgtgacctttcccgctcctgaggaggaggaagatgagggggaggacgagggagctgaaccccaacgacgccggcgcggatggcgaggggtgaacggtgggttagaaccaagatctgcaccgtcccaaagagagcctcatggttactgtcctcccccatttagccacggacctgatttaagtatggaagggagcccatccttacggcgcatgacggtgatgagggagaaggggaggcgccaggctgtacgcgggcctgctttcatgttcaacgacagaggtacttctctgaccgccgaagaagagaggttcctcgatgccgccgaatacggcaatataccagtcgttcgtaagatgttggaagaaagtaagactctcaatgtcaactgcgtggactacatgggccaaaatgcacttcagctggctgtcggaaacgaacaccttgaggtgacagaactgctgctgaagaaggaaaacctggcacgaatcggggacgccctgctcctcgccatatctaagggctacgtacgcattgtggaagccatcctgaatcatccaggattcgcagcttcaaaacgtcttacacttagtccctgtgaacaggagctgcaggacgatgacttttacgcatatgacgaggacgggacacgcttctcacccgacataactccgatcatccttgccgcccattgccaaaaatatgaggtggtgcatatgctgctgatgaagggggcccgtatcgagcgcccacacgactacttctgtaagtgcggcgactgtatggaaaaacagcggcatgatagctttagtcattcccgatctcgcatcaatgcttacaaaggactggcctcacccgcttacctctctttgtcttctgaagatcccgtgctgacggcactggagctgtctaacgagttagcaaaactggctaatatagagaaggaatttaagaacgactaccggaaactctccatgcagtgtaaggatttcgttgtgggcgtcttggacctgtgcagagattccgaagaggttgaagctatcttgaacggagatctagagtcagcggagcccctggaggtgcaccgccacaaggcatcgctctcccgggtaaagttagcaattaaatacgaagtcaagaagttcgtcgcgcacccaaattgtcagcaacagttactcacaatctggtatgagaatttatcaggattgcgagagcaaacaatcgcgatcaaatgcctagtagtcctagtggtcgccctcgggttaccctttctggccatcggctactggatcgcgccttgtagtcggctgggtaagattttacggagccccttcatgaaatttgtggctcatgctgcaagtttcattattttcttgggtctattggtcttcaatgcttcggaccgcttcgaaggcattaccacgctgccaaatatcactgtcactgactacccaaaacagatctttagggtgaaaaccacccagttcacttggacagagatgttaattatggtgtgggtgctcggaatgatgtggagtgaatgcaaggagttgtggctggaagggcccagggagtacattctacagttgtggaacgtcttggatttcggcatgctctctattttcatagctgccttcactgcccgtttcctggcattcctgcaggctacaaaggcacagcagtacgtagattcctatgtgcaggagtcggacctctctgaagtcaccctgcctcccgagattcagtacttcacatacgccagggacaagtggttaccaagcgacccccaaattatctctgaaggattgtacgcgattgcagtggtcttaagtttcagcagaattgcttacatccttcccgctaacgagtcttttggcccccttcagataagcctaggaaggaccgtcaaagacatattcaaatttatggtgcttttcattatggtgttctttgcttttatgattggcatgtttatcctctactcatactacttgggcgccaaagtaaatgccgcgttcacaacagtggaagaatccttcaagactctcttctggagcatcttcgggctgagcgaagtcacctcagttgttcttaagtatgatcacaagtttattgaaaatattgggtatgtgctttacggtatctacaacgtaaccatggtcgtggtgctgttgaacatgctgatcgccatgataaactcctcataccaggagattgaggacgactccgatgtcgaatggaagtttgcccgaagcaaactctggcttagttatttcgatgacggtaaaacgctcccgccacccttcagcctggtcccaagcccaaagtctttcgtgtacttcatcatgaggatagtgaacttccccaaatgccggagacggaggctgcagaaggacatagagatgggaatgggaaacagcaaatcccgactgaacctgtttacacagagcaacagtagagtcttcgaaagtcactcttttaatagcatcctcaatcagcccacaagataccaacaaatcatgaagcgcctgataaaacgatacgtcctgaaggcacaggtggataaagagaatgacgaggtgaacgagggtgagctcaaggagatcaagcaagatatcagcagtctgagatatgagttgcttgaagacaagtcccaagcaacggaggaactcgcaattcttattcacaagctgtcagaaaagctgaacccctcgatgctgagatgcgagtag

SEQ ID NO: 48393 - DNA, 2382 bp, Artificial Sequence
  derived and/or modified sequence
atggagggatctccgagcctgaggagaatgacagtgatgcgcgagaaggggcggaggcaggctgtcaggggtcccgcttttatgtttaacgataggggcacctccctgacggctgaggaagaacgcttcctggacgccgcagaatacggtaacatccctgtggttcgtaagatgctggaagaatccaaaacgctgaacgtcaattgtgtggattatatggggcagaacgctctacagctagcagtcggcaacgagcatttggaggtcacagaattgcttctgaaaaaggagaatctggcccgcattggtgatgccttgctcctggccatttctaaaggctacgtgagaatcgtcgaagctatcctgaatcaccccggattcgccgcaagcaagcgccttacactatcaccttgcgagcaggagctccaagacgacgacttttacgcgtacgacgaagacggaacgcggtttagccctgacataactccgatcatactcgctgcgcactgtcaaaaatacgaggttgtccacatgctgctgatgaagggagcacgcattgaacgcccccatgactacttctgcaaatgcggggattgtatggagaaacagcgacacgattcgttctcccacagtcgctcccgcattaatgcctataaaggcctcgcatcccccgcatacctttccctatcgagcgaggacccagttcttaccgcgctcgaactcagtaacgaactcgctaagctggcgaatatcgagaaagaattcaagaacgattatagaaagctaagcatgcagtgcaaagatttcgtcgtgggtgtgctggacctgtgtagagactctgaggaagttgaggctatactcaacggagacctggagtcagctgaacccctggaagtgcaccgtcataaggccagcctgagtagagtcaagctggccattaagtacgaggtaaaaaagctggggaagattcttagaagtccctttatgaaatttgttgcccacgctgcctcgtttattatatttctgggactgctggtttttaacgcttccgaccgcttcgaaggtataacaacactaccaaacatcaccgtgacagactacccaaaacaaatcttcagagtaaagaccacgcaattcacatggaccgagatgctaattatggtatgggtgctcggtatgatgtggtcagagtgtaaggagctgtggctggaagggccccgggagtatatcctgcaactttggaacgttcttgactttggtatgctttctattttcatcgcagccttcacagcaaggttcctcgcctttctccaggctacgaaggctcagcagtacgtagactcctatgtccaggaatctgatctgtccgaagtcaccctgccccccgagatacagtacttcacctacgctagagacaaatggctaccatccgatccccagattattagcgagggactgtacgctatcgcagtagtactgtccttctcccggatagcatatattctgccggccaatgaaagtttcgggccactgcagatcagtttgggaagaacagtgaaagacattttcaagtttatggtgttattcattatggtgtttttcgcttttatgatcggaatgtttatcttatacagctattatttaggggctaaggtgaatgcagcttttacgaccgttgaggagagttttaaaacactcttttggagtatctttggactcagcgaggtcacatctgtggttctcaagtatgatcacaaatttatcgagaatatagggtacgtgctctacgggatctacaacgtaaccatggtggttgtgctcctcaatatgcttattgctatgattaactcaagctaccaggaaatcgaggacgattcagacgtcgagtggaagttcgccaggagcaagctctggctcagctacttcgacgacgggaaaacactgccacctcctttctccctcgtaccttccccaaaatcattcgtatactttatcatgcgcatcgtgaactttcctaagtgccggaggaggcgactgcagaaggacatagaaatggggatgggcaacagtaaatcacggctgaacctcttcacccaatcaaatagtcgcgtcttcgagagccattccttcaactccattttgaaccaaccgacacgatatcagcagatcatgaagagattaattaaaaggtacgtgctgaaggcacaggtcgataaagagaacgacgaagttaacgaaggcgaactgaaggagatcaagcaagacatttcttccctgcggtatgagttgttggaagataagtcgcaggccactgaagagcttgccatcctgatccataaactatctgagaagctcaatccaagtatgctgaggtgcgaatag

SEQ ID NO: 48394 - DNA, 2547 bp, Artificial Sequence
  derived and/or modified sequence
atggagggcagccccagcctgcggaggatgacagtgatgagggagaagggccggcggcaggccgtgcggggccctgccttcatgtttaatgaccggggcaccagcctgacagctgaggaggagcgcttcctggatgctgctgaatatggcaacatccctgtggtgaggaagatgctggaggagagcaagaccctgaatgtgaactgtgtggactacatgggccagaatgccctgcagctggccgtgggcaatgagcacctggaggtgacagagctgctgctgaagaaggagaacctggccagaattggagatgccctgctgctggccatcagcaagggctacgtgagaattgtggaggccatcctgaaccaccctggctttgctgccagcaagaggctgaccctgagcccctgtgagcaggagctgcaggatgatgacttctacgcctatgatgaagatggcacccgcttctccccagacatcacccccatcatcctggccgcccactgccagaagtatgaggtggtgcacatgctgctgatgaagggggcccgcatcgagcggccccatgactacttctgcaagtgtggggactgcatggagaagcagagacatgacagcttcagccacagccgcagccgcatcaatgcctacaagggcctggccagccctgcctacctgagcctgagcagcgaggaccctgtgctgacagccctggagctgagcaatgagctggccaagctggccaacatcgagaaggagttcaagaatgactacaggaagctgtccatgcagtgcaaggactttgtggtgggcgtgctggacctgtgccgggacagcgaggaggtggaggccatcctgaatggagacctggagagcgctgagcccctggaggtgcaccgccacaaggccagcctgagccgggtgaagctggccatcaagtatgaggtgaagaagtttgtggcccaccccaactgccagcagcagctgctgaccatctggtatgagaacctgagcggcctgcgggagcagaccatcgccatcaagtgcctggtggtgctggtggtggccctgggcctgcccttcctggccatcggctactggatcgccccctgcagccggctgggcaagatcctgcggagccccttcatgaagtttgtggcccacgccgccagcttcatcatcttcctgggcctgctggtgttcaatgccagtgacagatttgagggcatcaccaccctgcccaacatcaccgtgacagactaccccaagcagatcttccgggtgaagaccacccagttcacctggacagagatgctgatcatggtgtgggtgctgggcatgatgtggagcgagtgcaaggagctgtggctggagggcccccgggagtacatcctgcagctgtggaatgtgctggactttggcatgctgagcatcttcatcgccgccttcaccgcccgcttcctggccttcctgcaggccaccaaggcccagcagtatgtggacagctatgtgcaggagagtgacctgtctgaggtgaccctgcccccagagatccagtacttcacctacgcccgggacaagtggctgcccagcgacccccagatcatcagcgagggcctgtatgccatcgctgtggtgctgtccttcagcagaattgcctacatcctgcctgccaatgaaagctttggccccctgcagatcagcctgggccgcacagtgaaggacatcttcaagttcatggtgctcttcatcatggtgttctttgccttcatgattggcatgttcatcctgtacagctactacctgggcgccaaggtgaatgctgccttcaccaccgtggaggagagcttcaagaccctcttctggagcatcttcggcctgtctgaggtgacctctgtggtgctgaagtatgaccacaagttcatcgagaacatcggctacgtgctgtatggcatctacaacgtgaccatggtggtggtgctgctgaacatgctgattgccatgatcaacagcagctaccaggagattgaagatgacagtgatgtggagtggaagtttgcccggagcaagctgtggctgagctactttgatgatggcaagaccctgcccccacccttcagcctggtgcccagccccaagagctttgtgtacttcatcatgagaattgtgaacttccccaagtgcagaagaagaaggctgcagaaggacatcgagatgggcatgggcaacagcaagagccggctgaacctcttcacccagagcaacagccgggtgtttgagagccacagcttcaacagcatcctgaaccagcccacccgctaccagcagatcatgaagaggctcatcaagcgctacgtgctgaaggcccaggtggacaaggaaaatgatgaggtgaatgaaggagagctgaaggagatcaagcaggacatcagcagcctgcgctatgagctgctggaggacaagagccaggccacagaggagctggccatcctgatccacaagctgtctgagaagctgaaccccagcatgctgcgctgtgagtag

SEQ ID NO: 48395 - DNA, 2766 bp, Artificial Sequence
  derived and/or modified sequence
atgagcaccaaggtgaggaagtgcaaggagcaggcccgggtgaccttccctgcccctgaggaggaggaggatgaaggagaagatgagggcgctgagccccagaggagaagaagaggctggaggggcgtgaatggaggcctggagcccaggtctgcccccagccagcgggagccccacggctactgccccccacccttcagccacggccctgacctgtccatggagggcagccccagcctgcggaggatgacagtgatgagggagaagggccggcggcaggccgtgcggggccctgccttcatgtttaatgaccggggcaccagcctgacagctgaggaggagcgcttcctggatgctgctgaatatggcaacatccctgtggtgaggaagatgctggaggagagcaagaccctgaatgtgaactgtgtggactacatgggccagaatgccctgcagctggccgtgggcaatgagcacctggaggtgacagagctgctgctgaagaaggagaacctggccagaattggagatgccctgctgctggccatcagcaagggctacgtgcgcatcgtggaggccatcctgaaccaccctggctttgctgccagcaagaggctgaccctgagcccctgtgagcaggagctgcaggatgatgacttctacgcctatgatgaagatggcacccgcttctccccagacatcacccccatcatcctggccgcccactgccagaagtatgaggtggtgcacatgctgctgatgaagggggccagaattgagcggccccatgactacttctgcaagtgtggggactgcatggagaagcagagacatgacagcttcagccacagccgcagccgcatcaatgcctacaagggcctggccagccctgcctacctgagcctgagcagtgaagatcctgtgctgacagccctggagctgagcaatgagctggccaagctggccaacatcgagaaggagttcaagaatgactacaggaagctgtccatgcagtgcaaggactttgtggtgggcgtgctggacctgtgccgggacagcgaggaggtggaggccatcctgaatggagacctggagagcgctgagcccctggaggtgcaccgccacaaggccagcctgagccgggtgaagctggccatcaagtatgaggtgaagaagtttgtggcccaccccaactgccagcagcagctgctgaccatctggtatgagaacctgagcggcctgcgggagcagaccatcgccatcaagtgcctggtggtgctggtggtggccctgggcctgcccttcctggccatcggctactggatcgccccctgcagccggctgggcaagatcctgcggagccccttcatgaagtttgtggcccatgctgccagcttcatcatcttcctgggcctgctggtgttcaatgccagtgacagatttgagggcatcaccaccctgcccaacatcaccgtgacagactaccccaagcagatcttccgggtgaagaccacccagttcacctggacagagatgctgatcatggtgtgggtgctgggcatgatgtggagcgagtgcaaggagctgtggctggagggcccccgggagtacatcctgcagctgtggaatgtgctggactttggcatgctgagcatcttcatcgccgccttcaccgcccgcttcctggccttcctgcaggccaccaaggcccagcagtatgtggacagctatgtgcaggagagtgacctgtctgaggtgaccctgcccccagagatccagtacttcacctacgcccgggacaagtggctgcccagcgacccccagatcatcagcgagggcctgtatgccatcgctgtggtgctgtccttcagccgcatcgcctacatcctgcctgccaatgaaagctttggccccctgcagatcagcctgggccgcacagtgaaggacatcttcaagttcatggtgctcttcatcatggtgttctttgccttcatgattggcatgttcatcctgtacagctactacctgggcgccaaggtgaatgctgccttcaccaccgtggaggagagcttcaagaccctcttctggagcatcttcggcctgtctgaggtgacctctgtggtgctgaagtatgaccacaagttcattgaaaatattggctacgtgctgtatggcatctacaacgtgaccatggtggtggtgctgctgaacatgctgattgccatgatcaacagcagctaccaggagattgaagatgacagtgatgtggagtggaagtttgcccggagcaagctgtggctgagctactttgatgatggcaagaccctgcccccacccttcagcctggtgcccagccccaagagctttgtgtacttcatcatgagaattgtgaacttccccaagtgcagaagaagaaggctgcagaaggacatcgagatgggcatgggcaacagcaagagccggctgaacctcttcacccagagcaacagccgggtgtttgagagccacagcttcaacagcatcctgaaccagcccacccgctaccagcagatcatgaagaggctcatcaagagatatgtgctgaaggcccaggtggacaaggaaaatgatgaggtgaatgaaggagagctgaaggagatcaagcaggacatcagcagcctgcgctatgagctgctggaggacaagagccaggccacagaggagctggccatcctgatccacaagctgtctgagaagctgaaccccagcatgctgcgctgtgagtag

SEQ ID NO: 48396 - DNA, 2382 bp, Artificial Sequence
  derived and/or modified sequence
atggagggcagccccagcctgcggaggatgacagtgatgagggagaagggccggcggcaggccgtgcggggccctgccttcatgtttaatgaccggggcaccagcctgacagctgaggaggagcgcttcctggatgctgctgaatatggcaacatccctgtggtgaggaagatgctggaggagagcaagaccctgaatgtgaactgtgtggactacatgggccagaatgccctgcagctggccgtgggcaatgagcacctggaggtgacagagctgctgctgaagaaggagaacctggccagaattggagatgccctgctgctggccatcagcaagggctacgtgagaattgtggaggccatcctgaaccaccctggctttgctgccagcaagaggctgaccctgagcccctgtgagcaggagctgcaggatgatgacttctacgcctatgatgaagatggcacccgcttctccccagacatcacccccatcatcctggccgcccactgccagaagtatgaggtggtgcacatgctgctgatgaagggggcccgcatcgagcggccccatgactacttctgcaagtgtggggactgcatggagaagcagagacatgacagcttcagccacagccgcagccgcatcaatgcctacaagggcctggccagccctgcctacctgagcctgagcagcgaggaccctgtgctgacagccctggagctgagcaatgagctggccaagctggccaacatcgagaaggagttcaagaatgactacaggaagctgtccatgcagtgcaaggactttgtggtgggcgtgctggacctgtgccgggacagcgaggaggtggaggccatcctgaatggagacctggagagcgctgagcccctggaggtgcaccgccacaaggccagcctgagccgggtgaagctggccatcaagtatgaggtgaagaagctgggcaagatcctgcggagccccttcatgaagtttgtggcccatgctgccagcttcatcatcttcctgggcctgctggtgttcaatgccagtgacagatttgagggcatcaccaccctgcccaacatcaccgtgacagactaccccaagcagatcttccgggtgaagaccacccagttcacctggacagagatgctgatcatggtgtgggtgctgggcatgatgtggagcgagtgcaaggagctgtggctggagggcccccgggagtacatcctgcagctgtggaatgtgctggactttggcatgctgagcatcttcatcgccgccttcaccgcccgcttcctggccttcctgcaggccaccaaggcccagcagtatgtggacagctatgtgcaggagagtgacctgtctgaggtgaccctgcccccagagatccagtacttcacctacgcccgggacaagtggctgcccagcgacccccagatcatcagcgagggcctgtatgccatcgctgtggtgctgtccttcagccgcatcgcctacatcctgcctgccaatgaaagctttggccccctgcagatcagcctgggccgcacagtgaaggacatcttcaagttcatggtgctcttcatcatggtgttctttgccttcatgattggcatgttcatcctgtacagctactacctgggcgccaaggtgaatgctgccttcaccaccgtggaggagagcttcaagaccctcttctggagcatcttcggcctgtctgaggtgacctctgtggtgctgaagtatgaccacaagttcattgaaaatattggctacgtgctgtatggcatctacaacgtgaccatggtggtggtgctgctgaacatgctgattgccatgatcaacagcagctaccaggagattgaagatgacagtgatgtggagtggaagtttgcccggagcaagctgtggctgagctactttgatgatggcaagaccctgcccccacccttcagcctggtgcccagccccaagagctttgtgtacttcatcatgagaattgtgaacttccccaagtgcagaagaagaaggctgcagaaggacatcgagatgggcatgggcaacagcaagagccggctgaacctcttcacccagagcaacagccgggtgtttgagagccacagcttcaacagcatcctgaaccagcccacccgctaccagcagatcatgaagaggctcatcaagagatatgtgctgaaggcccaggtggacaaggaaaatgatgaggtgaatgaaggagagctgaaggagatcaagcaggacatcagcagcctgcgctatgagctgctggaggacaagagccaggccacagaggagctggccatcctgatccacaagctgtctgagaagctgaaccccagcatgctgcgctgtgagtag

SEQ ID NO: 48397 - DNA, 2547 bp, Artificial Sequence
  derived and/or modified sequence
atggagggcagccccagcctgcggcggatgaccgtgatgcgggagaaggggcgccggcaggccgtcaggggccccgcctttatgtttaatgatcgtggaaccagtctgacagcagaagaagagcgctttctggatgctgcggagtacggtaacattcccgtcgtgcgcaagatgctggaagaaagtaaaaccctcaatgtgaattgcgtcgattatatggggcagaatgccctccagctcgctgtcggaaacgagcacctggaggttaccgaactgcttctaaagaaggagaatctagcaagaattggagatgccttgctgctggcaatctctaaagggtacgtgcggatcgtcgaggcgatcttgaaccacccaggctttgccgcttctaaacgtcttaccctttccccatgcgaacaggagctgcaagatgacgatttctacgcatacgacgaggacgggaccagattcagtccagatatcacccccatcatcctggctgcacattgtcaaaagtatgaggtggtgcatatgctgctaatgaaaggcgcacgcattgagcggccccacgactatttctgcaagtgtggcgactgtatggaaaagcagcggcacgacagcttcagtcactcacggtccagaattaacgcatacaagggcctggcttcaccagcctacctgagcctttccagtgaggacccagtcctaactgccctcgagctctccaacgagctggccaaactggcaaatatcgaaaaggaattcaagaatgattatcggaaactctccatgcagtgcaaagattttgttgtcggcgtgctcgacctctgccgggatagtgaggaggtcgaggctatcctgaacggtgacttagagagcgctgaacccctggaggtccatcgacacaaggccagcctgagccgggtcaaacttgcgattaaatacgaagtgaaaaagtttgtggctcacccgaattgtcagcagcagctcctaaccatttggtacgaaaatctgtctgggctgagggaacagaccatcgcaatcaagtgtcttgttgtcctggtcgtggctctcggcctgcctttcttagcgatcgggtattggatagccccttgttcccgcttgggcaaaatcctgcggagtccatttatgaaattcgtggcccatgctgcctcttttatcatcttcctgggtctcctcgtcttcaacgcatcagaccgtttcgaaggtataacgactcttcccaacattaccgtgacggactatcccaagcagattttccgggtgaaaactacccagtttacgtggaccgagatgttgattatggtgtgggttctaggaatgatgtggtccgagtgtaaagagctctggctcgagggtccccgggagtatatccttcagttgtggaatgttttggacttcgggatgctctccatcttcatcgctgcctttacggcacgctttctggcctttcttcaggccacgaaagcccagcagtacgtggatagttacgtacaggagtctgacctctctgaggttacactgccccccgagattcagtattttacttacgcaagggataagtggctgccaagcgatccccagataatcagtgagggcctgtacgcaattgctgtggttctcagtttctccagaatcgcttatatactgccagccaacgagagcttcggcccactccagattagcctcggaaggaccgtgaaggatatcttcaaattcatggttctgtttatcatggtgtttttcgctttcatgattggcatgtttatcttgtatagctactacctgggagctaaggtgaacgccgctttcacaaccgtggaggagtccttcaagaccctattctggagcatctttggactctcagaggttacctctgtggtcttaaaatacgaccacaaatttatcgaaaacattggctacgttctgtacggcatttacaacgtcaccatggtagttgtgcttttgaatatgctaatcgctatgattaatagtagctaccaggagattgaggacgacagtgacgttgaatggaagtttgctagaagtaagctgtggcttagttacttcgatgacgggaagacattgcctcctccatttagcctggtcccatcccccaaatcctttgtttattttataatgaggatcgtcaatttcccgaagtgtcggaggcgaaggctacagaaagatattgaaatgggtatgggaaattctaagagtaggctgaaccttttcactcagagcaactctcgagtgtttgaatcacacagtttcaactcgatcctcaaccaaccaacccgttaccagcagattatgaagcggctgataaagaggtatgtgttgaaggcccaggtggacaaagaaaacgacgaggtgaacgaaggggaactgaaagagattaagcaggatatcagcagcttacggtatgaactgcttgaggataagtcacaggctactgaggaactggccatcctcatccacaaactgtccgagaagctaaacccttcaatgctgcgctgtgagtag

SEQ ID NO: 48398 - DNA, 2766 bp, Artificial Sequence
  derived and/or modified sequence
atgagcaccaaggtgcggaagtgcaaggagcaggcccgggtgacctttcctgctccagaggaagaagaggacgagggtgaagatgaaggcgcagagccccaacggcgccggcgaggctggcggggcgttaacggcggcctcgaaccaaggagtgctccctctcaacgcgaaccacatggctactgtccgcctccctttagccacggcccagacctgagtatggagggctccccctccctccgacgaatgaccgtgatgagggagaaggggaggagacaggccgtgcgtggtccagccttcatgtttaacgatcgggggacgtcccttacagccgaggaagaacgttttctggacgccgccgagtacgggaacatacctgtggtgcggaaaatgcttgaagaaagcaaaacgctgaacgtgaactgcgtggattacatgggacagaatgccttgcaactcgccgtgggtaacgagcaccttgaggtcaccgagctcctcctgaaaaaggagaatctggcaaggattggcgatgctcttctgctggccatctccaaaggttatgtccggatcgtggaagccattttaaaccatcctggcttcgccgcttctaaaaggctgaccttgtcgccttgcgagcaagaactgcaggacgatgacttctacgcctacgacgaggatggtacgcgattctctcccgacattaccccaatcatcctggcagcacactgccagaagtacgaggttgtgcacatgctgttgatgaaaggagcgcggatagagcgcccgcacgactacttttgtaagtgtggggattgtatggaaaagcagcgacatgattcattttcacatagcaggagtaggataaatgcctataaaggactcgcatccccggcctatctgtcgttgagcagtgaggacccagtccttacggccctggaactgagcaacgagctggccaagctcgcaaatatcgagaaagagtttaagaacgactatcggaagctgtctatgcagtgcaaggacttcgttgttggcgtattggacctatgtcgcgatagcgaggaggtggaagctatcttgaacggtgatctggagtcagccgagcctctcgaggtgcatagacacaaggcttcactgtccagagtgaaacttgccatcaagtatgaagtcaagaagtttgtcgctcatccaaactgccaacagcagctcctgaccatctggtacgagaatctttctgggctcagagagcagactattgcaatcaaatgtctcgtggtcctcgtggtggccctcggactccccttcttagccattgggtactggatcgcgccctgcagtcgcctcggtaagatcctccgatcgcccttcatgaagttcgtggcccacgctgctagcttcatcatcttcttaggcctccttgttttcaacgcctcggatcgcttcgagggcatcacgaccctgccgaatataaccgtaaccgactatcccaagcagattttccgcgtgaaaactacccagtttacctggactgaaatgttaatcatggtctgggtgctggggatgatgtggagtgaatgtaaagagctctggcttgagggtcctagagagtacatcctccaattgtggaacgtccttgattttggcatgctgtccatctttattgccgccttcacagctagattcctcgccttcctgcaggcaaccaaggcacagcaatacgtcgacagctatgtgcaagaatctgacctctccgaagtaacgttgccacccgaaatccaatactttacctatgctcgagataaatggctccccagtgatcctcagatcatcagtgaaggattgtatgctattgctgttgttctcagctttagcagaattgcttacatacttcctgcgaatgagtcctttggtccacttcagatcagcctggggagaacagtaaaggatattttcaagtttatggtgctgttcataatggtcttcttcgccttcatgatcggcatgttcatcctgtatagctactacctaggagcaaaggttaatgcagcatttacaacagtggaggagtcatttaagactcttttttggagcattttcggcctgagtgaagttacctctgtcgtgctgaaatacgatcataaatttatcgagaatattggctacgtattatacggtatatacaatgtgactatggtggtggtgctgctaaatatgctaattgccatgatcaattcttcctaccaggagatcgaagatgactccgacgtggagtggaaattcgctcgttccaagctgtggttgtcctactttgacgatgggaagacactgccccctccattcagcttagtgcctagcccaaagtcattcgtgtactttatcatgagaatcgtgaactttcctaaatgcagacggagaagactgcaaaaggatattgagatgggtatgggcaacagtaagagtagattgaacctgtttactcaaagcaattcaagggtctttgaatcacatagcttcaactccattttgaaccaaccgacacggtatcagcagatcatgaagcggctgatcaagagatacgttctgaaagcccaggtagacaaggagaacgacgaggttaatgagggcgaactcaaggagataaaacaggatatctcctccctccggtacgaactcctggaggacaagtcccaggctactgaagagttagctatcctgatacataaattgagcgagaaactgaacccatcaatgctaagatgcgaatag

SEQ ID NO: 48399 - DNA, 2382 bp, Artificial Sequence
  derived and/or modified sequence
atggagggcagccccagcctgcggcggatgaccgtgatgcgggagaagggccgccgccaagctgtcagaggtcctgccttcatgtttaacgataggggtacgagtctgacagccgaggaagagcgtttccttgacgccgctgagtacgggaatatacctgtcgtcaggaaaatgctggaagagtctaagaccttgaacgttaactgcgtggattacatgggccaaaatgccctccagctggccgttgggaacgaacacctcgaggtgactgaactgttgctgaaaaaggagaacctcgctcgaattggggacgcgctgctgctcgcaataagtaaaggctatgtaaggattgtggaagccattcttaaccaccccggttttgctgcctccaagcggctgactctgtccccttgtgaacaggagctgcaagatgacgatttctacgcctatgatgaagacggaacccggttttctcctgacattacccctataattctggcagctcactgccagaagtacgaagttgttcatatgttactgatgaaaggtgcaagaatcgagcgacctcacgattacttttgcaagtgcggcgattgtatggaaaagcagagacatgattcattcagccatagcaggtctcggattaatgcctacaaagggttggcaagccctgcttatctatctctgtcttccgaagatcccgttcttactgctctagagttgtccaatgagctggctaaactggccaacatcgaaaaggagtttaaaaacgattaccgaaaactgtcgatgcagtgcaaggatttcgtggtcggcgtgcttgatttgtgccgggactctgaagaggtcgaggcaatcttgaacggggacttagaaagtgctgagccgcttgaggtccatcgccacaaagcaagtctatcaagagttaagctagccattaaatacgaggtgaaaaaactggggaagattttgaggtccccttttatgaaatttgtcgcacacgccgctagcttcataatctttctaggtttgttagtgttcaacgcctctgataggtttgaggggattactaccttaccaaacattactgttaccgattacccaaagcaaatcttcagggtgaagacaactcaattcacttggactgaaatgctgattatggtgtgggtactggggatgatgtggtctgaatgtaaggagttgtggctggaaggcccccgcgagtacatccttcagctgtggaacgtgcttgactttgggatgttatctatcttcatcgccgcttttacggcccgcttcctggcgtttttgcaagcgacaaaagctcagcagtacgttgactcatatgtgcaggagtctgacctgagcgaggttaccctcccacctgagatccagtatttcacgtacgcgagagataagtggctgccctctgatccccaaatcattagtgaggggctgtatgctatagcggtggtgctatcctttagccgcatagcctatattctgcccgcgaatgagtcttttggtccgctacagatttccttaggtagaacagtaaaggatatcttcaagtttatggttctgtttatcatggtcttctttgcctttatgattgggatgttcatcctgtattcttattacctgggagccaaggtgaatgcagcgttcacgacagtggaagagtcatttaaaacccttttctggtctattttcgggttgagcgaggtgacatccgtggtgctcaaatatgatcacaaattcattgagaacatcggttacgtgctttatggcatatataatgtcacaatggtggttgttcttttgaacatgctgattgccatgattaacagttcataccaggagatcgaggacgactcagacgtagagtggaaattcgcccggagtaagctgtggctcagttactttgacgacggaaagactctgcctccacctttcagcctggtgcccagtcccaaatccttcgtgtatttcataatgcgtatcgtgaacttccccaagtgcagaagacgcagattgcaaaaggacattgagatggggatggggaacagtaagagcaggctgaatctctttacccagagtaactctcgtgtgtttgaatcccacagcttcaacagcatcctgaatcagcctaccaggtatcagcagatcatgaaaagactgatcaaaaggtatgtcttgaaagcacaggtggataaggaaaatgatgaggtcaatgaaggggaattgaaagagatcaaacaagatattagtagccttagatacgaactgcttgaggataaaagccaagcaactgaagaattggccattctcatccacaaactttctgaaaagctcaacccatctatgctgaggtgcgagtag

SEQ ID NO: 48400 - DNA, 2547 bp, Artificial Sequence
  derived and/or modified sequence
atggagggatcaccatctctgcgtagaatgaccgtcatgcgcgaaaagggcaggagacaggccgtacggggacccgcatttatgttcaacgaccgaggaacttcactgaccgctgaagaggaaaggtttttagacgccgcagagtacgggaacatccccgttgtgcggaaaatgttggaagagtcaaaaaccctgaacgtaaattgtgtcgactatatgggacaaaatgctctgcagcttgccgtaggcaacgagcatctcgaggttactgagcttctgcttaagaaggaaaacctcgcgagaatcggcgacgcactgcttctcgccatcagcaaggggtacgtccgcatcgtagaggccatccttaatcaccctgggtttgccgcttccaaacggctgactctctctccgtgtgagcaggaactacaggacgacgacttctacgcctacgacgaggacggcacgcgattttccccggacattacacccatcattttagctgctcattgccagaaatatgaagtggtgcacatgctgttgatgaaaggcgctaggatcgagcgaccacatgattatttctgcaaatgtggcgactgcatggaaaaacagagacacgattcattctcccatagccgctcccgaatcaacgcgtataaagggctggccagcccagcatacctgtcactgtcgtcagaggatcctgtcctgactgctttggaactaagcaacgaattggccaaactggcaaatatcgaaaaagagttcaagaatgattataggaagctaagtatgcagtgcaaggatttcgtcgtgggggtgctcgatctctgtagagactccgaagaggttgaggccattttgaacggagatctggagtccgctgagcctttggaggtccaccgacataaggcaagcttgagtagagttaagctggcaatcaagtacgaggtgaaaaagttcgtggcgcacccaaactgtcaacagcagcttttaacaatatggtacgaaaacctgagcggcttgagagagcagacaatcgctataaaatgtctggtggttcttgtggtggcacttgggcttccatttctcgcgatcgggtattggatcgccccttgtagcagactgggaaagattctgcgtagtcccttcatgaaattcgtggcacatgccgcatcctttatcattttcctgggactgttggtgtttaatgcgagcgatcgctttgaggggatcactacgctcccgaacatcactgtcaccgactaccccaaacagatcttcagggtgaaaaccacgcagtttacttggaccgagatgctcataatggtgtgggtgctgggcatgatgtggtccgagtgcaaagagctatggctggaaggtcccagggaatacattctccagctctggaacgtactagacttcggtatgctgagcatttttattgctgccttcaccgcgcgatttctggcattcctccaggcgactaaggcacagcagtatgtggacagctacgtgcaggagtccgatctttctgaagtgactttgccacccgagattcaatactttacatacgctagggataagtggcttcctagtgacccacagattattagtgaagggctctacgcgatcgcagtcgtgctgagcttctccagaatagcttatatcctgcctgccaatgagtcgtttggtccacttcagatctccctggggaggacagttaaggacattttcaaatttatggtcctgttcatcatggtttttttcgcttttatgattggcatgttcattctttattcatactatctaggagctaaagtgaatgctgccttcaccactgttgaggagagcttcaaaacactgttctggtcaatctttggcctgtcagaagttacgagcgtggtgctgaagtacgaccataaatttattgagaatatcggctacgtgttgtacggtatctataatgtgaccatggtggtggtgctgctgaacatgctgatagcgatgattaatagcagctatcaggaaatagaagacgatagcgatgtggagtggaaattcgctcggagcaaattatggctgtcatatttcgacgatggaaagacgctgcctccgccattctcactggtgcctagccccaaatccttcgtatattttataatgaggatagtgaactttcctaagtgtcgaaggcggaggctgcagaaggacatcgagatgggtatgggcaattccaagtctcgactgaatctgtttacccaaagtaactcacgagtgtttgaatcacacagctttaatagcattttgaaccagcctacccgctaccagcagatcatgaaacggctgataaagcgctatgttctgaaagctcaggtagataaggagaatgatgaggttaatgagggagagctcaaagagattaaacaagacatctcctctctgcgctacgagcttctcgaggataagtctcaggcgaccgaggagctggccatattgattcacaaactgagcgaaaaactgaatcccagcatgctcaggtgcgagtag

SEQ ID NO: 48401 - DNA, 2766 bp, Artificial Sequence
  derived and/or modified sequence
atgtccaccaaggttagaaagtgtaaggaacaagcaagggtgacatttccagctccagaggaagaagaagatgagggggaggacgagggggcagaaccacaacgacgacgtcgaggttggagaggggtaaatggtggcttggagcccagatcagccccttcgcagagagaaccccacggatactgcccacccccattttcgcacgggcctgacctgtccatggaaggctccccatccctccgcaggatgacggtgatgagggaaaagggcagaagacaggccgttcgcggaccagcatttatgttcaatgacagaggaacttccctcaccgcagaggaggaaagatttctggacgccgcagagtatgggaacattccggtagtgagaaaaatgctcgaagagtcgaagacgttaaatgtaaactgcgtggactacatgggacagaacgctctgcagctggctgttggaaacgaacaccttgaggtgacagagttactgctaaaaaaagaaaacctagccagaatcggggacgcgttgctgctggcaatctccaagggatatgtgagaattgttgaggcaatcctgaaccaccctggttttgcggcttcaaaacggttgaccctgtctccatgtgagcaggagctgcaggacgacgacttttacgcttacgacgaagacggcactagatttagtccagatataactcctataattctagccgcacactgtcaaaagtacgaggtcgttcacatgctcttgatgaaaggggcacggatcgaacggcctcacgattatttttgtaagtgtggcgactgcatggaaaagcagcgtcatgactccttctcccactctcgaagccggattaatgcctacaaaggcctggcatctcctgcttacctcagcttaagcagtgaggatcccgtcctgaccgccctggagttgtccaacgaacttgcaaagttggctaatattgaaaaagaatttaaaaatgactacaggaaactaagtatgcagtgcaaggattttgtggttggagtcctagatctatgtagagactccgaggaggtggaagcaatccttaacggggatttggagtcagccgagccactggaggttcaccgacacaaggcatcgttatcacgtgttaagctcgctattaaatacgaagtaaaaaagttcgtcgcacatcccaattgccagcagcagctgctgaccatctggtatgaaaatctgtcaggactccgggaacagaccatcgccattaaatgcctggtcgtgctggtagtggcactggggcttccttttttggcgattggatactggatcgcaccttgctcacgcctgggaaagatactcagatcaccatttatgaaattcgtcgcccacgcagcttcctttataatatttttagggctgctcgttttcaacgcatcagatcgcttcgagggaattacgaccttgccaaacatcacagtcactgattaccccaaacagatcttccgggtgaagacgacgcagtttacctggaccgaaatgctgattatggtttgggtcctgggtatgatgtggagcgagtgcaaagagttgtggctcgagggtcccagagagtatattctgcaactgtggaatgtgttggacttcggaatgttgtccatttttatcgccgcattcaccgctcgatttctggccttcctgcaggcaactaaggcgcagcagtacgtggattcctacgtgcaggaatctgatctctctgaggttactcttccgccagaaattcagtatttcacatatgccagagataagtggctcccttctgacccgcagataatcagcgaggggctgtatgctattgccgtggtgctctcattctctcggatcgcttatatactgccagccaacgagagcttcggcccactgcaaatttcactgggaagaactgtcaaggatattttcaagttcatggtcctcttcatcatggttttttttgcattcatgatcggcatgttcattctctacagctactacttgggagctaaagtaaatgccgcatttactacggtggaagagtcttttaaaaccctcttttggagtattttcggcttgtccgaggtgacgtcagtggtgctgaagtacgaccacaagtttattgaaaacatcggttacgtcctgtacggaatttacaatgtcacaatggtcgttgttttacttaacatgctcattgctatgattaatagctcgtaccaggaaatagaggacgactccgatgtcgagtggaagttcgccaggagcaagctgtggttgtcgtatttcgatgacggaaagacactgccgccaccttttagccttgtgccctcaccgaaaagcttcgtatattttattatgcggatagtcaattttcccaagtgtcggagacgtcggctccagaaagatatcgaaatgggcatgggtaactccaaatcacgactgaacctcttcacacagtcaaatagtcgcgtttttgagtctcattcttttaacagcattctgaaccagccaacccgataccaacagatcatgaagcgtctcattaagcggtatgtgctgaaagcacaggtagataaggagaatgacgaggtgaacgagggtgagctgaaagaaattaagcaagacatttcctcactgcggtacgagctactcgaggataagagccaggctaccgaagagttagctatcctcattcataaattaagtgagaagttgaacccaagcatgctcaggtgtgaatag

SEQ ID NO: 48402 - DNA, 2382 bp, Artificial Sequence
  derived and/or modified sequence
atggaaggatctccttcgctcaggcgaatgactgtaatgagagagaagggcaggcggcaggcggtgaggggcccagccttcatgttcaatgataggggcactagtctgaccgccgaagaggagcggttcttagatgccgctgagtatggaaacattcctgttgtccggaaaatgctcgaggagagtaagacattgaatgtgaactgcgtagactacatgggtcaaaatgccctccaacttgcagtcgggaatgaacacctggaagttactgaattgctcctaaaaaaagaaaacttggccaggataggagatgcactcctgttggccatttctaagggctatgtacgtatcgtcgaggccatccttaatcacccgggatttgcagcatctaaacgactaactctcagcccgtgcgagcaggagctccaggatgatgatttctacgcttacgatgaagacggcacgaggttttcccccgatattacccccatcattctagccgctcactgtcagaaatacgaagtggtccacatgctgttgatgaagggtgcccgaattgagcggccacacgattacttttgcaagtgcggcgattgcatggagaaacagagacacgacagtttctcacatagtcgctccaggatcaacgcctataagggactcgcatccccggcttacctgtctctctcctcagaagaccctgtgctaaccgccctggaattatctaatgagctagcaaaactcgctaacattgagaaagagttcaaaaatgactatcgcaaattaagcatgcagtgcaaagatttcgttgtgggagttctcgacctttgtcgcgatagcgaagaggtcgaagcaattctgaacggggatttggaatcagccgagcctcttgaagtgcacaggcataaagccagcctttctcgagtaaagttagccataaaatacgaggtaaagaaactcggaaaaattctgcgcagcccattcatgaaattcgtggcacatgctgcctctttcattatcttcctgggtttattggtgttcaatgcctccgaccgatttgaaggcattaccacccttcccaatatcacagttactgactacccgaaacagatcttccgcgtgaagactactcaatttacgtggacggagatgctgataatggtgtgggtgctcgggatgatgtggtcagaatgcaaggagctatggctcgagggcccaagggagtacattttgcagctgtggaatgtgttggattttgggatgctgtctatctttatcgctgcattcacagccaggttcctggcatttcttcaagcaactaaggcacagcagtatgtggactcatatgtgcaagagtctgatttgtcagaggtgacccttcccccagagatccagtacttcacatacgctagagataaatggctgccatcagatccccaaattatctctgaaggtctctacgccatagctgttgttttgtccttttccaggatcgcttatatactcccagccaatgaatcattcgggccactgcagattagcctgggcaggactgtgaaggacatctttaaattcatggtccttttcattatggtgtttttcgccttcatgatagggatgttcatattgtactcttactatctcggtgcaaaggtgaacgcagcctttaccactgtcgaagagtcatttaaaacactgttctggtcgatttttggactcagcgaggtgacgtctgtggtgctgaaatatgaccacaagtttatcgagaatataggctacgtcctttacgggatatataacgtgacaatggtcgtggtgctgttaaacatgctgatcgccatgatcaattcgtcttatcaagaaattgaagatgactctgacgttgagtggaagttcgccaggtctaaactgtggctctcctattttgatgatgggaagactcttccaccacccttctcactcgtaccaagccccaagtccttcgtttatttcatcatgcggatcgtgaacttcccaaaatgcaggaggcgcaggcttcagaaagacatcgaaatgggaatggggaactcaaaatcaagactcaacctgttcactcagagcaacagccgtgtttttgagtctcactcatttaactcaatcctcaatcagccgacccgatatcagcaaatcatgaaacgcctcattaagcggtacgttctcaaggctcaggtggacaaagaaaacgacgaggtgaatgagggggaactgaaggagataaagcaggatatttcatcattgaggtacgagctgctggaggacaaaagccaggccacagaagagctggccatcctcatacataagctgtccgaaaagctgaacccatccatgctgagatgtgagtag

SEQ ID NO: 48403 - DNA, 3675 bp, Artificial Sequence
  derived and/or modified sequence
aattaacttctcttagtcttcaagcctagtacttgaatgtcaagtacctgcaagcctcaatgtccaagacttttaagagcggaaggtacgatgagttccatctttactagggtcacaaggaaggcatgggtatatggaaatttttattattattccatctgaatatcattttctagagaataggagcttttgttctgaagggctgccggcttccttctgggatctagcagccagggttagatcacaggtgtcactttcaggcgagtagttagcaacggtatcgctagcaactgagccgacccctgcagccagaggtttgcagtgggtagtgtgtattccagaaagggccctgacatgtgaaaggaaggaatgtgccctaatattctacagttgttttatcgttgctactgattaggtccatggagggaagcccatccctgagacgcatgacagtgatgcgggagaagggccggcgccaggctgtcaggggcccggccttcatgttcaatgaccgcggcaccagcctcaccgccgaggaggagcgcttcctcgacgccgccgagtacggcaacatcccagtggtgcgcaagatgctggaggagtccaagacgctgaacgtcaactgcgtggactacatgggccagaacgcgctgcagctggctgtgggcaacgagcacctggaggtgaccgagctgctgctcaagaaggagaacctggcgcgcattggcgacgccctgctgctcgccatcagcaagggctacgtgcgcatcgtagaggccatcctcaaccaccctggcttcgcggccagcaagcgtctcactctgagcccctgtgagcaggagctgcaggacgacgacttctacgcttacgacgaggacggcacgcgcttctcgccggacatcacccccatcatcctggcggcgcactgccagaaatacgaagtggtgcacatgctgctgatgaagggtgccaggatcgagcggccgcacgactatttctgcaagtgcggggactgcatggagaagcagaggcacgactccttcagccactcacgctcgaggatcaatgcctacaaggggctggccagcccggcttacctctcattgtccagcgaggacccggtgcttacggccctagagctcagcaacgagctggccaagctggccaacatagagaaggagttcaagaatgactatcggaagctctccatgcaatgcaaagactttgtagtgggtgtgctggatctctgccgagactcagaagaggtagaagccattctgaatggagatctggaatcagcagagcctctggaggtacacaggcacaaagcttcattaagtcgtgtcaaacttgccattaagtatgaagtcaaaaagtttgtggctcatcccaactgccagcagcagctcttgacgatctggtatgagaacctctcaggcctaagggagcagaccatagctatcaagtgtctcgttgtgctggtcgtggccctgggccttccattcctggccattggctactggatcgcaccttgcagcaggctggggaaaattctgcgaagcccttttatgaagtttgtagcacatgcagcttctttcatcatcttcctgggtctgcttgtgttcaatgcctcagacaggttcgaaggcatcaccacgctgcccaatatcacagttactgactatcccaaacagatcttcagggtgaaaaccacccagtttacatggactgaaatgctaattatggtctgggttcttggaatgatgtggtctgaatgtaaagagctctggctggaaggacctagggaatacattttgcagttgtggaatgtgcttgactttgggatgctgtccatcttcattgctgctttcacagccagattcctagctttccttcaggcaacgaaggcacaacagtatgtggacagttacgtccaagagagtgacctcagtgaagtgacactcccaccagagatacagtatttcacttatgctagagataaatggctcccttctgaccctcagattatatctgaaggcctttatgccatagctgttgtgctcagcttctctcggattgcgtacatcctccctgcaaatgagagctttggccccctgcagatctctcttggaaggactgtaaaggacatattcaagttcatggtcctctttattatggtgttttttgcctttatgattggcatgttcatactttattcttactaccttggggctaaagttaatgctgcttttaccactgtagaagaaagtttcaagactttattttggtcaatatttgggttgtctgaagtgacttccgttgtgctcaaatatgatcacaaattcatagaaaatattggatacgttctttatggaatatacaatgtaactatggtggtcgttttactcaacatgctaattgctatgattaatagctcatatcaagaaattgaggatgacagtgatgtagaatggaagtttgctcgttcaaaactttggttatcctattttgatgatggaaaaacattacctccacctttcagtctagttcctagtccaaaatcatttgtttatttcatcatgcgaattgttaactttcccaaatgcagaaggagaaggcttcagaaggatatagaaatgggaatgggtaactcaaagtccaggttaaacctcttcactcagtctaactcaagagtttttgaatcacacagttttaacagcattctcaatcagccaacacgttatcagcagataatgaaaagacttataaagcggtatgttttgaaagcacaagtagacaaagaaaatgatgaagttaatgaaggtgaattaaaagaaatcaagcaagatatctccagccttcgttatgaacttttggaagacaagagccaagcaactgaggaattagccattctaattcataaacttagtgagaaactgaatcccagcatgctgagatgtgaatgatgcagcaacctggatttggctttgactatagcacaaatgtgggcaataatatttctaagtatgaaatacttgaaaaactatgatgtaaatttttagtattaactacctttatcatgtgaacctttaaaagttagctcttaatggttttattgttttatcacatgaaaatgcattttatttgtctgctttgacattacagtggcataccattgtgttgaaaagcccaatattactatattattgaaacttttattcattttagagtaaactccacatctttgcactacctgtttgcctccaagagactatcagttccttggggacagggaccatgtcttattcatctttgtgtctccagcatctagtacagtgcctggtatatagtaggtgctcaataaatgttgaaaccaactgaactgccaacaaaataaaaataaaaagtcttcactatgtagcataccttcccttgtccaagttctgaagaggttttttttttttttttttaatagaaactgaagacattttacaaccagctatgacttggtaagacattcttagaattttaggtgtcactgataatcctagaaccactgagccccaagtgaagaatttaacaacaaaatgggttaatgaaaaatataattacattgtatatttaagtttcatagaattatttaaaacaacacattaaagatttttctaaaatata

SEQ ID NO: 48404 - DNA, 3548 bp, Artificial Sequence
  derived and/or modified sequence
gggaagactgcactgccgcgaaggcggaggaggccggcagccggcacccccacactcggaccgcagccggcgcgatgtccaccaaggtcaggaagtgcaaagaacaagcaagggtgaccttcccggcgccggaggaggaggaagacgagggcgaggacgagggcgcggagccgcagcgccgccgccggggctggaggggcgtcaacggggggctggagccgcgctcggcgccctcgcagcgggagccgcacggctactgcccgccgcccttctcccacgggccggacctgtccatggagggaagcccatccctgagacgcatgacagtgatgcgggagaagggccggcgccaggctgtcaggggcccggccttcatgttcaatgaccgcggcaccagcctcaccgccgaggaggagcgcttcctcgacgccgccgagtacggcaacatcccagtggtgcgcaagatgctggaggagtccaagacgctgaacgtcaactgcgtggactacatgggccagaacgcgctgcagctggctgtgggcaacgagcacctggaggtgaccgagctgctgctcaagaaggagaacctggcgcgcattggcgacgccctgctgctcgccatcagcaagggctacgtgcgcatcgtagaggccatcctcaaccaccctggcttcgcggccagcaagcgtctcactctgagcccctgtgagcaggagctgcaggacgacgacttctacgcttacgacgaggacggcacgcgcttctcgccggacatcacccccatcatcctggcggcgcactgccagaaatacgaagtggtgcacatgctgctgatgaagggtgccaggatcgagcggccgcacgactatttctgcaagtgcggggactgcatggagaagcagaggcacgactccttcagccactcacgctcgaggatcaatgcctacaaggggctggccagcccggcttacctctcattgtccagcgaggacccggtgcttacggccctagagctcagcaacgagctggccaagctggccaacatagagaaggagttcaagaatgactatcggaagctctccatgcaatgcaaagactttgtagtgggtgtgctggatctctgccgagactcagaagaggtagaagccattctgaatggagatctggaatcagcagagcctctggaggtacacaggcacaaagcttcattaagtcgtgtcaaacttgccattaagtatgaagtcaaaaagtttgtggctcatcccaactgccagcagcagctcttgacgatctggtatgagaacctctcaggcctaagggagcagaccatagctatcaagtgtctcgttgtgctggtcgtggccctgggccttccattcctggccattggctactggatcgcaccttgcagcaggctggggaaaattctgcgaagcccttttatgaagtttgtagcacatgcagcttctttcatcatcttcctgggtctgcttgtgttcaatgcctcagacaggttcgaaggcatcaccacgctgcccaatatcacagttactgactatcccaaacagatcttcagggtgaaaaccacccagtttacatggactgaaatgctaattatggtctgggttcttggaatgatgtggtctgaatgtaaagagctctggctggaaggacctagggaatacattttgcagttgtggaatgtgcttgactttgggatgctgtccatcttcattgctgctttcacagccagattcctagctttccttcaggcaacgaaggcacaacagtatgtggacagttacgtccaagagagtgacctcagtgaagtgacactcccaccagagatacagtatttcacttatgctagagataaatggctcccttctgaccctcagattatatctgaaggcctttatgccatagctgttgtgctcagcttctctcggattgcgtacatcctccctgcaaatgagagctttggccccctgcagatctctcttggaaggactgtaaaggacatattcaagttcatggtcctctttattatggtgttttttgcctttatgattggcatgttcatactttattcttactaccttggggctaaagttaatgctgcttttaccactgtagaagaaagtttcaagactttattttggtcaatatttgggttgtctgaagtgacttccgttgtgctcaaatatgatcacaaattcatagaaaatattggatacgttctttatggaatatacaatgtaactatggtggtcgttttactcaacatgctaattgctatgattaatagctcatatcaagaaattgaggatgacagtgatgtagaatggaagtttgctcgttcaaaactttggttatcctattttgatgatggaaaaacattacctccacctttcagtctagttcctagtccaaaatcatttgtttatttcatcatgcgaattgttaactttcccaaatgcagaaggagaaggcttcagaaggatatagaaatgggaatgggtaactcaaagtccaggttaaacctcttcactcagtctaactcaagagtttttgaatcacacagttttaacagcattctcaatcagccaacacgttatcagcagataatgaaaagacttataaagcggtatgttttgaaagcacaagtagacaaagaaaatgatgaagttaatgaaggtgaattaaaagaaatcaagcaagatatctccagccttcgttatgaacttttggaagacaagagccaagcaactgaggaattagccattctaattcataaacttagtgagaaactgaatcccagcatgctgagatgtgaatgatgcagcaacctggatttggctttgactatagcacaaatgtgggcaataatatttctaagtatgaaatacttgaaaaactatgatgtaaatttttagtattaactacctttatcatgtgaacctttaaaagttagctcttaatggttttattgttttatcacatgaaaatgcattttatttgtctgctttgacattacagtggcataccattgtgttgaaaagcccaatattactatattattgaaacttttattcattttagagtaaactccacatctttgcactacctgtttgcctccaagagactatcagttccttggggacagggaccatgtcttattcatctttgtgtctccagcatctagtacagtgcctggtatatagtaggtgctcaataaatgttgaaaccaactgaactgccaacaaaataaaaataaaaagtcttcactatgtagcataccttcccttgtccaagttctgaagaggttttttttttttttttttaatagaaactgaagacattttacaaccagctatgacttggtaagacattcttagaattttaggtgtcactgataatcctagaaccactgagccccaagtgaagaatttaacaacaaaatgggttaatgaaaaatataattacattgtatatttaagtttcatagaattatttaaaacaacacattaaagatttttctaaaatat

SEQ ID NO: 48405 - DNA, 2382 bp, Artificial Sequence
  derived and/or modified sequence
atggagggaagcccatccctgagacgcatgacagtgatgcgggagaagggccggcgccaggctgtcaggggcccggccttcatgttcaatgaccgcggcaccagcctcaccgccgaggaggagcgcttcctcgacgccgccgagtacggcaacatcccagtggtgcgcaagatgctggaggagtccaagacgctgaacgtcaactgcgtggactacatgggccagaacgcgctgcagctggctgtgggcaacgagcacctggaggtgaccgagctgctgctcaagaaggagaacctggcgcgcattggcgacgccctgctgctcgccatcagcaagggctacgtgcgcatcgtagaggccatcctcaaccaccctggcttcgcggccagcaagcgtctcactctgagcccctgtgagcaggagctgcaggacgacgacttctacgcttacgacgaggacggcacgcgcttctcgccggacatcacccccatcatcctggcggcgcactgccagaaatacgaagtggtgcacatgctgctgatgaagggtgccaggatcgagcggccgcacgactatttctgcaagtgcggggactgcatggagaagcagaggcacgactccttcagccactcacgctcgaggatcaatgcctacaaggggctggccagcccggcttacctctcattgtccagcgaggacccggtgcttacggccctagagctcagcaacgagctggccaagctggccaacatagagaaggagttcaagaatgactatcggaagctctccatgcaatgcaaagactttgtagtgggtgtgctggatctctgccgagactcagaagaggtagaagccattctgaatggagatctggaatcagcagagcctctggaggtacacaggcacaaagcttcattaagtcgtgtcaaacttgccattaagtatgaagtcaaaaagctggggaaaattctgcgaagcccttttatgaagtttgtagcacatgcagcttctttcatcatcttcctgggtctgcttgtgttcaatgcctcagacaggttcgaaggcatcaccacgctgcccaatatcacagttactgactatcccaaacagatcttcagggtgaaaaccacccagtttacatggactgaaatgctaattatggtctgggttcttggaatgatgtggtctgaatgtaaagagctctggctggaaggacctagggaatacattttgcagttgtggaatgtgcttgactttgggatgctgtccatcttcattgctgctttcacagccagattcctagctttccttcaggcaacgaaggcacaacagtatgtggacagttacgtccaagagagtgacctcagtgaagtgacactcccaccagagatacagtatttcacttatgctagagataaatggctcccttctgaccctcagattatatctgaaggcctttatgccatagctgttgtgctcagcttctctcggattgcgtacatcctccctgcaaatgagagctttggccccctgcagatctctcttggaaggactgtaaaggacatattcaagttcatggtcctctttattatggtgttttttgcctttatgattggcatgttcatactttattcttactaccttggggctaaagttaatgctgcttttaccactgtagaagaaagtttcaagactttattttggtcaatatttgggttgtctgaagtgacttccgttgtgctcaaatatgatcacaaattcatagaaaatattggatacgttctttatggaatatacaatgtaactatggtggtcgttttactcaacatgctaattgctatgattaatagctcatatcaagaaattgaggatgacagtgatgtagaatggaagtttgctcgttcaaaactttggttatcctattttgatgatggaaaaacattacctccacctttcagtctagttcctagtccaaaatcatttgtttatttcatcatgcgaattgttaactttcccaaatgcagaaggagaaggcttcagaaggatatagaaatgggaatgggtaactcaaagtccaggttaaacctcttcactcagtctaactcaagagtttttgaatcacacagttttaacagcattctcaatcagccaacacgttatcagcagataatgaaaagacttataaagcggtatgttttgaaagcacaagtagacaaagaaaatgatgaagttaatgaaggtgaattaaaagaaatcaagcaagatatctccagccttcgttatgaacttttggaagacaagagccaagcaactgaggaattagccattctaattcataaacttagtgagaaactgaatcccagcatgctgagatgtgaatga

SEQ ID NO: 48406 - protein, 223 aa, Artificial Sequence
  derived and/or modified sequence
MEDVKLEFPSLPQCKEDAEEWTYPMRREMQEILPGLFLGPYSSAMKSKLPVLQKHGITHIICIRQNIEANFIKPNFQQLFRYLVLDIADNPVENIIRFFPMTKEFIDGSLQMGGKVLVHGNAGISRSAAFVIAYIMETFGMKYRDAFAYVQERRFCINPNAGFVHQLQEYEAIYLAKLTIQMMSPLQIERSLSVHSGTTGSLKRTHEEEDDFGTMQVATAQNG

SEQ ID NO: 48407 - DNA, 672 bp, Artificial Sequence
  derived and/or modified sequence
atggaggacgtgaagctggagttccccagcctgccccagtgcaaggaggacgccgaggagtggacctaccccatgagaagagagatgcaggagatcctgcccggcctgttcctgggcccctacagcagcgccatgaagagcaagctgcccgtgctgcagaagcacggcatcacccacatcatctgcatcagacagaacatcgaggccaacttcatcaagcccaacttccagcagctgttcagatacctggtgctggacatcgccgacaaccccgtggagaacatcatcagattcttccccatgaccaaggagttcatcgacggcagcctgcagatgggcggcaaggtgctggtgcacggcaacgccggcatcagcagaagcgccgccttcgtgatcgcctacatcatggagaccttcggcatgaagtacagagacgccttcgcctacgtgcaggagagaagattctgcatcaaccccaacgccggcttcgtgcaccagctgcaggagtacgaggccatctacctggccaagctgaccatccagatgatgagccccctgcagatcgagagaagcctgagcgtgcacagcggcaccaccggcagcctgaagagaacccacgaggaggaggacgacttcggcaccatgcaggtggccaccgcccagaacggctag

SEQ ID NO: 48408 - DNA, 4857 bp, Artificial Sequence
  derived and/or modified sequence
cctgtgctggatcctgggcggcctgaggggtacggagactctgggggagggagacggcagcggcatggcggccgggtgtaagacgcccgaccctcctcttccctgtcttcgccgccgccgctgctggagtcactgggaccctgtagtctgcgtgtgttagttgtaatcccgccgccctcctgtcagccctccgctccgccggccctccttccttccgccgccgcagccagcccgagggtcggccggctgtgtaacactctcccaccccacccaccagcccgcgggccagcaccatggaggacgtgaagctggagttcccttcccttccacagtgcaaggaagacgccgaggagtggacctaccctatgagacgagagatgcaggaaattttacctggattgttcttaggcccatattcatctgctatgaaaagcaagctacctgtactacagaaacatggaataacccatataatatgcatacgacaaaatattgaagcaaactttattaaaccaaactttcagcagttatttagatatttagtcctggatattgcagataatccagttgaaaatataatacgttttttccctatgactaaggaatttattgatgggagcttacaaatgggaggaaaagttcttgtgcatggaaatgcagggatctccagaagtgcagcctttgttattgcatacattatggaaacatttggaatgaagtacagagatgcttttgcttatgttcaagaaagaagattttgtattaatcctaatgctggatttgtccatcaacttcaggaatatgaagccatctacctagcaaaattaacaatacagatgatgtcaccactccagatagaaaggtcattatctgttcattctggtaccacaggcagtttgaagagaacacatgaagaagaggatgattttggaaccatgcaagtggcgactgcacagaatggctgacttgaagagcaacatcatagagtgtgaatttctatttgggaaggagaaaatacaagagaaaattataatgtaaaatggtaaaaacataagtagtttttttttcaattacatgttgcttccagacatacttctctgcaacttgttgagcaacattttaagatgttggacttctgcaatagatgacactgatggttttactcctttttttaaaaacacatgcgcgcgcacacacacatgctttacaagttttattataaaccaagaattttggacttgcaaagaggtattattgcaataatgcacttttcatacttgaaatttatttgtatgatataaagttattactttaaacaaaatgcaagtatggggggattgtttataaagtttgggtaatttataacaaaatttgctaaggtttgctaaaaattcatttttctgttctatatattacatttttaacataattttacagttcaattttatgatggagcctcttacagaaacattaacaaaatgcaggaatctgccacatttcttttttagtataacttaatagcttaattaccattttattttttatacttcttccattattaatctttaaatcatgatcctaattagctgtccttactttaacttgatctaattattgcttcctttcttattactttcctaatttttctatattttaaaaactacagtttccatgataaaaggaaaacgttttgatttatagtaccaagtgcttaaacacaaggatagtgttagattttcgagtgactttcctttttgcattttttggcagtaaaagccaaacgttgtatttgttcttttcagagttgtccagcccttttttcctttgtccaaaatgattctaaatagaatctaataaaccaatgtagcattatttttttctaaatgaagccccaaaaaagaaaagtgccttgcatcatttaaaaaaaataattaaatcctcatggcctctaaattagtatgtagaacactgaaaagttcttaacatttttgtgtaatttcctttctttttaaaccataaattagtttaaactgaaagtacgaggctggaagaaatattagtaaattatttggaatatagaatgtttactctttctttttatgttgtcttaatgattctgtgagattgttccggctcaaacagaagcttttctttggggaaggtgatttgtgggagactagtgtattttaaattagcattttaatccattcttgacattcagttagtccagatctgccccataatttgctttagtaaagtcactttatggatttttggctatgttttagtttgtgtgtataaaagttctaagaaaacatttttgctattttaagtatgtaagggaagagaggagtgtttttaactttttatagttgatgactttagggtagcacaaacaaaactcctttgtatctaacttttctcaatcctctcttgaggtgctttactaatgggaatgatttctgtatgttcccttggtaccaagaggtactatgcaaagtaacctattacaccaagttacttgctttgctttcctctctatgatgtgataatacagtaaaagctttcttacccagcatagtgggagagtggagattaattaaaattgttaattaagagttaattcctattgacccaggtgatatttctcttctgatttccctccccttcccttctcttatcttaccactgtgaaaacagcatattgttaatctcgttgtcgtccagtattctgctttgtgattaggtcttttgatgtacagtggtctagtggagtcaagattcgcattgggttttctaaaattccagttgataaaagttccagataacacagctttcctgtatatagatcactattgggcaggtcagcaaagatctcttacagtgtaataataatctatgatgcttcatttagcagaaactctgcttaaaagaatcttcataatagtaagtttaggttttaaaaacttgtttcataaatatacatatatcctctctagtagtctggccaaaagaacagattttgttattgataatttgtagctggtaattttccacattttctatccactgtaatttttatgttgtcactgaagtgcctgcccagtactgtatattacagtctctcacaaacactgggaaaagggactgtcatcatcttgagtactctgtgtgtatatatatatatatagatagatagatttttttttttttttgagacagagtctctaatgtcacccaggctggagtacagtggcacaatcttggctcactgcaacctccacctcctgggttcaagtgattttcctgcctcagcctcccaagtagctggggttagaggcacatgccaccatgcctggctaatttttgtagttttagtagagatggggtttcaccatgttggccaggctggtctcaaactcctgacctcaagtgatccacccacctcggcctcccaaagtgctgggattacaggcgtgagccactgcgcctggctgagtacaatattaatgtagacaaaccatgaagtttattatttcatataagaacattacaggtttgttttttcttgcatgtctgtccacctaatgtttaagtagttctggtagctcttcctattctttattctatttgattccatttctgtgattcttttattaccactgatgttttgtgatagttaactatgataaatttaactgatcatgatttatcttctagagtatttaaataatgtatgagtgaccacccaattccaacattaaaagtgtaatctgggcccataatttatagtgaaattgtatcaaaacatagggaaactgtattactgtccattttgaaaatatgaaacttgagtattgaaaatattcaaacatggaatggcagtattctaatttcagttagttggttcatgttaatttcttacctgttagatgtttaaactgcagtgacctttacttgtatctactctgtggtggaaatgttaaaccatgatagcttttgctaccaactcaaccacttaacttttagagcagttttggggagagtttatgcttcatctgagtttagaagtaatgtcagaaaatgttaagcatgtctgtattaagaaaatataaggtttctaattgtcttattaatatggtaattcaagtgaattagaaatatttaactgcaatcttgaattataaagttgagatatatatatatatgtatcaagatctcaacttgatgtaaagtaaatgagcagttacctggcggatttttttttttttaaataactgatttaatccataatcccataacaaacatagcttcacctcagtattttctttctttctttgttcaacagtgctccgataagggaatgctagaaaatagatgagaagtactgaaagacctttttttttaattgattagaaaagtaagtctctagggtctttgaatgctggaatttttttttttttttttgtctttcccatctgtggcagctaaaacaaaaatcactcaaaatattcaggtttacatgttagctctctctcatagggagctgccatacctcacagttcaaagtgtattctatagatcagtaacattatactgacatgtaattgcaatttactatgcagcaaaaatgattcaagaagaaaaataacctacagtgtctgtatacctttgtatacacaattgcttaagttactctgcttttaacatttgtacttggataaaatgcttatgtctgtataggaatgtcacagtgcaagatgctgctagcccaggcacaaagtattaaaattattttgtgaagattggtggttgtattaaaactgctgtgccattatacctccaaaatattgaaaa

SEQ ID NO: 48409 - DNA, 672 bp, Artificial Sequence
  derived and/or modified sequence
atggaggacgtgaaacttgaatttccctcactcccacaatgtaaagaggacgcagaggagtggacctacccaatgaggagagaaatgcaggaaattcttcctggcctcttcctcggtccctactcttctgctatgaaaagcaaattacccgttttgcagaaacacggtattacacatattatttgtattcgacagaatatcgaggccaacttcattaaacctaattttcagcagctgttcaggtacctggtgctcgacatagcagataatcctgtggaaaacataatcaggttctttcccatgacaaaagagtttatcgatgggagcttacagatgggcgggaaggtgctagtgcacgggaatgctggcatttctcggtctgccgcctttgtgatcgcctacatcatggaaacatttggtatgaagtaccgcgacgctttcgcttacgtgcaggaacggcgcttctgtataaatcccaacgcagggtttgtgcaccagttgcaggagtacgaggcgatctaccttgccaagctgacaattcaaatgatgtcacccctccagatcgaacgcagtctgtcggtacattcaggtacgaccggtagccttaagaggactcacgaggaggaagatgacttcggcacaatgcaggttgctaccgctcagaatggatag

SEQ ID NO: 48410 - DNA, 672 bp, Artificial Sequence
  derived and/or modified sequence
atggaggatgtgaaactggaatttccgtctttgcctcaatgcaaagaggacgcagaggaatggacctatcctatgagacgggaaatgcaggagatcctaccggggctgtttcttggcccatatagctcagctatgaagtccaagctccccgtcctgcagaagcatggaatcacccacatcatctgcataaggcaaaacatcgaggcaaactttatcaaaccaaatttccagcagctgtttagatacctggttctcgatatcgcagataacccggttgaaaacataatacgattttttcctatgactaaagaatttatcgacggctctctgcagatgggcgggaaggtgttggtgcacggtaacgcaggcatttcgcgatctgccgccttcgttatagcttacattatggagaccttcggcatgaaataccgcgacgcgttcgcatacgttcaggagagacggttctgtatcaaccctaatgcaggctttgtgcaccagttgcaggaatacgaggctatctacctcgccaaactcactatccagatgatgtctcctctccagatcgagagatctctctcagtgcactccgggaccactggatctcttaagcggacacatgaggaagaagacgactttggtactatgcaggtcgccaccgctcagaatggttag

SEQ ID NO: 48411 - DNA, 672 bp, Artificial Sequence
  derived and/or modified sequence
atggaggatgtgaagctggagttccccagcctgccccagtgcaaggaggatgctgaggagtggacctaccccatgaggcgggagatgcaggagatcctgcccggcctcttcctgggcccctacagcagcgccatgaagagcaagctgcctgtgctgcagaagcacggcatcacccacatcatctgcatccggcagaacatcgaggccaacttcatcaagcccaacttccagcagctgttccgctacctggtgctggacattgctgacaaccctgtggagaacatcatccgcttcttccccatgaccaaggagttcattgatggcagcctgcagatgggcggcaaggtgctggtgcatggaaatgccggcatcagccgctctgctgccttcgtcatcgcctacatcatggagaccttcggcatgaagtacagagatgcctttgcctacgtgcaggagcggcgcttctgcatcaaccccaatgccggctttgtgcaccagctgcaggagtatgaggccatctacctggccaagctgaccatccagatgatgagccccctgcagatcgagaggagcctgtctgtgcacagcggcaccaccggcagcctgaagaggacccatgaggaggaggatgactttggcaccatgcaggtggccacagcccagaatggatag

SEQ ID NO: 48412 - DNA, 672 bp, Artificial Sequence
  derived and/or modified sequence
atggaggacgtgaagctggagttccccagcctgccccagtgcaaggaggacgccgaggagtggacttatcccatgagaagggaaatgcaggagatcctgccaggcttgtttctgggcccctatagttcagccatgaagagtaagttaccagtactgcagaagcacgggataacacatattatttgcatccgacagaacatcgaggccaattttattaagccgaactttcagcaactgttcaggtacctggtactcgacattgctgataatcccgtcgagaatataatccggttcttccctatgactaaggaattcatcgacgggtccctccagatgggcgggaaggtcctcgtgcacgggaacgcgggaatttcacgtagtgctgcctttgtgatcgcctacattatggagacatttggcatgaagtatcgcgatgcattcgcctatgtgcaggagcggagattctgtatcaaccctaatgctggatttgtccatcagctgcaggaatatgaggccatttacctggctaaacttacaatccaaatgatgtcccctttgcagattgagaggtccctcagcgtccacagtggaaccaccggtagcctcaagcgtacgcacgaggaagaagacgacttcggtaccatgcaggtggcgacagcccaaaatgggtag

SEQ ID NO: 48413 - DNA, 672 bp, Artificial Sequence
  derived and/or modified sequence
atggaggacgtgaagctggagttccccagcctgccccagtgcaaggaagacgccgaggagtggacgtaccccatgcgtagagagatgcaggagattctgcctggactcttcctggggccttatagttctgccatgaaatccaagctgcctgtgttgcaaaagcatggcattacgcatatcatatgcataagacagaacattgaggcgaacttcataaagcctaacttccagcagttattcaggtatctggtgcttgatatcgcagacaatcccgtggaaaacatcatcaggtttttccctatgactaaggagtttatcgatgggtccctccaaatgggagggaaggtacttgtacacggcaatgctgggatttcacgctctgctgcatttgtgattgcttacattatggagactttcgggatgaagtacagagacgcctttgcgtatgtccaggaacgacgtttctgtataaatccaaatgcagggttcgtccaccaactccaggaatacgaagctatttatctggcgaaactcaccattcagatgatgtctccgctgcagattgagaggagtctgtccgtgcatagtgggaccacagggagcctgaagaggacacacgaagaagaagatgacttcggaaccatgcaagtggctactgcacagaacggatag

SEQ ID NO: 48414 - DNA, 672 bp, Artificial Sequence
  derived and/or modified sequence
atggaggatgtgaaactagagttcccttccctcccacagtgtaaggaagacgccgaggaatggacatatcccatgcggagagaaatgcaggagatcctgcctggactgttcctggggccttacagctccgccatgaagtcaaaactccctgtcctgcagaagcacgggattactcatatcatatgtatccgccagaacattgaggcgaacttcattaaacctaattttcagcagctttttcgctaccttgtcctggacatagccgataacccagtagaaaacatcattaggttctttcccatgacaaaggaatttattgacgggtcactgcagatggggggtaaggtgttggtgcatgggaatgccggaatctctcgatctgcagcctttgtgattgcctatataatggaaacattcggcatgaaataccgcgatgccttcgcctacgtgcaggaacgcagattctgcatcaacccaaatgccggatttgttcaccagctgcaagaatacgaagccatctatcttgcaaagttgaccattcagatgatgagccccctccagatagaacgatcactctcagtgcatagtggaaccaccgggtctttaaagagaacacacgaagaggaggacgacttcggcaccatgcaggtagcgactgcccagaacgggtag

SEQ ID NO: 48415 - DNA, 672 bp, Artificial Sequence
  derived and/or modified sequence
atggaagacgtgaagctggagttcccttccttacctcagtgcaaagaagatgctgaagagtggacctaccccatgagacgagagatgcaggaaatccttcccggtttgtttcttggtccctactcctccgctatgaagtctaagctcccagtactccaaaaacacgggataacacacattatttgcatccggcagaacatagaggctaattttattaagcccaatttccagcagctattcaggtacctggtcctggatattgcagacaacccagtggaaaatataattaggttttttccaatgaccaaggagttcattgacgggagcctgcagatgggaggtaaggtgctggttcatggtaacgccggtattagccgctccgccgcattcgtgatagcatacatcatggagactttcggcatgaagtatagagatgccttcgcctacgtacaggaaagaagattctgtatcaaccctaacgcaggctttgtgcaccagctccaggagtacgaggccatatatcttgctaaactgacaatccagatgatgtcccccctgcaaattgagcggtccctgtccgtgcactctggcacgacaggttcactgaaaaggacgcacgaagaggaagatgacttcggcaccatgcaggtggccactgctcaaaatgggtag

SEQ ID NO: 48416 - DNA, 4554 bp, Artificial Sequence
  derived and/or modified sequence
ttcctgtgctggatcctgggcggcctgagggcccgcgggccagcaccatggaggacgtgaagctggagttcccttcccttccacagtgcaaggaagacgccgaggagtggacctaccctatgagacgagagatgcaggaaattttacctggattgttcttaggcccatattcatctgctatgaaaagcaagctacctgtactacagaaacatggaataacccatataatatgcatacgacaaaatattgaagcaaactttattaaaccaaactttcagcagttatttagatatttagtcctggatattgcagataatccagttgaaaatataatacgttttttccctatgactaaggaatttattgatgggagcttacaaatgggaggaaaagttcttgtgcatggaaatgcagggatctccagaagtgcagcctttgttattgcatacattatggaaacatttggaatgaagtacagagatgcttttgcttatgttcaagaaagaagattttgtattaatcctaatgctggatttgtccatcaacttcaggaatatgaagccatctacctagcaaaattaacaatacagatgatgtcaccactccagatagaaaggtcattatctgttcattctggtaccacaggcagtttgaagagaacacatgaagaagaggatgattttggaaccatgcaagtggcgactgcacagaatggctgacttgaagagcaacatcatagagtgtgaatttctatttgggaaggagaaaatacaagagaaaattataatgtaaaatggtaaaaacataagtagtttttttttcaattacatgttgcttccagacatacttctctgcaacttgttgagcaacattttaagatgttggacttctgcaatagatgacactgatggttttactcctttttttaaaaacacatgcgcgcgcacacacacatgctttacaagttttattataaaccaagaattttggacttgcaaagaggtattattgcaataatgcacttttcatacttgaaatttatttgtatgatataaagttattactttaaacaaaatgcaagtatggggggattgtttataaagtttgggtaatttataacaaaatttgctaaggtttgctaaaaattcatttttctgttctatatattacatttttaacataattttacagttcaattttatgatggagcctcttacagaaacattaacaaaatgcaggaatctgccacatttcttttttagtataacttaatagcttaattaccattttattttttatacttcttccattattaatctttaaatcatgatcctaattagctgtccttactttaacttgatctaattattgcttcctttcttattactttcctaatttttctatattttaaaaactacagtttccatgataaaaggaaaacgttttgatttatagtaccaagtgcttaaacacaaggatagtgttagattttcgagtgactttcctttttgcattttttggcagtaaaagccaaacgttgtatttgttcttttcagagttgtccagcccttttttcctttgtccaaaatgattctaaatagaatctaataaaccaatgtagcattatttttttctaaatgaagccccaaaaaagaaaagtgccttgcatcatttaaaaaaaataattaaatcctcatggcctctaaattagtatgtagaacactgaaaagttcttaacatttttgtgtaatttcctttctttttaaaccataaattagtttaaactgaaagtacgaggctggaagaaatattagtaaattatttggaatatagaatgtttactctttctttttatgttgtcttaatgattctgtgagattgttccggctcaaacagaagcttttctttggggaaggtgatttgtgggagactagtgtattttaaattagcattttaatccattcttgacattcagttagtccagatctgccccataatttgctttagtaaagtcactttatggatttttggctatgttttagtttgtgtgtataaaagttctaagaaaacatttttgctattttaagtatgtaagggaagagaggagtgtttttaactttttatagttgatgactttagggtagcacaaacaaaactcctttgtatctaacttttctcaatcctctcttgaggtgctttactaatgggaatgatttctgtatgttcccttggtaccaagaggtactatgcaaagtaacctattacaccaagttacttgctttgctttcctctctatgatgtgataatacagtaaaagctttcttacccagcatagtgggagagtggagattaattaaaattgttaattaagagttaattcctattgacccaggtgatatttctcttctgatttccctccccttcccttctcttatcttaccactgtgaaaacagcatattgttaatctcgttgtcgtccagtattctgctttgtgattaggtcttttgatgtacagtggtctagtggagtcaagattcgcattgggttttctaaaattccagttgataaaagttccagataacacagctttcctgtatatagatcactattgggcaggtcagcaaagatctcttacagtgtaataataatctatgatgcttcatttagcagaaactctgcttaaaagaatcttcataatagtaagtttaggttttaaaaacttgtttcataaatatacatatatcctctctagtagtctggccaaaagaacagattttgttattgataatttgtagctggtaattttccacattttctatccactgtaatttttatgttgtcactgaagtgcctgcccagtactgtatattacagtctctcacaaacactgggaaaagggactgtcatcatcttgagtactctgtgtgtatatatatatatatagatagatagatttttttttttttttgagacagagtctctaatgtcacccaggctggagtacagtggcacaatcttggctcactgcaacctccacctcctgggttcaagtgattttcctgcctcagcctcccaagtagctggggttagaggcacatgccaccatgcctggctaatttttgtagttttagtagagatggggtttcaccatgttggccaggctggtctcaaactcctgacctcaagtgatccacccacctcggcctcccaaagtgctgggattacaggcgtgagccactgcgcctggctgagtacaatattaatgtagacaaaccatgaagtttattatttcatataagaacattacaggtttgttttttcttgcatgtctgtccacctaatgtttaagtagttctggtagctcttcctattctttattctatttgattccatttctgtgattcttttattaccactgatgttttgtgatagttaactatgataaatttaactgatcatgatttatcttctagagtatttaaataatgtatgagtgaccacccaattccaacattaaaagtgtaatctgggcccataatttatagtgaaattgtatcaaaacatagggaaactgtattactgtccattttgaaaatatgaaacttgagtattgaaaatattcaaacatggaatggcagtattctaatttcagttagttggttcatgttaatttcttacctgttagatgtttaaactgcagtgacctttacttgtatctactctgtggtggaaatgttaaaccatgatagcttttgctaccaactcaaccacttaacttttagagcagttttggggagagtttatgcttcatctgagtttagaagtaatgtcagaaaatgttaagcatgtctgtattaagaaaatataaggtttctaattgtcttattaatatggtaattcaagtgaattagaaatatttaactgcaatcttgaattataaagttgagatatatatatatatgtatcaagatctcaacttgatgtaaagtaaatgagcagttacctggcggatttttttttttttaaataactgatttaatccataatcccataacaaacatagcttcacctcagtattttctttctttctttgttcaacagtgctccgataagggaatgctagaaaatagatgagaagtactgaaagacctttttttttaattgattagaaaagtaagtctctagggtctttgaatgctggaatttttttttttttttttgtctttcccatctgtggcagctaaaacaaaaatcactcaaaatattcaggtttacatgttagctctctctcatagggagctgccatacctcacagttcaaagtgtattctatagatcagtaacattatactgacatgtaattgcaatttactatgcagcaaaaatgattcaagaagaaaaataacctacagtgtctgtatacctttgtatacacaattgcttaagttactctgcttttaacatttgtacttggataaaatgcttatgtctgtataggaatgtcacagtgcaagatgctgctagcccaggcacaaagtattaaaattattttgt

SEQ ID NO: 48417 - protein, 287 aa, Artificial Sequence
  derived and/or modified sequence
MVNDPPVPALLWAQEVGQVLAGRARRLLLQFGVLFCTILLLLWVSVFLYGSFYYSYMPTVSHLSPVHFYYRTDCDSSTTSLCSFPVANVSLTKGGRDRVLMYGQPYRVTLELELPESPVNQDLGMFLVTISCYTRGGRIISTSSRSVMLHYRSDLLQMLDTLVFSSLLLFGFAEQKQLLEVELYADYRENSYVPTTGAIIEIHSKRIQLYGAYLRIHAHFTGLRLTSEKETIPGRKSNEGSLLISQGLKARRSQLRNQMLQRMVRALKIPQGQRVSCPRRRNQISSP

SEQ ID NO: 48418 - protein, 99 aa, Artificial Sequence
  derived and/or modified sequence
MVNDPPVPALLWAQEVGQVLAGRARRLLLQFGVLFCTILLLLWVSVFLYGSFYYSYMPTVSHLSPVHFYYRTDCDSSTTSLCSFPVANVSLTKGGRDRV

SEQ ID NO: 48419 - DNA, 864 bp, Artificial Sequence
  derived and/or modified sequence
atggtgaacgacccaccagtccctgctctgttgtgggcccaagaggtcgggcaggtactggccggtagggctcggcgactgcttttgcagtttggagtcctgttttgcacaattcttctcctcctgtgggtcagtgtttttctatacggatcattctactactcctacatgcccactgtgagccatctaagtcctgttcacttctactaccgtaccgattgtgacagcagtaccacaagtctatgcagcttcccggtggctaatgtcagtctgaccaaaggaggacgggatcgggtcttaatgtatggccagccctacagggtgacgttagaactagaacttcctgagtcccctgtaaatcaagacctggggatgttccttgtaaccatttcatgctatacccggggcggacggatcatcagtacctcctcccggtcagtgatgcttcactatcgatccgacctccttcagatgctggacaccctcgtctttagcagcctcttgctgttcggctttgccgaacagaagcagctcctggaggtcgagctgtacgccgattatcgcgaaaactcatacgtgcccactaccggtgccattatcgagatccattcgaaacgaatacaactttacggcgcatacctaaggatccacgctcactttacagggctcagattaacctcagagaaggaaactatcccgggaagaaagagtaatgagggctctctcctaatttcccagggactgaaggcacgccggtcacaactgcggaatcaaatgctccagaggatggtccgcgctcttaagattccccaaggacaacgcgtgtcttgccctcgccgacgtaatcagatctctagtccatag

SEQ ID NO: 48420 - DNA, 672 bp, Artificial Sequence
  derived and/or modified sequence
atggtgaacgacccacccgtgcctgccctgttgtgggcacaagaagtgggccaggttctggctgggagggcacgcaggcttctcttacagttcggagtcctcttctgtactatactgctgctcctgtgggtgtccgtttttctgtatggaagcttttactactcgtatatgccaaccgtctcccacctcagtcccgtccacttttattaccggaccgactgtgatagctccactacctctctttgcagctttcccgtggccaatgtgtctctcacgaagggcggtagggatcgcgtccttatgtatggccaaccataccgggtcaccctcgaactcgaactgcccgaaagtccagtcaatcaggacctcgggatgttcctggtgacaatatcctgctacactcgaggcgggaggatcatcagcacttctagcaggtcagtcatgctccattatcgttctgacctgttgcagatgctagataccctcgtattctcttctcttcttctgttcgggttcgcagagcagaaacaattgttggaggtggaactttacgcagactatcgcgagaattcttatgtccccacgacgggagccattattgagatccacagtaagagaattcagctttacggagcctatctgcgaatacacgcacacttcacaggcctctag

SEQ ID NO: 48421 - DNA, 300 bp, Artificial Sequence
  derived and/or modified sequence
atggtcaacgatccacccgtacccgcgttactttgggcgcaggaggtaggccaggtactggcaggtcgagcacggagactgttactgcagtttggagtcctgttttgcaccatcttgttgttactatgggtgtcagtgttcctctacggttctttttactacagctatatgcctacagtaagtcaccttagccctgtgcatttctactaccgcaccgattgcgacagtagcactaccagcctgtgttcattcccagtggcgaacgtgtcacttaccaaaggcggtcgggaccgcgtgtag

SEQ ID NO: 48422 - DNA, 864 bp, Artificial Sequence
  derived and/or modified sequence
atggtgaatgacccccctgtgcctgccctgctgtgggcccaggaggtgggccaggtgctggccggccgggcccggcggctgctgctgcagtttggagtgctcttctgcaccatcctgctgctgctgtgggtgtctgtgttcctgtatggcagcttctactacagctacatgcccaccgtgagccacctgagccctgtgcacttctactacagaacagactgtgacagcagcaccaccagcctgtgcagcttccctgtggccaacgtgtccctgaccaagggcggccgggacagagtgctgatgtatggccagccctacagagtgaccctggagctggagctgcctgagagccctgtgaaccaggacctgggcatgttcctggtgaccatcagctgctacacccggggcggccgcatcatcagcaccagcagccgctctgtgatgctgcactacagaagtgacctgctgcagatgctggacaccctggtgttcagcagcctgctgctgtttggatttgctgagcagaagcagctgctggaggtggagctgtatgctgactacagagaaaattcctatgtgcccaccaccggggccatcatcgagatccacagcaagaggatccagctgtatggagcctacctgcgcatccacgcccacttcaccggcctgcggctgaccagcgagaaggagaccatccctggcaggaagagcaatgaaggcagcctgctgatcagccagggcctgaaggcccggcgcagccagctgaggaaccagatgctgcagaggatggtgcgggccctgaagatcccccagggccagagggtgtcctgccccaggagaagaaaccagatcagcagcccctag

SEQ ID NO: 48423 - DNA, 672 bp, Artificial Sequence
  derived and/or modified sequence
atggtgaatgacccccctgtgcctgccctgctgtgggcccaggaggtgggccaggtgctggccggccgggcccggcggctgctgctgcagtttggagtgctcttctgcaccatcctgctgctgctgtgggtgtctgtgttcctgtatggcagcttctactacagctacatgcccaccgtgagccacctgagccctgtgcacttctactacagaacagactgtgacagcagcaccaccagcctgtgcagcttccctgtggccaacgtgtccctgaccaagggcggccgggacagagtgctgatgtatggccagccctacagagtgaccctggagctggagctgcctgagagccctgtgaaccaggacctgggcatgttcctggtgaccatcagctgctacacccggggcggccgcatcatcagcaccagcagccgctctgtgatgctgcactacagaagtgacctgctgcagatgctggacaccctggtgttcagcagcctgctgctgtttggatttgctgagcagaagcagctgctggaggtggagctgtatgctgactacagagaaaattcctatgtgcccaccaccggggccatcatcgagatccacagcaagaggatccagctgtatggagcctacctgcgcatccacgcccacttcaccggcctgtag

SEQ ID NO: 48424 - DNA, 300 bp, Artificial Sequence
  derived and/or modified sequence
atggtgaatgacccccctgtgcctgccctgctgtgggcccaggaggtgggccaggtgctggccggccgggcccggcggctgctgctgcagtttggagtgctcttctgcaccatcctgctgctgctgtgggtgtctgtgttcctgtatggcagcttctactacagctacatgcccaccgtgagccacctgagccctgtgcacttctactacagaacagactgtgacagcagcaccaccagcctgtgcagcttccctgtggccaacgtgtccctgaccaagggcggccgggacagagtgtag

SEQ ID NO: 48425 - DNA, 864 bp, Artificial Sequence
  derived and/or modified sequence
atggtgaacgacccccccgtgcccgccctgctgtgggcccaggaggtcggccaggtgctggccggccgcgcacgccgacttctcctgcaattcggggtgctattctgtacaattttgcttctgctttgggtgtcagtattcctttacggctctttttactactcttatatgcctactgtctctcatttgtctccagtgcatttttattatagaaccgactgcgatagttccacaacctctctttgctcattccccgtcgctaatgtgtcactgaccaagggggggagagatagggtcctaatgtacggccagccataccgagtcacactcgaactggagttgccagagagtccggtgaaccaagatcttggcatgttcctggtgactattagctgttatactcgcggtggaaggattatctctaccagctctagatctgtcatgttgcactataggtcagatctactccagatgctcgataccttggtattttcctccctgctgttgtttggctttgccgagcaaaaacagctgctggaggtagagctgtatgctgactaccgggaaaattcatacgttccaacaacaggtgctattatcgagatccattccaaaagaattcagctttatggtgcgtatttgcggatccacgcccattttactggcctgcgactgacatcagagaaggaaacaatcccaggccgcaaatccaacgaggggtctttgctgatctctcagggtttaaaagccagacgctctcaacttcggaaccagatgctacagagaatggtgagagccctgaaaattcctcagggacagcgcgtcagctgtccaagaagaaggaatcaaatttcatccccatag

SEQ ID NO: 48426 - DNA, 672 bp, Artificial Sequence
  derived and/or modified sequence
atggtgaacgacccccccgtgcccgccctgctgtgggcccaggaggtgggccaggtcctggcgggaagggcacgcaggctgctgctccagttcggggtactattttgcacaatactgctgctactttgggtgtcagtcttcttgtacgggtccttttactattcgtacatgccaactgttagccatttaagcccagttcatttctactaccgaacagactgcgactcttccacaacttcactctgttcattcccagtcgccaatgtgtccctgaccaaagggggccgagaccgcgtgttgatgtatgggcagccttatagagttaccctagaacttgaactaccggagtcccccgtgaaccaagacctgggaatgttcctggtaacgatctcttgttatactagggggggaaggataatctcaactagctcacgcagtgtgatgctccactaccggtctgatctattgcagatgctcgatacattggtgttctcaagcctcctactgtttggatttgccgagcaaaaacaactacttgaggtggaattatatgctgactacagggagaactcatacgtgccgacaactggggccattatcgagatccattctaagagaatccaactttatggagcttatttaagaattcacgcccattttactggactatag

SEQ ID NO: 48427 - DNA, 300 bp, Artificial Sequence
  derived and/or modified sequence
atggtgaacgacccccccgtgcccgccctgctgtgggcccaggaggtgggtcaagtgctagccgggcgcgctaggaggcttctgctgcaattcggggtgctcttctgcactattctgcttctcctctgggtgagtgtctttctgtatgggtcgttttactattcctatatgccaaccgtgagccacctgtctcccgtccacttctactacagaactgattgtgactcatccactacctctctctgttcttttccagtggccaacgtgagcctcaccaagggaggccgtgaccgggtatag

SEQ ID NO: 48428 - DNA, 864 bp, Artificial Sequence
  derived and/or modified sequence
atggtcaacgacccacccgttccagctttgctttgggcccaggaggtgggtcaagtgcttgcaggcagggctagacgcctcctgctacaattcggcgtactgttctgcaccatcctgctgttactgtgggtctccgtctttctgtacgggtccttttattattcctacatgccaaccgtttcacatctttcgcccgttcatttctactatcggacagactgcgacagttccaccacaagcctctgcagctttcctgttgctaatgtgagccttacaaaaggaggacgggacagggtgcttatgtacggtcagccatatagagtgacgctggagctcgaactgcctgaaagcccggtgaaccaagacctgggcatgttcttggttacaatctcctgttacacccggggtggccgaattatctctaccagctcacggtctgtaatgctgcactatcggtctgacttgctgcagatgctggataccctcgtgttcagctcccttcttctgtttgggttcgcagaacagaagcaactgctcgaggtagaactctacgccgattatagagagaactcgtatgtgcccaccacaggggctatcatcgaaatccactccaaacgcatacagctctacggcgcttatctccgaatccacgcccattttaccgggctgaggcttactagtgagaaggagaccattcccggacgaaagtcgaatgaaggctctcttttgattagccaggggctcaaggcccgtcgctctcagctccggaatcagatgctccagagaatggtgagagcgctgaagatcccccaggggcagagagtcagttgccccagacgacgaaaccagattagctctccttag

SEQ ID NO: 48429 - DNA, 672 bp, Artificial Sequence
  derived and/or modified sequence
atggttaacgatcctcctgttcccgcactcctatgggctcaagaagtagggcaggtactggcgggacgtgccagacgcctcttactgcaattcggggtgctgttttgcaccatattgctgctgctctgggtctctgtgttcctctacgggtccttctactattcctacatgcctacggtttcacacctgtcccctgtacatttctactaccgcaccgattgcgactcgagcaccacctccctgtgttccttcccggtcgcaaacgttagtctcaccaaggggggtagggaccgcgttctgatgtacggacagccatatagggttaccctggaactcgagctccccgaatcaccagtgaaccaggacctcgggatgtttctcgtaactatctcttgctacactcgcggagggaggatcattagcacgagcagccgatccgtgatgctccactatcggtctgacctcctccaaatgctcgacactctggtgttcagctctttgctcttgttcggcttcgcagagcaaaaacagctgctagaagtggagctctacgcggactaccgagaaaactcctatgtcccaaccaccggggcaatcatagagattcatagcaaaaggattcagctgtacggagcatacctgcgcattcatgcacactttactggtctgtag

SEQ ID NO: 48430 - DNA, 300 bp, Artificial Sequence
  derived and/or modified sequence
atggttaacgacccaccggtgccagcactcctgtgggcccaagaagttggtcaggttctagccggacgcgctaggaggctgctgctgcagttcggagtattgttctgcactattctgcttctgctgtgggtgtccgttttcctttacggctctttctactatagctatatgccaaccgtttcacatctgtccccagtgcatttctattaccggacagactgcgattctagtactacgtctctttgcagttttcccgtggcgaatgtgtcccttactaaagggggtcgtgaccgagtgtag

SEQ ID NO: 48431 - DNA, 1364 bp, Artificial Sequence
  derived and/or modified sequence
acttccccgggagccggaagtcccgtctcacggttgccctggcagcgcgcgaggctggtgagtcggcagccctgtggcagccggcgggctggtttccatggttgcacgattaggaaccaccagctgctgcatcccatggccaggggtggcgtccaggtggcagagcagctaggaacgcaaggcctgaacctggggccagacaccctgctctcccggccatggtcaacgaccctccagtacctgccttactgtgggcccaggaggtgggccaagtcttggcaggccgtgcccgcaggctgctgctgcagtttggggtgctcttctgcaccatcctccttttgctctgggtgtctgtcttcctctatggctccttctactattcctatatgccgacagtcagccacctcagccctgtgcatttctactacaggaccgactgtgattcctccaccacctcactctgctccttccctgttgccaatgtctcgctgactaagggtggacgtgatcgggtgctgatgtatggacagccgtatcgtgttaccttagagcttgagctgccagagtcccctgtgaatcaagatttgggcatgttcttggtcaccatttcctgctacaccagaggtggccgaatcatctccacttcttcgcgttcggtgatgctgcattaccgctcagacctgctccagatgctggacacactggtcttctctagcctcctgctatttggctttgcagagcagaagcagctgctggaggtggaactctacgcagactatagagagaactcgtacgtgccgaccactggagcgatcattgagatccacagcaagcgcatccagctgtatggagcctacctccgcatccacgcgcacttcactgggctcaggttaacatccgaaaaagagacaattcccggaaggaagtccaacgaaggatctctgctcatcagccagggcctgaaggccaggaggagtcaactccgcaatcagatgttacagaggatggtgagagccctgaagatccctcagggacagagggtcagctgtccgaggaggagaaaccagatcagcagcccctgagcggagaagaggagctagagcctgaggccagtgatggttcaggctcctgggaagatgcagctttgctgacggaggccaacctgcctgctcctgctcctgcttctgcttctgcccctgtcctagagactctgggcagctctgaacctgctgggggtgctctccgacagcgccccacctgctctagttcctgaagaaaaggggcagactcctcacattccagcactttcccacctgactcctctcccctcgtttttccttcaataaactattttgtgtcagctt

SEQ ID NO: 48432 - DNA, 864 bp, Artificial Sequence
  derived and/or modified sequence
atggtgaacgacccccccgtgcccgccctgctgtgggcccaggaggtgggccaggtgctggccggcagagccagaagactgctgctgcagttcggcgtgctgttctgcaccatcctgctgctgctgtgggtgagcgtgttcctgtacggcagcttctactacagctacatgcccaccgtgagccacctgagccccgtgcacttctactacagaaccgactgcgacagcagcaccaccagcctgtgcagcttccccgtggccaacgtgagcctgaccaagggcggcagagacagagtgctgatgtacggccagccctacagagtgaccctggagctggagctgcccgagagccccgtgaaccaggacctgggcatgttcctggtgaccatcagctgctacaccagaggcggcagaatcatcagcaccagcagcagaagcgtgatgctgcactacagaagcgacctgctgcagatgctggacaccctggtgttcagcagcctgctgctgttcggcttcgccgagcagaagcagctgctggaggtggagctgtacgccgactacagagagaacagctacgtgcccaccaccggcgccatcatcgagatccacagcaagagaatccagctgtacggcgcctacctgagaatccacgcccacttcaccggcctgagactgaccagcgagaaggagaccatccccggcagaaagagcaacgagggcagcctgctgatcagccagggcctgaaggccagaagaagccagctgagaaaccagatgctgcagagaatggtgagagccctgaagatcccccagggccagagagtgagctgccccagaagaagaaaccagatcagcagcccctag

SEQ ID NO: 48433 - DNA, 672 bp, Artificial Sequence
  derived and/or modified sequence
atggtgaacgacccccccgtgcccgccctgctgtgggcccaggaggtgggccaggtgctggccggcagagccagaagactgctgctgcagttcggcgtgctgttctgcaccatcctgctgctgctgtgggtgagcgtgttcctgtacggcagcttctactacagctacatgcccaccgtgagccacctgagccccgtgcacttctactacagaaccgactgcgacagcagcaccaccagcctgtgcagcttccccgtggccaacgtgagcctgaccaagggcggcagagacagagtgctgatgtacggccagccctacagagtgaccctggagctggagctgcccgagagccccgtgaaccaggacctgggcatgttcctggtgaccatcagctgctacaccagaggcggcagaatcatcagcaccagcagcagaagcgtgatgctgcactacagaagcgacctgctgcagatgctggacaccctggtgttcagcagcctgctgctgttcggcttcgccgagcagaagcagctgctggaggtggagctgtacgccgactacagagagaacagctacgtgcccaccaccggcgccatcatcgagatccacagcaagagaatccagctgtacggcgcctacctgagaatccacgcccacttcaccggcctgtag

SEQ ID NO: 48434 - DNA, 300 bp, Artificial Sequence
  derived and/or modified sequence
atggtgaacgacccccccgtgcccgccctgctgtgggcccaggaggtgggccaggtgctggccggcagagccagaagactgctgctgcagttcggcgtgctgttctgcaccatcctgctgctgctgtgggtgagcgtgttcctgtacggcagcttctactacagctacatgcccaccgtgagccacctgagccccgtgcacttctactacagaaccgactgcgacagcagcaccaccagcctgtgcagcttccccgtggccaacgtgagcctgaccaagggcggcagagacagagtgtag

SEQ ID NO: 48435 - DNA, 1521 bp, Artificial Sequence
  derived and/or modified sequence
atggccgagaccccccccccccccaccgccggcgccgagagctgcagcgaggagcccgccagaggcggcgagtggagacccgaggagcccagaagagcccccgccggcggcaccgacagagagggcgaggccggccccccccccgccagccccgccggccagagcgagcccgacagccccgtggccgcccccttcttcctgctgtaccccggcgacggcggcgccggcttcggcgtgagaccccccccccagcagcagagaagctggagaaccccccccagccccggcagccccctgcccttcctgctgctgagctaccccagcggcggcggcggcagcagcggcagcggcaagcaccaccccaactacctgatggccaacgagagaatgaacctgatgaacatggccaagctgagcatcaagggcctgatcgagagcgccctgaacctgggcagaaccctggacagcgactacgcccccctgcagcagttcttcgtggtgatggagcactgcctgaagcacggcctgaaggccaagaagaccttcctgggccagaacaagagcttctggggccccctggagctggtggagaagctggtgcccgaggccgccgagatcaccgccagcgtgaaggacctgcccggcctgaagacccccgtgggcagaggcagagcctggctgagactggccctgatgcagaagaagctgagcgagtacatgaaggccctgatcaacaagaaggagctgctgagcgagttctacgagcccaacgccctgatgatggaggaggagggcgccatcatcgccggcctgctggtgggcctgaacgtgatcgacgccaacttctgcatgaagggcgaggacctggacagccaggtgggcgtgatcgacttcagcatgtacctgaaggacggcaacagcagcaagggcaccgagggcgacggccagatcaccgccatcctggaccagaagaactacgtggaggagctgaacagacacctgaacgccaccgtgaacaacctgcaggccaaggtggacgccctggagaagagcaacaccaagctgaccgaggagctggccgtggccaacaacagaatcatcaccctgcaggaggagatggagagagtgaaggaggagagcagctacatcctggagagcaacagaaagggccccaagcaggacagaaccgccgagggccaggccctgagcgaggccagaaagcacctgaaggaggagacccagctgagactggacgtggagaaggagctggagatgcagatcagcatgagacaggagatggagctggccatgaagatgctggagaaggacgtgtgcgagaagcaggacgccctggtgagcctgagacagcagctggacgacctgagagccctgaagcacgagctggccttcaagctgcagagcagcgacctgggcgtgaagcagaagagcgagctgaacagcagactggaggagaagaccaaccagatggccgccaccatcaagcagctggagcagagatag

SEQ ID NO: 48436 - DNA, 297 bp, Artificial Sequence
  derived and/or modified sequence
atggccgagaccccccccccccccaccgccggcgccgagagctgcagcgaggagcccgccagaggcggcgagtggagacccgaggagcccagaagagcccccgccggcggcaccgacagagagggcgaggccggccccccccccgccagccccgccggccagagcgagcccgacagccccgtggccgcccccttcttcctgctgtaccccggcgacggcggcgccggcttcggcgtgagaccccccccccagcagcagagaagctggagaaccccccccagccccggcagcccctag

SEQ ID NO: 48437 - DNA, 1521 bp, Artificial Sequence
  derived and/or modified sequence
atggcagagactccacccccacctacggccggcgccgaaagttgcagtgaagagcccgcacggggaggcgagtggcgacccgaagaaccccgccgtgcacctgctggtggcactgatagagagggagaagcaggaccgccgcccgcgagtccagctggacagtctgagccagacagccccgtcgcagccccattttttctgttatatcccggtgatggcggtgcagggttcggggtccgacctcccccccaacaacagagaagctggcgcacccctccttcccctggctcaccattaccctttcttttgctctcctatcctagcgggggagggggcagcagcggctccggcaaacatcatccgaattatttgatggcaaatgagcggatgaacctgatgaacatggccaaattgtcaattaagggcctgatcgaaagtgccctcaatcttgggcgcaccctcgactcagactacgctcccttacagcagtttttcgtggtaatggagcattgcctcaagcacggactcaaagccaaaaagacttttctcggccaaaacaagtcgttctggggacctctggaacttgttgaaaaactggtcccagaggcggccgagatcacggcttccgtgaaggatctgcccggacttaagactccggtgggacgtggcagggcctggctcagattggctctcatgcaaaagaagctgagcgagtacatgaaagcccttattaataaaaaagagctgttgtccgaattttatgagccaaatgctctcatgatggaagaagaaggcgccataattgccgggttgttagtcggcctgaacgttatcgatgcaaatttctgcatgaagggagaagacctggactcccaggtaggcgtgatcgacttctccatgtatttaaaggacgggaactctagcaagggtactgagggcgatggtcaaatcaccgccatccttgatcagaaaaattatgtggaggagcttaaccggcatctgaacgcaacggtaaataatctccaggccaaggtcgatgccctggagaaatccaatactaagctcactgaggagcttgctgtggcgaacaatcgcatcatcactctacaagaagagatggagcgggtaaaggaggaatcctcctatatcctggagtctaaccggaaaggaccaaagcaggatcgcaccgcagaggggcaggcactcagcgaagcacggaaacatctcaaagaagaaacccagctccggctggatgtggaaaaggaactggaaatgcagatctccatgcgccaggagatggagctggccatgaagatgttagagaaggatgtgtgcgagaagcaggacgccctagtgtccttaaggcagcagttggacgatctccgcgcgttgaagcacgagctcgccttcaaattgcagagctctgacctgggggtcaaacagaagtcagagctcaattctcgcctcgaagagaaaaccaatcagatggcagctactattaaacagctagagcagaggtag

SEQ ID NO: 48438 - DNA, 297 bp, Artificial Sequence
  derived and/or modified sequence
atggccgaaacacccccgccccctaccgccggagccgaatcttgttccgaggaacccgctcgcggaggcgagtggaggccagaagaaccccgaagggcgccggcagggggtactgacagagagggtgaagctggccccccccccgcgtcgccggctgggcagtctgaacccgattctcctgtggctgccccgtttttcctgctatatcccggagacggtggggctggatttggggtgcgtccgcccccccagcagcagaggtcctggagaaccccgcccagtcccggttctccctag

SEQ ID NO: 48439 - DNA, 1521 bp, Artificial Sequence
  derived and/or modified sequence
atggccgagaccccacctccacccacagctggagctgagagctgcagcgaggagcccgcccggggcggggagtggaggcctgaggagccccggcgggccccagctgggggcacagaccgggagggggaggccggccccccaccagccagccctgctggccagagcgagccagacagccctgtggccgcccccttcttcctgctgtacccaggagatggaggagctggctttggagtgcggcccccaccccagcagcagaggtcctggaggaccccacccagccctggcagccccctgcccttcctgctgctgagctaccccagcggcggcggcggcagcagcggcagcggcaagcaccaccccaactacctgatggccaatgaaagaatgaacctgatgaacatggccaagctgagcatcaagggcctcatcgagagcgccctgaacctgggccgcaccctggacagcgactatgcccccctgcagcagttctttgtggtgatggagcactgcctgaagcacggcctgaaggccaagaagaccttcctgggccagaacaagagcttctggggccccctggagctggtggagaagctggtgcctgaggccgctgagatcacagcctctgtgaaggacctgcccggcctgaagacccctgtgggccggggccgggcctggctgcggctggccctgatgcagaagaagctgtctgagtacatgaaggccctgatcaacaagaaggagctgctgtctgagttctatgagcccaatgccctgatgatggaggaggagggcgccatcatcgccggcctgctggtgggcctgaatgtgattgatgccaacttctgcatgaagggggaggacctggacagccaggtgggcgtcatcgacttctccatgtacctgaaggatggcaacagcagcaaaggaacagaaggagatggccagatcacagccatcctggaccagaagaactacgtggaggagctgaacagacacctgaatgccaccgtgaacaacctgcaggccaaggtggatgccctggagaagagcaacaccaagctgacagaggagctggccgtggccaacaaccgcatcatcaccctgcaggaggagatggagcgggtgaaggaggagagcagctacatcctggagagcaacaggaagggccccaagcaggacagaacagctgagggccaggccctgtctgaggccaggaagcacctgaaggaggagacccagctgcggctggatgtggagaaggagctggagatgcagatctccatgaggcaggagatggagctggccatgaagatgctggagaaggatgtgtgtgagaagcaggatgccctggtgtccctgcggcagcagctggatgacctgcgggccctgaagcatgagctggccttcaagctgcagagcagtgacctgggcgtgaagcagaagtctgagctgaacagccggctggaggagaagaccaaccagatggccgccaccatcaagcagctggagcagaggtag

SEQ ID NO: 48440 - DNA, 297 bp, Artificial Sequence
  derived and/or modified sequence
atggccgagaccccacctccacccacagctggagctgagagctgcagcgaggagcccgcccggggcggggagtggaggcctgaggagccccggcgggccccagctgggggcacagaccgggagggggaggccggccccccaccagccagccctgctggccagagcgagccagacagccctgtggccgcccccttcttcctgctgtacccaggagatggaggagctggctttggagtgcggcccccaccccagcagcagaggtcctggaggaccccacccagccctggcagcccctag

SEQ ID NO: 48441 - DNA, 1521 bp, Artificial Sequence
  derived and/or modified sequence
atggccgagaccccccccccccccaccgccggcgccgagagctgcagcgaggaacctgctagaggtggcgagtggcgccccgaggagccaaggcgggctcctgccggcggcaccgacagagagggcgaggcaggccctccccccgcctcccctgctgggcagagcgagcccgattctccagtcgccgcgcctttctttctgttgtaccctggggacggaggtgctggctttggcgtccgtccacctccccagcagcagcgcagttggcgaacccctccaagtcctggcagccccttaccgttcttgcttctatcctatccctccgggggtggcggcagcagtggctccggaaagcatcaccctaattatctcatggcaaacgaacgcatgaacctgatgaacatggccaagctctccattaagggcctgatcgagtcagccctgaacctcggtagaacattggactcggattatgctcccctgcagcagttcttcgtggtcatggagcactgcctgaaacacggcctgaaggctaagaaaacatttttaggacaaaataagtctttttgggggcctctggagttggtggagaaactggtgcccgaagcagccgaaatcaccgccagcgtgaaggacttacctgggctgaagacccccgtgggcaggggtagagcctggctgcggctggctctgatgcagaagaaactctctgaatatatgaaggcactgatcaataaaaaggagctcttgtcagaattctacgagccaaacgcacttatgatggaggaggagggagccattattgcaggcctgttggtgggcctgaacgtcattgacgccaacttttgcatgaagggcgaggatctcgattcccaggtgggagtgatcgacttcagtatgtatcttaaagacggcaatagcagcaaggggactgaaggcgacggtcaaattaccgcgatcctcgatcaaaagaattacgtggaggaactgaatcgccacctgaatgccacagttaataatctgcaggcaaaggttgacgccctggaaaagagcaacacgaaactgaccgaggagctagctgttgccaacaaccggattattactctgcaggaggagatggagcgcgtgaaggaagaatccagctacatcctggagtccaaccgaaaaggccctaaacaggaccgtaccgccgaaggacaagctctcagtgaagccagaaagcacctcaaagaagaaacccagctgcggctggatgtcgagaaagagttggagatgcagatttctatgcgtcaggagatggagttggccatgaagatgctagagaaagatgtatgcgagaagcaggacgccctagtcagtcttaggcagcaacttgacgatttacgcgcgctcaagcacgaactagcctttaaactgcaatcatctgatttaggtgtgaagcagaagtcagagctgaatagccgactggaagaaaaaacgaaccaaatggccgccaccatcaagcagctggagcagcgttag

SEQ ID NO: 48442 - DNA, 297 bp, Artificial Sequence
  derived and/or modified sequence
atggccgagaccccccccccccccaccgccggcgccgagagctgctcagaggagccagctagagggggcgagtggcgcccagaggagcctcgaagggcacctgccgggggcaccgacagagaaggggaggcgggtccccctcccgcaagcccagccggccaatcagagccggatagcccagtcgctgcgcccttcttcttactctatcctggggacggcggggccggcttcggagtgcggccccccccacagcagcagcgctcttggaggacccctccctcacctgggtcaccctag

SEQ ID NO: 48443 - DNA, 1521 bp, Artificial Sequence
  derived and/or modified sequence
atggccgagacgccgccacccccaactgctggagccgaaagttgcagtgaggagcctgcacggggtggagaatggcgtccggaggagccacgccgagccccagccggaggcactgatcgcgaaggtgaggcaggtccacccccagcatccccggctggccagagtgagccagattccccggtggcagcaccattcttcctgctataccccggagatggaggagccggatttggagtgagaccacctccacagcagcagcggtcctggaggacccctccttctccagggtcaccgctcccttttctgctgctcagctacccttccggtggcggaggctcctcagggtcggggaaacatcacccgaactatcttatggccaacgaacgaatgaacctgatgaatatggccaaactatcaattaagggccttatcgagtcagcactgaatctcgggagaacattggacagcgattatgccccactccagcagttttttgtggttatggagcattgcctcaagcacggattaaaggctaagaaaacattcctggggcagaacaaaagcttctggggccctttggagctggtcgagaagctagtccctgaggcagctgaaataacagcatcagtgaaagacttacctggattgaaaaccccagtgggaaggggacgtgcctggctgcgcctcgccctgatgcagaaaaagctctccgaatacatgaaggcccttattaacaaaaaagaactgctcagcgaattctacgaacccaatgccttgatgatggaggaagaaggagccatcatcgcagggctgttagtcggactgaacgtcatcgatgctaatttttgcatgaaaggagaagacctcgattcccaggtcggggttattgatttttccatgtacctgaaagatggcaactccagcaaggggaccgagggggacggacagattactgccatactggatcagaaaaattatgttgaagaactgaataggcacctgaacgctactgtcaataacctgcaagccaaggtggatgcactggagaagtccaacactaagctgacagaagaattggcagttgccaataacagaatcataaccctgcaggaagagatggaacgggtaaaagaggagtcatcttatatactggaatccaatagaaagggacctaaacaggatcggaccgccgagggacaggccctctccgaagctagaaagcacctcaaagaggagacacagttaagattggatgtagaaaaggagctcgaaatgcagatcagtatgaggcaggaaatggagcttgcaatgaaaatgctcgagaaggatgtgtgcgaaaaacaggatgctttagtaagcctgcgacagcagctcgacgatctgcgggcactcaagcatgaactggcattcaagcttcagagttctgacctgggagtaaaacagaagagcgagctgaacagtcgtcttgaagagaaaaccaaccagatggcggctacaatcaagcagctagagcagcgctag

SEQ ID NO: 48444 - DNA, 297 bp, Artificial Sequence
  derived and/or modified sequence
atggccgagacgcctcctccacccaccgctggagccgagtcctgctctgaggagcctgctagaggaggagagtggagacccgaagaaccgcgacgcgctccagcaggtggtacggatcgggagggcgaggcagggccaccacccgcaagccccgcagggcagagtgaaccagatagccccgtggcggcacccttctttttactctaccccggagatggcggtgccggattcggcgtccgccctccccctcaacaacagaggtcctggcgcacccctccttctcccggaagcccctag

SEQ ID NO: 48445 - DNA, 2143 bp, Artificial Sequence
  derived and/or modified sequence
gtggccgagaagaaaggtggcggtggcggcggcggcgcagcggacgggacggggcggcggctcctcgccctgaccctctgctcccccgcccaggcccgggcgcgaatcggaggctgcggcgaaggaaggagtgagcatggctgagaccccgccgccgcccaccgctggtgccgaaagttgcagcgaggagccggcgaggggcggggagtggcggccggaggagccgcgccgcgctcccgccgggggcacggaccgagagggcgaggcggggccgccgccggcctcccccgccgggcagtcggagcccgactcgccggtggccgcccccttcttcctgctgtaccccggcgatggaggcgccggcttcggagtgcgcccgccgccgcagcagcagcgctcctggaggaccccgccgtcccccggctcaccgctgcccttcctgctgctgagctacccgagcggcggcggcggcagcagcggcagcggcaagcaccatcctaattatctcatggctaatgaacgcatgaacctcatgaacatggccaagctgagtatcaagggcttgattgaatcagctctgaacctggggaggactcttgactctgactatgcacctctccagcaattctttgtggtgatggagcactgtctgaaacatggcttgaaagctaaaaaaacttttctcggacaaaataaatccttctgggggcctctagaactggtagaaaagcttgttccagaagccgcagagataacagcaagtgttaaagatcttccaggacttaagacaccagtaggtagaggaagagcctggcttcgtttggcattaatgcaaaagaaactttcagaatatatgaaagctttgatcaataagaaagaacttctcagtgaattctacgaacccaatgccctcatgatggaagaagaaggagccataattgctggtctgttggtgggtctgaatgtcattgatgccaatttctgtatgaaaggagaagacttggactctcaggttggagttatagatttttcaatgtatctcaaggacgggaacagcagtaaaggtactgaaggagacggtcagattactgcaattctggaccagaagaactatgtagaagaactgaacagacatttgaatgctactgtaaacaaccttcaggcaaaagtagatgcattagaaaaatccaacactaaactgacagaggagcttgcagttgcaaacaacaggatcattaccttacaagaagaaatggaacgagttaaagaggaaagttcctacatactggaatccaatcggaagggtcccaagcaagacagaactgcagaagggcaagcactaagtgaagcaagaaagcatttaaaagaagagacacaattacgattggatgttgagaaagaactggagatgcagatcagcatgaggcaggagatggaattggctatgaagatgctggagaaggatgtctgtgagaagcaggatgccctggtatctcttcggcagcagctggatgacctcagagctctcaagcatgaacttgcctttaagctgcagagttcagacttaggagtaaaacagaaaagtgaactaaacagtcgcttggaagagaagactaatcagatggctgctaccattaaacaacttgaacaaaggtaaaagtcctgtttctttaatgaaacactttggattgtcagtgctgaagtgaaaagaatgtgctgtacattcggcaaatagaaaatacatgaaattcttccaaattagcatcagacattctggtagaaaaaagccagttgaatgttatgtgtgttttctaaggtatgactgaaatgtttttaggaaatgtcaatcacttgactagcctttaaaaaaaaaaaagaaaggtcagccttttatgactgttttgaacatcagaactcttaatccatgtcagagtcatgtgttagaggaaggatacttaaaagcatggaaggactcttaaatgtatgtatgtaattctgtgattttattgttcatcactgaagtctttgaatacttggatgctaggggatatagaggcactgagagataggtgtcctccaaggatctattctggatctttctctcccttctttaacccttttctcttatctcccttttctttct

SEQ ID NO: 48446 - DNA, 482 bp, Artificial Sequence
  derived and/or modified sequence
aaatacaggatttcagtacagcgcacaagacgggaacaaaagaggtggtggaaggaagacacccacctttggtttctcacataaagagctcaatactccaaacagtgaatcaacggttgaagttgcagtgtgtgaaaggcaaatggcccgggcgcgaatcggaggctgcggcgaaggaaggagtgagcatggctgagaccccgccgccgcccaccgctggtgccgaaagttgcagcgaggagccggcgaggggcggggagtggcggccggaggagccgcgccgcgctcccgccgggggcacggaccgagagggcgaggcggggccgccgccggcctcccccgccgggcagtcggagcccgactcgccggtggccgcccccttcttcctgctgtaccccggcgatggaggcgccggcttcggagtgcgcccgccgccgcagcagcagcgctcctggaggaccccgccgtcccccggctcaccg

SEQ ID NO: 48447 - protein, 174 aa, Artificial Sequence
  derived and/or modified sequence
MINPELRDGRADGFIHRIVPKLIQNWKIGLMCFLSIIITTVCIIMIATWSKHAKPVACSGDWLGVRDKCFYFSDDTRNWTASKIFCSLQKAELAQIDTQEDMEFLKRYAGTDMHWIGLSRKQGDSWKWTNGTTFNGWFEIIGNGSFAFLSADGVHSSRGFIDIKWICSKPKYFL

SEQ ID NO: 48448 - DNA, 525 bp, Artificial Sequence
  derived and/or modified sequence
atgattaaccccgagctaagagatggacgggcagatggcttcatacaccgcatcgtgcctaagctgatccaaaattggaaaatcggcctcatgtgtttccttagcatcataatcactaccgtatgtattatcatgatcgccacctggtctaagcatgccaagcctgttgcgtgctccggcgactggctaggcgttcgcgacaaatgtttctatttttccgatgacacacgcaattggacagcctctaagatattttgttcattgcaaaaggctgagcttgctcagatagacacacaagaggatatggaatttctgaagaggtacgctggaaccgacatgcactggattggcttgagccgcaaacagggtgacagttggaagtggacgaacgggaccaccttcaacggctggtttgaaataataggcaatgggagttttgcctttctcagcgcagacggggtgcactcctcacgggggttcatcgacataaagtggatttgcagcaagcctaaatacttcctctag

SEQ ID NO: 48449 - DNA, 525 bp, Artificial Sequence
  derived and/or modified sequence
atgatcaaccctgagctgagagatggccgggcagatggcttcatccaccgcatcgtgcccaagctgatccagaactggaagattggcctgatgtgcttcctgagcatcatcatcaccaccgtgtgcatcatcatgattgccacctggagcaagcacgccaagcctgtggcctgcagcggggactggctgggcgtgcgggacaagtgcttctacttcagtgatgacaccaggaactggacagccagcaagatcttctgcagcctgcagaaggccgagctggcccagattgacacccaggaggacatggagttcctgaagagatatgccggcacagacatgcactggattggcctgagcaggaagcagggcgacagctggaagtggaccaacggcaccaccttcaacggctggtttgagatcattggaaatggcagctttgccttcctgtctgcagatggagtgcacagcagccggggcttcatcgacatcaagtggatctgcagcaagcccaagtacttcctgtag

SEQ ID NO: 48450 - DNA, 525 bp, Artificial Sequence
  derived and/or modified sequence
atgatcaaccccgagctgcgggacggccgggccgacggcttcatccaccgcatcgtgccaaaactaattcagaactggaagataggccttatgtgcttcctcagcatcatcatcacaacagtctgcataatcatgatcgcaacatggagtaagcacgctaagcccgtggcctgctctggagactggctcggagtacgggataagtgtttttatttctctgacgatacccgcaattggacagcctctaaaattttttgctctcttcaaaaagccgagctggcccagattgatacacaagaggatatggaattcctgaagagatacgctgggacagatatgcattggattggactgtccaggaagcagggggattcctggaagtggactaacggaacaacttttaacggctggttcgagatcatcggtaacgggtccttcgcctttctgagtgcagacggcgttcatagctcacgcggctttatcgacataaagtggatttgctcaaaacctaaatacttcctttag

SEQ ID NO: 48451 - DNA, 525 bp, Artificial Sequence
  derived and/or modified sequence
atgattaaccctgaactacgcgatggtcgggcagacgggtttatccacagaatcgtgcctaaactcatccagaactggaaaatcggccttatgtgttttctgagtattataatcacaaccgtatgcatcatcatgatcgccacttggtcaaagcatgcaaaacccgtcgcatgtagtggcgactggctcggcgtccgcgacaaatgtttttatttttcggacgacacccgtaattggaccgccagtaaaatattctgctctctccagaaggccgagcttgcccaaattgacacacaggaagatatggaattcttgaaacgctacgcaggaacagatatgcattggatcggccttagccgtaaacagggtgatagctggaaatggaccaacggtactaccttcaatggttggtttgaaatcatcggtaatggctcatttgcgttcctttctgcggatggtgtccactcatctaggggcttcatcgatattaaatggatctgcagcaagcccaagtactttctgtag

SEQ ID NO: 48452 - DNA, 916 bp, Artificial Sequence
  derived and/or modified sequence
tgaaaagctttctagtcctctcctactgatctccatcggttagcgccttgccatgattaatccagagctgcgggatggcagagctgatggcttcatacatcggatagttcccaagttgatacaaaactggaagattggccttatgtgcttcctgagtattattattactacagtttgcattattatgatagccacatggtccaagcatgctaaacctgtggcatgttcaggggactggcttggagtgagagataagtgtttctatttttctgatgataccagaaattggacagccagtaaaatattttgtagtttgcagaaagcagaacttgctcagattgatacacaagaagacatggaatttttgaagaggtacgcaggaactgatatgcactggattggactaagcaggaaacaaggagattcttggaaatggacaaatggcaccacattcaatggttggtttgaaattatagggaacggatcctttgctttcttgagtgctgatggagtccatagttccagaggatttattgatatcaagtggatttgcagcaaacctaaatattttttatagagcagaaaaaacttgaaaatgattatcacacttcaagattgaaagaagagctaattatgcaaaagtggctttctcacttattctgttacagaatacggaacctctggtgagggcccattttctagtttatagatggaaacttcttgctgtgccctgccatggttaaagagacaaggccgttctctggagccttttataagggcacaatcacatttactatggctccatcctcatgaactaatcacctcctgatggatggctccatcccctaataccatcacactggtgattagctttcaatttatgagttttgggaggacccaaatactcagaacatag

SEQ ID NO: 48453 - DNA, 525 bp, Artificial Sequence
  derived and/or modified sequence
atgatcaaccccgagctgagagacggcagagccgacggcttcatccacagaatcgtgcccaagctgatccagaactggaagatcggcctgatgtgcttcctgagcatcatcatcaccaccgtgtgcatcatcatgatcgccacctggagcaagcacgccaagcccgtggcctgcagcggcgactggctgggcgtgagagacaagtgcttctacttcagcgacgacaccagaaactggaccgccagcaagatcttctgcagcctgcagaaggccgagctggcccagatcgacacccaggaggacatggagttcctgaagagatacgccggcaccgacatgcactggatcggcctgagcagaaagcagggcgacagctggaagtggaccaacggcaccaccttcaacggctggttcgagatcatcggcaacggcagcttcgccttcctgagcgccgacggcgtgcacagcagcagaggcttcatcgacatcaagtggatctgcagcaagcccaagtacttcctgtag

SEQ ID NO: 48454 - protein, 371 aa, Artificial Sequence
  derived and/or modified sequence
MPQLSGGGGGGGGDPELCATDEMIPFKDEGDPQKEKIFAEISHPEEEGDLADIKSSLVNESEIIPASNGHEVARQAQTSQEPYHDKAREHPDDGKHPDGGLYNKGPSYSSYSGYIMMPNMNNDPYMSNGSLSPPIPRTSNKVPVVQPSHAVHPLTPLITYSDEHFSPGSHPSHIPSDVNSKQGMSRHPPAPDIPTFYPLSPGGVGQITPPLGWFSHHMIPGPPGPHTTGIPHPAIVTPQVKQEHPHTDSDLMHVKPQHEQRKEQEPKRPHIKKPLNAFMLYMKEMRANVVAECTLKESAAINQILGRRWHALSREEQAKYYELARKERQLHMQLYPGWSARDNYGKKKKRKREKLQESASGTGPRMTAAYI

SEQ ID NO: 48455 - DNA, 1116 bp, Artificial Sequence
  derived and/or modified sequence
atgccccagctgagcggcggcggcggcggcggcggcggcgaccccgagctgtgcgccaccgacgagatgatccccttcaaggacgagggcgacccccagaaggagaagatcttcgccgagatcagccaccccgaggaggagggcgacctggccgacatcaagagcagcctggtgaacgagagcgagatcatccccgccagcaacggccacgaggtggccagacaggcccagaccagccaggagccctaccacgacaaggccagagagcaccccgacgacggcaagcaccccgacggcggcctgtacaacaagggccccagctacagcagctacagcggctacatcatgatgcccaacatgaacaacgacccctacatgagcaacggcagcctgagcccccccatccccagaaccagcaacaaggtgcccgtggtgcagcccagccacgccgtgcaccccctgacccccctgatcacctacagcgacgagcacttcagccccggcagccaccccagccacatccccagcgacgtgaacagcaagcagggcatgagcagacacccccccgcccccgacatccccaccttctaccccctgagccccggcggcgtgggccagatcaccccccccctgggctggttcagccaccacatgatccccggcccccccggcccccacaccaccggcatcccccaccccgccatcgtgaccccccaggtgaagcaggagcacccccacaccgacagcgacctgatgcacgtgaagccccagcacgagcagagaaaggagcaggagcccaagagaccccacatcaagaagcccctgaacgccttcatgctgtacatgaaggagatgagagccaacgtggtggccgagtgcaccctgaaggagagcgccgccatcaaccagatcctgggcagaagatggcacgccctgagcagagaggagcaggccaagtactacgagctggccagaaaggagagacagctgcacatgcagctgtaccccggctggagcgccagagacaactacggcaagaagaagaagagaaagagagagaagctgcaggagagcgccagcggcaccggccccagaatgaccgccgcctacatctag

SEQ ID NO: 48456 - DNA, 1116 bp, Artificial Sequence
  derived and/or modified sequence
atgccacagctaagtggtgggggtggtggcggagggggtgaccccgaactgtgcgccaccgatgaaatgatcccgtttaaggatgagggggatccacagaaggagaagattttcgccgagatttcccatccggaggaggaaggcgatctcgctgatataaaatcctctcttgtgaacgagtctgaaatcattccggcctccaatggacacgaagtggcacgtcaggcccagacctcccaagaaccttatcacgacaaagcccgggagcacccggacgacggcaagcatccagacggcggactttataataagggcccttcctactcatcatacagtgggtatataatgatgccgaatatgaacaatgacccatacatgtctaatggctcccttagcccccccatacctaggacatccaacaaagtcccggtcgtgcaaccgtctcacgctgtgcacccattgacgcccctgattacttactctgacgaacatttttctcccggtagtcaccccagccacatcccatctgacgtaaacagtaaacagggcatgagcaggcatccccccgccccagacatccccacgttctaccccttgtcaccgggcggtgtgggacaaatcaccccccctctggggtggttcagtcaccatatgattccaggcccgccaggcccccacacaactgggatccctcaccctgcaatcgtgactccacaggttaaacaagaacacccccacacggattccgatctcatgcatgttaaaccccagcatgagcagcggaaggagcaggaacccaagcgtccccatattaagaaacctcttaatgcctttatgctgtacatgaaagagatgagggctaacgttgtcgctgagtgtacattaaaggagtccgccgctattaatcagatactcggtagacgatggcacgctctctccagggaagagcaggcaaagtattatgaactggcgagaaaggaacggcagctccacatgcaactgtacccagggtggtctgcacgcgacaactatggcaaaaagaaaaagaggaagcgtgaaaaactgcaagagagtgcctctgggacaggcccaagaatgaccgcagcatatatatag

SEQ ID NO: 48457 - DNA, 1116 bp, Artificial Sequence
  derived and/or modified sequence
atgccccagctgagcggcggcggcggcggcggcggcggggaccctgagctgtgtgccacagatgagatgatccccttcaaggatgaaggagacccccagaaggagaagatctttgctgagatcagccaccctgaggaggagggggacctggccgacatcaagagcagcctggtgaatgaaagtgagatcatcccagccagcaatggccacgaggtggcccggcaggcccagaccagccaggagccctaccatgacaaggcccgggagcacccagatgatggcaagcacccagatggcggcctgtacaacaagggccccagctacagcagctacagcggctacatcatgatgcccaacatgaacaatgacccctacatgagcaatggcagcctgagcccccccatccccaggaccagcaacaaggtgcctgtggtgcagcccagccatgctgtgcaccccctgacccccctcatcacctacagtgatgagcacttcagccctggcagccaccccagccacatccccagtgatgtgaacagcaagcagggcatgagccgccaccccccagccccagacatccccaccttctaccccctgagccctggaggagtgggccagatcaccccacccctgggctggttcagccaccacatgatccctggccccccaggcccccacaccaccggcatcccccacccagccatcgtgaccccccaggtgaagcaggagcacccccacacagacagcgacctgatgcacgtgaagccccagcacgagcagaggaaggagcaggagcccaagaggccccacatcaagaagcccctgaatgccttcatgctgtacatgaaggagatgagggccaacgtggtggccgagtgcaccctgaaggagagcgctgccatcaaccagatcctgggccgccgctggcacgccctgagccgggaggagcaggccaagtactatgagctggccaggaaggagcggcagctgcacatgcagctgtacccaggctggagcgcccgggacaactacggcaagaagaagaagaggaagcgggagaagctgcaggagagcgccagcggcaccggccccaggatgacagctgcctacatctag

SEQ ID NO: 48458 - DNA, 1488 bp, Artificial Sequence
  derived and/or modified sequence
acagcggagcggagattacagagccgccgggatgccccaactctccggaggaggtggcggcggcgggggggacccggaactctgcgccacggacgagatgatccccttcaaggacgagggcgatcctcagaaggaaaagatcttcgccgagatcagtcatcccgaagaggaaggcgatttagctgacatcaagtcttccttggtgaacgagtctgaaatcatcccggccagcaacggacacgaggtggccagacaagcacaaacctctcaggagccctaccacgacaaggccagagaacaccccgatgacggaaagcatccagatggaggcctctacaacaagggaccctcctactcgagttattccgggtacataatgatgccaaatatgaataacgacccatacatgtcaaatggatctctttctccacccatcccgagaacatcaaataaagtgcccgtggtgcagccatcccatgcggtccatcctctcacccccctcatcacttacagtgacgagcacttttctccaggatcacacccgtcacacatcccatcagatgtcaactccaaacaaggcatgtccagacatcctccagctcctgatatccctactttttatcccttgtctccgggtggtgttggacagatcaccccacctcttggctggttttcccatcatatgattcccggtcctcctggtccccacacaactggcatccctcatccagctattgtaacacctcaggtcaaacaggaacatccccacactgacagtgacctaatgcacgtgaagcctcagcatgaacagagaaaggagcaggagccaaaaagacctcacattaagaagcctctgaatgcttttatgttatacatgaaagaaatgagagcgaatgtcgttgctgagtgtactctaaaagaaagtgcagctatcaaccagattcttggcagaaggtggcatgccctctcccgtgaagagcaggctaaatattatgaattagcacggaaagaaagacagctacatatgcagctttatccaggctggtctgcaagagacaattatggtaagaaaaagaagaggaagagagagaaactacaggaatctgcatcaggtacaggtccaagaatgacagctgcctacatctgaaacatggtggaaaacgaagctcattcccaacgtgcaaagccaaggcagcgaccccaggacctcttctggagatggaagcttgttgaaaacccagactgtctccacggcctgcccagtcgaccccaaaggaacactgacatcaattttaccctgaggtcactgctagagacgctgatccataaagacaatcactgccaacccctctttcgtctactgcaagagccaagttccaaaataaagcataaaaaggttttttaaaaggaaatgtaaaagcacatgagaatgctagcaggctgtggggcagctgagcagcttttctcccctcatatctgcgtgcactt

SEQ ID NO: 48459 - DNA, 1116 bp, Artificial Sequence
  derived and/or modified sequence
atgccccagctgagcggcggcggcggcggcggcggcggcgaccccgagctatgtgccacagacgaaatgatcccattcaaggatgaaggagacccccagaaggagaagatcttcgcggaaatcagccatcctgaggaggaaggtgacctcgccgacatcaagagctctttagtgaacgaatcagagattatcccagctagcaatggccacgaagttgcccgccaggctcagacgagtcaagagccataccatgataaagcacgcgagcaccccgacgatgggaaacacccagacggtgggctgtataataagggacctagttattcatcatacagcggatatataatgatgcctaatatgaataacgatccctacatgagtaatggctcactcagtcccccaatcccaaggaccagtaataaggttcctgtggtccagccttcccacgccgtccatccactcaccccacttatcacttattcagacgaacatttctctcccgggagtcatccaagccatattccaagtgacgtgaattctaaacagggcatgagcagacatccccccgcccctgacatccccacattctacccactgtctcctggaggcgtggggcagattactccacccctgggatggtttagtcatcatatgattccaggcccgccagggccccacactaccggaatacctcaccctgccattgtaacgccacaggtgaaacaagaacacccacacactgacagcgacctcatgcacgtgaagccgcagcatgaacaaaggaaggaacaggagccaaagaggccgcatatcaaaaagccgcttaatgccttcatgctgtacatgaaagagatgagagcaaatgtggtggccgaatgcacgttgaaggaaagcgctgctattaaccagattctcgggagacgatggcatgccttatcacgcgaggaacaggcaaaatactatgagctggcacggaaggagagacaattgcatatgcagttatatcccggctggtccgctcgcgacaattatggcaaaaagaagaaacggaagcgagaaaaattacaggagtcagcctccggaactggccctaggatgacagcagcttacatctag

SEQ ID NO: 48460 - DNA, 1116 bp, Artificial Sequence
  derived and/or modified sequence
atgccacagctctccgggggaggcggagggggaggcggagatccagaactctgcgccactgacgaaatgatcccatttaaagacgagggtgacccgcaaaaggagaaaatctttgctgagatctctcaccctgaagaagaaggagatctggcggatataaaaagttctctcgttaacgaatcggaaatcattccagcgagtaacggacacgaagttgcgcgacaggcccagacatctcaggaaccatatcacgataaggctcgggagcacccggacgacggcaaacacccagacggagggttatacaacaaaggaccctcttacagctcctactctggatatatcatgatgcccaatatgaataatgacccctacatgagcaacggatcattgagcccgccaataccacgaactagtaacaaagtccccgttgtgcagccgtctcatgcagttcaccctctaacccctctgattacttactcagacgagcacttttcacccggatcccatccgtcgcatatcccgagcgatgtcaattctaagcagggtatgagcagacatcctcccgctccagacataccgaccttctatccgctgtccccgggaggtgtcgggcagattacccctcctctggggtggttttctcaccacatgatcccagggcctcccggaccacacactacaggtattccccacccagcgatcgtgacaccccaggtgaaacaggagcatcctcataccgattctgaccttatgcacgtgaagcctcaacacgagcagaggaaagagcaggaacctaaacggcctcacatcaaaaaacccctgaacgcctttatgctgtatatgaaggagatgagagctaatgtggtcgccgagtgcactctgaaggagtctgccgctataaatcaaattctgggacgccgttggcacgccctaagccgagaggaacaggctaagtactacgaattggctcgtaaggagaggcagttgcatatgcagctgtatcctggttggtctgcgagggataattacggcaagaagaaaaagcggaagcgggagaagctacaagaatccgctagcggaactggtcccagaatgacagcagcatacatctag

SEQ ID NO: 48461 - protein, 386 aa, Artificial Sequence
  derived and/or modified sequence
MPQLSGGGGGGGGDPELCATDEMIPFKDEGDPQKEKIFAEISHPEEEGDLADIKSSLVNESEIIPASNGHEVARQAQTSQEPYHDKAREHPDDGKHPDGGLYNKGPSYSSYSGYIMMPNMNNDPYMSNGSLSPPIPRTSNKVPVVQPSHAVHPLTPLITYSDEHFSPGSHPSHIPSDVNSKQGMSRHPPAPDIPTFYPLSPGGVGQITPPLGWFSHHMIPGPPGPHTTGIPHPAIVTPQVKQEHPHTDSDLMHVKPQHEQRKEQEPKRPHIKKPLNAFMLYMKEMRANVVAECTLKESAAINQILGRRWHALSREEQAKYYELARKERQLHMQLYPGWSARDNYGKKKKRKREKLQESASGGKRSSFPTCKAKAATPGPLLEMEAC

SEQ ID NO: 48462 - DNA, 1161 bp, Artificial Sequence
  derived and/or modified sequence
atgccccagctgagcggcggcggcggcggcggcggcggcgaccccgagctgtgcgccaccgacgagatgatccccttcaaggacgagggcgacccccagaaggagaagatcttcgccgagatcagccaccccgaggaggagggcgacctggccgacatcaagagcagcctggtgaacgagagcgagatcatccccgccagcaacggccacgaggtggccagacaggcccagaccagccaggagccctaccacgacaaggccagagagcaccccgacgacggcaagcaccccgacggcggcctgtacaacaagggccccagctacagcagctacagcggctacatcatgatgcccaacatgaacaacgacccctacatgagcaacggcagcctgagcccccccatccccagaaccagcaacaaggtgcccgtggtgcagcccagccacgccgtgcaccccctgacccccctgatcacctacagcgacgagcacttcagccccggcagccaccccagccacatccccagcgacgtgaacagcaagcagggcatgagcagacacccccccgcccccgacatccccaccttctaccccctgagccccggcggcgtgggccagatcaccccccccctgggctggttcagccaccacatgatccccggcccccccggcccccacaccaccggcatcccccaccccgccatcgtgaccccccaggtgaagcaggagcacccccacaccgacagcgacctgatgcacgtgaagccccagcacgagcagagaaaggagcaggagcccaagagaccccacatcaagaagcccctgaacgccttcatgctgtacatgaaggagatgagagccaacgtggtggccgagtgcaccctgaaggagagcgccgccatcaaccagatcctgggcagaagatggcacgccctgagcagagaggagcaggccaagtactacgagctggccagaaaggagagacagctgcacatgcagctgtaccccggctggagcgccagagacaactacggcaagaagaagaagagaaagagagagaagctgcaggagagcgccagcggcggcaagagaagcagcttccccacctgcaaggccaaggccgccacccccggccccctgctggagatggaggcctgctag

SEQ ID NO: 48463 - DNA, 1161 bp, Artificial Sequence
  derived and/or modified sequence
atgccccagctgtctggcggaggggggggcggagggggggaccctgaactgtgcgctaccgatgaaatgatcccctttaaggacgaaggggacccgcagaaagaaaagatctttgcagagatcagccacccggaggaggaaggggacctagcggacataaaatcctcccttgttaatgaaagtgagatcatccctgcctcaaatgggcacgaggtggcgagacaggctcagaccagtcaggagccataccacgacaaagctagagagcaccctgatgatggaaagcacccagacggcggcctgtataacaaaggaccctcttactctagttacagcggctatattatgatgcccaatatgaataacgacccctatatgagcaatgggagcctgagcccacccatcccgaggaccagcaacaaagtccctgtggtgcaaccgagccatgccgtgcaccccctcacccccctgattacttacagcgatgagcacttcagtcctggaagtcacccatctcatataccgagcgatgttaattctaaacaaggcatgtcaaggcatccccccgctcccgacatcccgacgttctaccccctgtctcccggtggcgtcgggcagatcacaccacctctggggtggttcagtcatcatatgattccaggcccgccagggcctcacaccaccggcattcctcatccagccattgtcacccctcaggtcaaacaagagcacccccacactgatagtgacctgatgcacgtgaagcctcagcatgaacagcggaaggagcaagagcccaagaggcctcatatcaagaaacctctgaatgcatttatgctttatatgaaagagatgagagctaatgtcgttgcagaatgcaccttaaaggagtccgccgctatcaaccagatactgggtcgcagatggcacgctctttcccgggaagagcaagccaaatattacgagctggcacgaaaagagcgacagctgcatatgcagctgtaccccgggtggagtgccagggacaattatggaaagaaaaaaaagagaaagagagaaaagttgcaggaaagcgcctctgggggcaaacggtcatctttccccacttgcaaagctaaagctgctacgcctggcccacttctggagatggaggcttgctag

SEQ ID NO: 48464 - DNA, 1161 bp, Artificial Sequence
  derived and/or modified sequence
atgccccagctgagcggcggcggcggcggcggcggcggggaccctgagctgtgtgccacagatgagatgatccccttcaaggatgaaggagacccccagaaggagaagatctttgctgagatcagccaccctgaggaggagggggacctggccgacatcaagagcagcctggtgaatgaaagtgagatcatcccagccagcaatggccacgaggtggcccggcaggcccagaccagccaggagccctaccatgacaaggcccgggagcacccagatgatggcaagcacccagatggcggcctgtacaacaagggccccagctacagcagctacagcggctacatcatgatgcccaacatgaacaatgacccctacatgagcaatggcagcctgagcccccccatccccaggaccagcaacaaggtgcctgtggtgcagcccagccatgctgtgcaccccctgacccccctcatcacctacagtgatgagcacttcagccctggcagccaccccagccacatccccagtgatgtgaacagcaagcagggcatgagccgccaccccccagccccagacatccccaccttctaccccctgagccctggaggagtgggccagatcaccccacccctgggctggttcagccaccacatgatccctggccccccaggcccccacaccaccggcatcccccacccagccatcgtgaccccccaggtgaagcaggagcacccccacacagacagcgacctgatgcacgtgaagccccagcacgagcagaggaaggagcaggagcccaagaggccccacatcaagaagcccctgaatgccttcatgctgtacatgaaggagatgagggccaacgtggtggccgagtgcaccctgaaggagagcgctgccatcaaccagatcctgggccgccgctggcacgccctgagccgggaggagcaggccaagtactatgagctggccaggaaggagcggcagctgcacatgcagctgtacccaggctggagcgcccgggacaactacggcaagaagaagaagaggaagcgggagaagctgcaggagagcgccagcggcggcaagaggagcagcttccccacctgcaaggccaaggccgccaccccaggccccctgctggagatggaggcctgctag

SEQ ID NO: 48465 - DNA, 3477 bp, Artificial Sequence
  derived and/or modified sequence
agcgccggcgaggcgcgggaggaggagaagcagtggggaggcgcagccgctcacctgcggggcagggcgcggaggagggacccgggctgcgcgctctcgggccgaggaaccaggacgcgcccggagcctcgcacgcggccaagctcggggcgtcccctcccctcggccgggcgaactcaaggggcgcagctctttgctttgacagagctggccggcggaggcgtgcagagcggcgagccggcgagccaggctgagaaactcgagccgggaacaaagaggggtcggactgagtgtgtgtgtcggctcgagctccgggcagaggcatttgggcccgaggcccccgctgtgactccccgagactccgcagtgccctccactgcggagtccccgcgcttgccggcaaaaactttattcttggcaaacttctctttctcttcccctcctcctcggcccccatcttctgctcctcctccttctctagcagattaaatgagcctcgagaagaaaaaccgaagcgaaagggaagaaaataagaagatctaaaacggacatctccagcgtgggtggctcctttttctttttctttttttcccacccttcaggaagtggacgtttcgttatcttctgatccttgcaccttcttttggggcaaacggggcccttctgcccagatcccctctcttttctcggaaaacaaactactaagtcggcatccggggtaactacagtggagagggtttccgcggagacgcgccgccggaccctcctctgcactttggggaggcgtgctccctccagaaccggcgttctccgcgcgcaaatcccggcgacgcggggtcgcggggtggccgccggggcagcctcgtctagcgcgcgccgcgcagacgcccccggagtcgccagctaccgcagccctcgccgcccagtgcccttcggcctcgggggcgggcgcctgcgtcggtctccgcgaagcgggaaagcgcggcggccgccgggattcgggcgccgcggcagctgctccggctgccggccggcggccccgcgctcgcccgccccgcttccgcccgctgtcctgctgcacgaacccttccaactctcctttcctcccccacccttgagttacccctctgtctttcctgctgttgcgcgggtgctcccacagcggagcggagattacagagccgccgggatgccccaactctccggaggaggtggcggcggcgggggggacccggaactctgcgccacggacgagatgatccccttcaaggacgagggcgatcctcagaaggaaaagatcttcgccgagatcagtcatcccgaagaggaaggcgatttagctgacatcaagtcttccttggtgaacgagtctgaaatcatcccggccagcaacggacacgaggtggccagacaagcacaaacctctcaggagccctaccacgacaaggccagagaacaccccgatgacggaaagcatccagatggaggcctctacaacaagggaccctcctactcgagttattccgggtacataatgatgccaaatatgaataacgacccatacatgtcaaatggatctctttctccacccatcccgagaacatcaaataaagtgcccgtggtgcagccatcccatgcggtccatcctctcacccccctcatcacttacagtgacgagcacttttctccaggatcacacccgtcacacatcccatcagatgtcaactccaaacaaggcatgtccagacatcctccagctcctgatatccctactttttatcccttgtctccgggtggtgttggacagatcaccccacctcttggctggttttcccatcatatgattcccggtcctcctggtccccacacaactggcatccctcatccagctattgtaacacctcaggtcaaacaggaacatccccacactgacagtgacctaatgcacgtgaagcctcagcatgaacagagaaaggagcaggagccaaaaagacctcacattaagaagcctctgaatgcttttatgttatacatgaaagaaatgagagcgaatgtcgttgctgagtgtactctaaaagaaagtgcagctatcaaccagattcttggcagaaggtggcatgccctctcccgtgaagagcaggctaaatattatgaattagcacggaaagaaagacagctacatatgcagctttatccaggctggtctgcaagagacaattatggtaagaaaaagaagaggaagagagagaaactacaggaatctgcatcaggtggaaaacgaagctcattcccaacgtgcaaagccaaggcagcgaccccaggacctcttctggagatggaagcttgttgaaaacccagactgtctccacggcctgcccagtcgaccccaaaggaacactgacatcaattttaccctgaggtcactgctagagacgctgatccataaagacaatcactgccaacccctctttcgtctactgcaagagccaagttccaaaataaagcataaaaaggttttttaaaaggaaatgtaaaagcacatgagaatgctagcaggctgtggggcagctgagcagcttttctcccctcatatctgcgtgcacttcccagagcatcttgcatccaaacctgtaacctttcggcaaggacggtaacttggctgcatttgcctgtcatgcgcaactggagccagcaaccagcacatccatcagcaccccagtggaggagttcatggaagagttccctctttgtttctgcttcatttttctttcttttcttttctcctaaagcttttatttaacagtgcaaaaggatcgtttttttttgcttttttaaacttgaatttttttaatttacactttttagttttaattttcttgtatattttgctagctatgagcttttaaataaaattgaaagttctggaaaagtttgaaataatgacataaaaagaagccttctttttctgagacagcttgtctggtaagtggcttctctgtgaattgcctgtaacacatagtggcttctccgcccttgtaaggtgttcagtagagctaaataaatgtaatagccaaacccactctgttggtagcaattggcagccctatttcagtttattttttcttctgttttcttcttttctttttttaaacagtaaaccttaacagatgcgttcagcagactggtttgcagtgaattttcatttctttccttatcacccccttgttgtaaaaagcccagcacttgaattgttattactttaaatgttctgtatttgtatctgtttttattagccaattagtgggattttatgccagttgttaaaatgagcattgatgtacccattttttaaaaaagcaaggcacagcctttgcccaaaactgtcatcctaacgtttgtcattccagtttgagttaatgtgctgagcatttttttaaaagaagctttgtaataaaacatttttaaaaattgtcattt

SEQ ID NO: 48466 - DNA, 1161 bp, Artificial Sequence
  derived and/or modified sequence
atgccccagctgagcggcggcggcggcggcggcggcggcgaccccgagttgtgcgccaccgatgaaatgatcccatttaaggatgagggtgatccccagaaagagaagattttcgccgagataagccatccagaagaggaaggcgatctggccgacataaagagcagcctggtaaatgagtccgaaatcataccagcatctaatggccatgaagtcgcccgccaggcccaaacctctcaggagccgtaccatgacaaagcacgggaacaccccgatgacggcaagcaccctgacggcggactctataataagggaccatcttacagcagctactcaggctacataatgatgccaaatatgaataatgacccctacatgtccaacgggagtttgagcccacccatacccaggacatctaataaagtaccagtggttcagccgagtcatgcggtacaccccctaacaccccttattacatactccgacgagcacttttctcctgggtctcacccaagccacatcccgtcagatgttaattcaaaacagggaatgagccggcacccaccagctcctgatattcccactttctaccccctctccccaggaggcgtgggccagataaccccaccgttaggctggttctcccatcatatgatacccggcccacctggtccacacacaactggcataccccaccccgcaatcgtgacaccccaggttaaacaggagcacccacacaccgattctgatctgatgcatgtaaaaccacagcatgaacaaaggaaagaacaggaaccaaagcgcccacatatcaagaagccccttaatgccttcatgctctacatgaaagagatgcgtgccaacgtggtggctgagtgtactctgaaggagtcagccgctataaaccaaatactaggccgacgctggcatgctctgtcccgcgaggagcaagccaaatactatgaactggctcgcaaggagcgacagctgcatatgcagctgtaccccggctggtcagcgagggacaattatggtaagaagaagaagagaaaaagggaaaagctgcaggagagcgcgagcggcggcaaacggtcctctttcccaacctgtaaggcaaaagctgcgacaccgggccctctgttggagatggaagcttgctag

SEQ ID NO: 48467 - DNA, 1161 bp, Artificial Sequence
  derived and/or modified sequence
atgccacaattatcgggaggagggggaggcggtgggggagacccggaattatgtgcaacagacgaaatgatccccttcaaagacgaaggagacccacagaaggagaagatctttgccgagatctctcatcccgaggaggaaggagacctcgccgacatcaagagcagtctggttaacgagtcagagatcatacccgcatcaaatgggcatgaagtagcccgacaggcccagaccagccaagagccgtaccacgacaaggcgagggagcatcccgacgacggaaagcaccccgatgggggattgtacaacaaagggccatcttactctagttatagtggatacattatgatgcccaatatgaataatgacccctatatgtccaacggctctctcagtccacctattccccgaacttccaacaaagtaccggttgtacagccctcccatgccgtccatccgctgactcccctgatcacatactcagacgagcatttctccccagggagccatccctcgcacatacccagtgacgtgaacagtaaacaggggatgtccagacaccctcctgcccctgatatccccactttctacccactgagtcccggtggggtggggcagataaccccaccactgggctggttctcacatcacatgatccccggtcctcctggccctcatacaacaggcatcccccatcctgcaatcgtaacaccgcaggttaaacaggagcaccctcacaccgatagtgacctgatgcacgttaagccacagcacgaacagcgaaaagaacaggagccgaagagaccacacatcaagaaacctctgaacgccttcatgttatatatgaaggagatgcgcgcaaacgtggttgcagaatgcactttgaaggaaagcgccgctataaaccagatcctaggacgcaggtggcacgccctgtcccgcgaggagcaggccaaatactatgagcttgcccgaaaagagcgccagttacatatgcagctctacccaggttggtctgcgagagacaattatgggaagaagaagaagcgaaagagagagaaacttcaagagtcagccagcggtggtaaacgttccagctttcccacgtgtaaggccaaagccgctaccccgggacctctgctggagatggaggcttgctag

SEQ ID NO: 48468 - protein, 115 aa, Artificial Sequence
  derived and/or modified sequence
MQAQAPVVVVTQPGVGPGPAPQNSNWQTGMCDCFSDCGVCLCGTFCFPCLGCQVAADMNECCLCGTSVAMRTLYRTRYGIPGSICDDYMATLCCPHCTLCQIKRDINRRRAMRTF

SEQ ID NO: 48469 - DNA, 1560 bp, Artificial Sequence
  derived and/or modified sequence
agtaaagggaaacagacatgaacactaggtgacatggagtgttaggggcgctatggtagaagtctgcagagagtgcaatgggcgtccaaatgaggaagtgatcacttgcacaagagtgggaggcttggctggaaaggcttctctgaataggatgacatttgatctgtgttttgaagggcatcgttggcaaggtaagtaatccaattaaaggaggttgcctcagctaaagcacagtatgctcaaaggtgcggatcatttgaaaatttgagttcaggtgcagtaggggtaaggtaagtatccaacagaattttctacaatgatggaaatgttctatattgtcactgtccaatacggtagcctctagccacatttggccagtacaactgaagaattgaatattaactttcatttaattctagctaatttaaatttaaatagtttcatcagttagtggctaccatattgaacagtgcaggtttagagataaacagaggccagttgcaggagggtcttgcatcccattgaggaggactgaattttcttctgcagggccttctgtggtctgcagaaagggcagtacacaggcagtaatattatcagctttgcctgtgggagtgccccagcctggaagcagataatacagttaggagattcccataacctgcctgagtgagagcattagtaattagggaaggaaatggatgtgagacttgctgagaagggctggacaggcttagtgacaggtctgagtgtgaggggagagggagtgggggaagtgggatcaggtttgagccagctattaaatcaatgccaattcatcccataaagaatgcagagagtgggacaggtttggagagtgtaaggaacatggctgtgctgtagccaagcaggcatagggtagcaggaataggccgaggtaaacagcctagacatctcagcgggattggggtgcaagtgcacagtcctgtgtcttatatagtcacagccatgtaggcataacatagagcagctccccacctggctctcagccactagtgtttgtgtagtgtataaatgtaacactgaccctgtgaaggggctgctgaataaagccatgtctcatttacctgctgtctctccagtgttcttccagctccctgccccacatccacccactgtcctcagacctcagctggggctgcaccccaaccctgagtgtgacagagagaagatgagtgttagagatcatgatcctgaagtgctgacgagaaattcagcctgcaagcctagaggtcagctcagtggccaccttctgaagcccagggcaccattggaagctgcctagtttgaggcacggatggaagaggaaaacactgagaacaacatccctcttcctgaggaatgcatacaagggtgcttgggggtgggttggggatcccaaggcaggagagccaaagctggagtcagaggaagctcttcttctgaaacctgtaatttcaatgtcttttcctttcccttcaaaattgtaatttccttctgaaatcattctaaccctttagtaaagacattaatttaaagatg

SEQ ID NO: 48470 - DNA, 1395 bp, Artificial Sequence
  derived and/or modified sequence
gcatcgttggcaaggtaagtaatccaattaaaggaggttgcctcagctaaagcacagtatgctcaaaggtgcggatcatttgaaaatttgagttcaggtgcagtaggggtaaggtaagtatccaacagaattttctacaatgatggaaatgttctatattgtcactgtccaatacggtagcctctagccacatttggccagtacaactgaagaattgaatattaactttcatttaattctagctaatttaaatttaaatagtttcatcagttagtggctaccatattgaacagtgcaggtttagagataaacagaggccagttgcaggagggtcttgcatcccattgaggaggactgaattttcttctgcagggccttctgtggtctgcagaaagggcagtacacaggcagtaatattatcagctttgcctgtgggagtgccccagcctggaagcagataatacagttaggagattcccataacctgcctgagtgagagcattagtaattagggaaggaaatggatgtgagacttgctgagaagggctggacaggcttagtgacaggtctgagtgtgaggggagagggagtgggggaagtgggatcaggtttgagccagctattaaatcaatgccaattcatcccataaagaatgcagagagtgggacaggtttggagagtgtaaggaacatggctgtgctgtagccaagcaggcatagggtagcaggaataggccgaggtaaacagcctagacatctcagcgggattggggtgcaagtgcacagtcctgtgtcttatatagtcacagccatgtaggcataacatagagcagctccccacctggctctcagccactagtgtttgtgtagtgtataaatgtaacactgaccctgtgaaggggctgctgaataaagccatgtctcatttacctgctgtctctccagtgttcttccagctccctgccccacatccacccactgtcctcagacctcagctggggctgcaccccaaccctgagtgtgacagagagaagatgagtgttagagatcatgatcctgaagtgctgacgagaaattcaggaagcctgcaagcctagaggtcagctcagtggccaccttctgaagcccagggcaccattggaagctgcctagtttgaggcacggatggaagaggaaaacactgagaacaacatccctcttcctgaggaatgcatacaagggtgcttgggggtgggttggggatcccaaggcaggagagccaaagctggagtcagaggaagctcttcttctgaaacctgtaatttcaatgtcttttcctttcccttcaaaattgtaatttccttctgaaatcattctaaccctttagtaaagacattaatttaaagatgtttaaaaa

SEQ ID NO: 48471 - DNA, 348 bp, Artificial Sequence
  derived and/or modified sequence
atgcaggcccaggcccccgtggtggtggtgacccagcccggcgtgggccccggccccgccccccagaacagcaactggcagaccggcatgtgcgactgcttcagcgactgcggcgtgtgcctgtgcggcaccttctgcttcccctgcctgggctgccaggtggccgccgacatgaacgagtgctgcctgtgcggcaccagcgtggccatgagaaccctgtacagaaccagatacggcatccccggcagcatctgcgacgactacatggccaccctgtgctgcccccactgcaccctgtgccagatcaagagagacatcaacagaagaagagccatgagaaccttctag

SEQ ID NO: 48472 - DNA, 348 bp, Artificial Sequence
  derived and/or modified sequence
atgcaagcccaagcccccgttgtggtcgttacccagcctggcgtggggccaggacccgctcctcaaaactccaattggcaaacagggatgtgtgactgtttttcagattgcggggtgtgcctgtgcggaaccttctgtttcccatgcctaggatgccaagtagctgccgatatgaatgagtgctgtttatgcgggacttcagtcgctatgagaaccttgtatagaacgagatatgggattccaggatcaatttgcgacgattatatggctacactgtgctgtccacattgcactctgtgccagattaagagagacatcaatcggaggagggcaatgcgcaccttttag

SEQ ID NO: 48473 - DNA, 348 bp, Artificial Sequence
  derived and/or modified sequence
atgcaggcgcaggccccggtggtcgtggtgacccaacccggtgtcggccccggtccagctccccagaacagcaattggcagactggaatgtgcgactgttttagcgattgtggtgtatgcctgtgcggcactttctgttttccctgcttgggctgtcaagttgcagccgatatgaacgagtgttgtctgtgcggtacatccgttgcaatgagaacactataccgcacacggtacggaatcccaggatccatttgcgacgattacatggccacactgtgctgtcctcactgcaccctctgccaaatcaaaagggacattaacagaagacgcgcaatgagaactttttag

SEQ ID NO: 48474 - DNA, 348 bp, Artificial Sequence
  derived and/or modified sequence
atgcaagctcaagcgccagtcgttgtggtgactcaaccgggggtcggacccgggccagcccctcagaactctaattggcagactggcatgtgtgactgtttctccgactgcggcgtgtgcctttgtggcacgttttgcttcccatgtttgggttgccaggtggcagcagatatgaacgagtgctgcctctgtggtacaagtgtggcaatgcggacactttacagaacccggtatgggatacctggttctatctgtgacgattatatggccactctttgctgtcctcattgtaccctgtgccaaatcaagcgcgatatcaaccgaagacgtgccatgcgcactttttag

SEQ ID NO: 48475 - DNA, 348 bp, Artificial Sequence
  derived and/or modified sequence
atgcaggctcaggcaccagttgtcgtagttacacagcctggcgtgggccctgggcccgctcctcagaactctaactggcagacaggaatgtgcgattgtttttcagattgtggtgtgtgtctatgcggaacgttttgtttcccgtgcctcgggtgccaggtcgcggctgacatgaatgaatgctgcctctgcggcacctctgttgccatgaggactttgtatcgcaccaggtacggcatccctggcagtatttgtgatgactatatggctaccctgtgttgtccccactgcaccctatgccagattaaacgggatattaaccggaggagagcgatgagaactttttag

SEQ ID NO: 48476 - DNA, 348 bp, Artificial Sequence
  derived and/or modified sequence
atgcaggcccaggcccctgtggtggtggtgacccagcccggggtgggccctggccctgccccccagaacagcaactggcagacaggcatgtgtgactgcttcagtgactgtggggtgtgcctgtgtggcaccttctgcttcccctgcctgggctgccaggtggccgctgacatgaatgaatgctgcctgtgtggcacctctgtggccatgaggaccctgtaccgcaccaggtatggcatccctggcagcatctgtgatgactacatggccaccctgtgctgcccccactgcaccctgtgccagatcaagagggacatcaacagaagaagagccatgaggaccttctag

SEQ ID NO: 48477 - DNA, 348 bp, Artificial Sequence
  derived and/or modified sequence
atgcaggcccaggcccccgtggtggtggtgacccagcccggcgtgggcccaggccccgcaccccagaacagtaactggcagactggcatgtgcgactgtttctccgactgtggcgtatgcctctgcggtactttttgcttcccatgccttggctgtcaagttgcggccgatatgaatgagtgttgtctgtgcgggacctctgtagctatgcgaacgttgtacaggactcggtacgggattcctggcagtatttgtgatgactacatggccactttgtgttgtccccattgtaccttgtgccagatcaagcgcgatataaatcggcgcagggccatgaggacattctag

SEQ ID NO: 48478 - DNA, 348 bp, Artificial Sequence
  derived and/or modified sequence
atgcaggcccaggcccccgtggtggtggtgacccagcccggcgtgggcccgggaccagctccacaaaactcaaactggcaaaccggcatgtgcgattgcttctctgactgcggtgtctgtctgtgtggcaccttctgcttcccctgcctgggctgccaagtggcagctgacatgaatgagtgctgcctttgtgggacttccgtggccatgcggactctgtacaggacgcggtacggaatcccaggaagcatttgcgacgattacatggccaccctgtgttgccctcattgcactttgtgtcagattaagcgggatatcaaccggcgccgcgctatgaggactttttag

SEQ ID NO: 48479 - DNA, 348 bp, Artificial Sequence
  derived and/or modified sequence
atgcaggcccaggcccccgtggtggtggtgacccagcccggcgtgggtccagggccagcacctcaaaactccaactggcaaactgggatgtgcgactgtttttcagactgtggcgtgtgtttgtgcgggacattctgcttcccatgtttgggatgccaggtggcagcagacatgaacgagtgctgcctgtgcggaacctctgtggctatgcggacgctgtatcggaccaggtacgggataccaggctccatttgcgatgactacatggctacattatgttgtccacactgtacactgtgccagattaaacgggacatcaacagaaggcgagccatgcggacattttag

SEQ ID NO: 48480 - DNA, 348 bp, Artificial Sequence
  derived and/or modified sequence
atgcaggcccaggcccccgtggtggtggtgacccagcccggcgtgggccccggcccagcgccacagaactccaactggcagaccggcatgtgcgattgcttctccgattgtggtgtgtgcctctgcgggactttttgcttcccctgtctcggttgccaagtggctgcagatatgaacgagtgttgcctgtgtggcacatccgtagcgatgcgcacattgtacagaacgcgctacggaatacctggttccatatgtgacgattacatggctaccctatgctgccctcattgcaccctctgtcagatcaaacgcgacattaataggcggcgggctatgcgtacgttctag

SEQ ID NO: 48481 - DNA, 1447 bp, Artificial Sequence
  derived and/or modified sequence
gcgtctgaaactgttctatgtactatgccctgcgatagaaacacagttacctctcccctttcacgtagttttcatttgtggtgagattctctcccaggccacaagacatttcctgctcggaaccttgtttactaatttccactgcttttaaggccctgcactgaaaatgcaagctcaggcgccggtggtcgttgtgacccaacctggagtcggtcccggtccggccccccagaactccaactggcagacaggcatgtgtgactgtttcagcgactgcggagtctgtctctgtggcacattttgtttcccgtgccttgggtgtcaagttgcagctgatatgaatgaatgctgtctgtgtggaacaagcgtcgcaatgaggactctctacaggacccgatatggcatccctggatctatttgtgatgactatatggcaactctttgctgtcctcattgtactctttgccaaatcaagagagatatcaacagaaggagagccatgcgtactttctaaaaactgatggtgaaaagctcttaccgaagcaacaaaattcagcagacacctcttcagcttgagttcttcaccatcttttgcaactgaaatatgatggatatgcttaagtacaactgatggcatgaaaaaaatcaaatttttgatttattataaatgaatgttgtccctgaacttagctaaatggtgcaacttagtttctccttgctttcatattatcgaattcgaatttcctggcttataaactttttaaattacatttgaaatataaaccaaatgaaatattttactgataagattcttcatgcttctttgctctccttaaaatgtctttttcactagttagttccaagggtcagtctcataattttgttcttatactttgatttcctttttctttttttttttttttaatagagttgggggatctttctttctttttttttttttttttttgagatagagtctcgctctgttgcccaggctggagtgcagtggcgtgatctcagctcactgcaacctccacctcctggatacaagcgattctgctgcctcagtctcccgagtagctgggattacaggttcccgccaccatgcccagctaatttttgtatttttagtagagacggggtttcaccatcttggtcaggctggtctcgaactcctgacctcgtgatccacctgcctcggcatcacaaaatgctgggattacaggcatgagccaccgcgtccagcctagagttgggggtctttctatgttgcccaggctggtcttgaactccgggcctctagcaagcctctcatctcagcctcccaaggtgctggaattacaggtgtgagccactgcaccatactttggtttcttagcaggagattttggttcacagtaacccagctctctttcatctaagaactttagatgagaaaaaaaaaaaa

SEQ ID NO: 48482 - DNA, 786 bp, Artificial Sequence
  derived and/or modified sequence
gggtcccagagctgggctggcgggaggcgtaatccggcggggtgagggttgatcgaagagccccgcgcgcagctgccgctcacagccccttcccgagtgcagagcgggcagagaagtccactgcttttaaggccctgcactgaaaatgcaagctcaggcgccggtggtcgttgtgacccaacctggagtcggtcccggtccggccccccagaactccaactggcagacaggcatgtgtgactgtttcagcgactgcggagtctgtctctgtggcacattttgtttcccgtgccttgggtgtcaagttgcagctgatatgaatgaatgctgtctgtgtggaacaagcgtcgcaatgaggactctctacaggacccgatatggcatccctggatctatttgtgatgactatatggcaactctttgctgtcctcattgtactctttgccaaatcaagagagatatcaacagaaggagagccatgcgtactttctaaaaactgatggtgaaaagctcttaccgaagcaacaaaattcagcagacacctcttcagcttgagttcttcaccatcttttgcaactgaaatatgatggatatgcttaagtacaactgatggcatgaaaaaaatcaaatttttgatttattataaatgaatgttgtccctgaacttagctaaatggtgcaacttagtttctccttgctttcatattatcgaattcgaatttcctggcttataaactttttaaattacatttgaaatataaaccaaatgaaatattttactgataa

SEQ ID NO: 48483 - DNA, 2253 bp, Artificial Sequence
  derived and/or modified sequence
tctctcccaggccacaagacatttcctgctcggaaccttgtttactaatttccactgcttttaaggccctgcactgaaaatgcaagctcaggcgccggtggtcgttgtgacccaacctggagtcggtcccggtccggccccccagaactccaactggcagacaggcatgtgtgactgtttcagcgactgcggagtctgtctctgtggcacattttgtttcccgtgccttgggtgtcaagttgcagctgatatgaatgaatgctgtctgtgtggaacaagcgtcgcaatgaggactctctacaggacccgatatggcatccctggatctatttgtgatgactatatggcaactctttgctgtcctcattgtactctttgccaaatcaagagagatatcaacagaaggagagccatgcgtactttctaaaaactgatggtgagtcaatgcaaacatgcctctcagaacatgtgggtttttagaaatatcactaaagactttgtcaattatttgttgttttgaataattcagcaataactatttcttaagtctcctgaagtgctatcataatatcaagattggctttaattttcttcttatgaagaagatagctctatactttgaaaccatattttagtaaataaaggaatggtgaattttctaaacttctcagaattctggtgatctattaaggaagcacttaccacttgtaaaataccagagtatggtgagatacaaaagaattagaaaacatgttccctgctaagacaaacaagttgacaaaaggaattcgtaaataattataaaatagaagagtaaagaaaataacattctgtatgatatttggattgattgtggcataaagcatctatcatagcaaggtgaggttaaatagaaaactcctgttggagaagctgaactttgaaagaggtgaacatagaatttagaatgtttggaaatgttatatagaattaaccatctgaaattcaatcaagtcattttcaactaatttttctcaggactatctattgaggatgtagttaagtagaaatcaacatgacttactccatcccctgtagaatatatattaagtatgggaagaacacaatttttctactctttgtaatatccagtttccttcctgaagtgataaggactctgtatgggttaataaaaataactcttgggagatacgtaaaaaaatgttcatttacttagcaagtaatgtattaaggatctaggatcaagtatatattatcttagcaactaatgtatcaatgtatcaatatctaagactaggtaagatactgttaggtattgtagtagggttggggagcaagataaataagctagtccctctgtcattatagaatttatacgaaaaagggggattagacaaacccctaactaaaatgcagaattcaattaatgcctatagacaaagcggtattttatgttcagaggaggaaaagatcacatcttgtaagatgtataggtgaaagtttcttgaaagcagtgatttttaattctaaaggggaagtgcgtattagttctcaacaagaaacagatggcactcaaactgtgatagttcaaagatttaatgaagactaattataaaggtgtgggtggggcattgtagggagatgacaagggatggcataataacctgcctggcaacagccccagggaggagaagagggagcagtgacctgaatccttaaggagagagctgtgtgaagaggcctgccctgaaagaaacagtatcctctcaagagagggttgtgagcagcccgaggcaacccatagaactgaaaaagtaccctgacctcactttcggatgtccttctggttttcccattggctgaacccaccagaaaggcagagggcagcaaagtgtcacggtagtccgcaggtcgcttcccagggcacacagcaggatggtcaagggagtaagtaaatcagataggggcaaacagaggatcactgactcaagatgtggttttaattaatagaaatggaggctgagtgcagtggctcacacctgtgatcccagcactttgggaggccaaggcaagaggactgcttgaacccaggagttcaagaccagcctggggaacatgttgaaaccctgtctcttgaaaaaatacaaaaattagctaggtgtggtggtgcacgcctgtagtcccagatacttgggaggctgaggtgggaggatcacttgagcctgggaggtagaagctgcagtgagctatgat

SEQ ID NO: 48484 - DNA, 1025 bp, Artificial Sequence
  derived and/or modified sequence
atttacttctgtctgtatcaggaaacagaggcctgggtctagagacagggtcttggtgagggaaggactcaaaaccatgggatacagcatgaccgggcagcaccacagctgtggaaggagtttccctgcacaagttctcttctgttgtctgcctccatgtgagacatgcctttcaccttctgccatgattgtgaggcttccccagccacatggaactgaccaggaccagggtgaggcaaacaaggtccctacgggcacagaatttaagaaggcactcactcttgatgaaactggaggaccaaaattttaaactatgggatcagaaattcaaagactatgaataaaaatttcaaaagaaagaaatagtaataccaccaataagaagaataattaaaaaggtacaaagaaattggatgcaacattgtaaaaagagccatagtttggagctgagctgacatgagctaaaatcctagtccactgcttttaaggccctgcactgaaaatgcaagctcaggcgccggtggtcgttgtgacccaacctggagtcggtcccggtccggccccccagaactccaactggcagacaggcatgtgtgactgtttcagcgactgcggagtctgtctctgtggcacattttgtttcccgtgccttgggtgtcaagttgcagctgatatgaatgaatgctgtctgtgtggaacaagcgtcgcaatgaggactctctacaggacccgatatggcatccctggatctatttgtgatgactatatggcaactctttgctgtcctcattgtactctttgccaaatcaagagagatatcaacagaaggagagccatgcgtactttctaaaaactgatggtgaaaagctcttaccgaagcaacaaaattcagcagacacctcttcagcttgagttcttcaccatcttttgcaactgaaatatgatggatatgcttaagtacaactgatggcatgaaaaaaatcaaatttttgatttattataaatgaatgttgtccctgaactta

SEQ ID NO: 48485 - DNA, 348 bp, Artificial Sequence
  derived and/or modified sequence
atgcaggcgcaggcgcctgttgtcgtggttactcagcctggggtgggcccaggacccgcaccccagaacagcaattggcagacaggtatgtgcgactgtttcagtgactgtggagtttgtctgtgtggtaccttttgcttcccatgtctaggatgccaggtcgccgcagacatgaacgagtgttgcctgtgcggcacgagcgtggccatgaggactctatatagaacccgttatgggatacctggaagcatctgcgacgactacatggcgactctctgttgccctcactgtacgctgtgtcaaatcaagagagacatcaaccggcgtagagccatgcgcactttttag

SEQ ID NO: 48486 - DNA, 348 bp, Artificial Sequence
  derived and/or modified sequence
atgcaagctcaagctcctgtggtcgtggttacccagcccggagtggggcctggtccagccccacaaaatagcaactggcagacaggcatgtgcgactgcttttctgactgcggagtgtgcctctgtggtacattctgctttccttgtctcggatgccaggtggcggctgacatgaatgagtgctgcctgtgtggaacttctgttgccatgagaaccttatataggaccaggtatgggattcccggttccatctgcgatgactacatggccactctgtgttgtcctcattgcacactttgtcagatcaagcgcgacatcaataggcggagagctatgcggaccttctag

SEQ ID NO: 48487 - DNA, 348 bp, Artificial Sequence
  derived and/or modified sequence
atgcaggctcaggcgcctgtggtggtggtaacccagccgggtgtcggcccagggccagcccctcagaattctaattggcaaactggtatgtgtgactgtttttcagactgcggagtatgcctctgcgggacattctgctttccttgtctggggtgtcaggtggccgctgacatgaatgagtgttgtctgtgcggcacctctgttgcgatgcggacactctatcggacccgatacggtattccgggatccatttgcgacgattatatggctacgctgtgctgcccccactgtaccttgtgccaaattaagcgcgatattaacaggcgtagggccatgagaacattctag

SEQ ID NO: 48488 - DNA, 348 bp, Artificial Sequence
  derived and/or modified sequence
atgcaggcccaagctcctgtggtggttgtcacccagcctggtgtcgggccagggccagctccgcagaactcaaactggcaaactggcatgtgcgactgcttcagtgactgcggcgtgtgtttatgcggaaccttttgttttccatgtctggggtgccaggtggccgcagacatgaatgagtgttgcctgtgcggtactagtgtggctatgcggacactgtataggaccaggtacggaatccccggatcaatctgcgatgactacatggccacgttgtgctgtcctcattgtacgctgtgccagataaagcgcgatatcaatagacggagggccatgaggactttttag

SEQ ID NO: 48489 - protein, 610 aa, Artificial Sequence
  derived and/or modified sequence
MSVQVVSAAAAAKVPEVELKDLSPSEAESQLGLSTAAVGAMAPPAGGGDPEAPAPAAERPPVPGPGSGPAAALSPAAGKVPQASAMKRSDPHHQHQRHRDGGEALVSPDGTVTEAPRTVKKIQFADQKQEFNKRPTKIGRRSLSRSISQSSTDSYSSAASYTDSSDDETSPRDKQQKNSKGSSDFCVKNIKQAEFGRREIEIAEQEMPALMALRKRAQGEKPLAGAKIVGCTHITAQTAVLMETLGALGAQCRWAACNIYSTLNEVAAALAESGFPVFAWKGESEDDFWWCIDRCVNVEGWQPNMILDDGGDLTHWIYKKYPNMFKKIKGIVEESVTGVHRLYQLSKAGKLCVPAMNVNDSVTKQKFDNLYCCRESILDGLKRTTDMMFGGKQVVVCGYGEVGKGCCAALKAMGSIVYVTEIDPICALQACMDGFRLVKLNEVIRQVDIVITCTGNKNVVTREHLDRMKNSCIVCNMGHSNTEIDVASLRTPELTWERVRSQVDHVIWPDGKRIVLLAEGRLLNLSCSTVPTFVLSITATTQALALIELYNAPEGRYKQDVYLLPKKMDEYVASLHLPTFDAHLTELTDEQAKYLGLNKNGPFKPNYYRY

SEQ ID NO: 48490 - DNA, 1833 bp, Artificial Sequence
  derived and/or modified sequence
atgagcgtgcaggtggtgagcgccgccgccgccgccaaggtgcccgaggtggagctgaaggacctgagccccagcgaggccgagagccagctgggcctgagcaccgccgccgtgggcgccatggccccccccgccggcggcggcgaccccgaggcccccgcccccgccgccgagagaccccccgtgcccggccccggcagcggccccgccgccgccctgagccccgccgccggcaaggtgccccaggccagcgccatgaagagaagcgacccccaccaccagcaccagagacacagagacggcggcgaggccctggtgagccccgacggcaccgtgaccgaggcccccagaaccgtgaagaagatccagttcgccgaccagaagcaggagttcaacaagagacccaccaagatcggcagaagaagcctgagcagaagcatcagccagagcagcaccgacagctacagcagcgccgccagctacaccgacagcagcgacgacgagaccagccccagagacaagcagcagaagaacagcaagggcagcagcgacttctgcgtgaagaacatcaagcaggccgagttcggcagaagagagatcgagatcgccgagcaggagatgcccgccctgatggccctgagaaagagagcccagggcgagaagcccctggccggcgccaagatcgtgggctgcacccacatcaccgcccagaccgccgtgctgatggagaccctgggcgccctgggcgcccagtgcagatgggccgcctgcaacatctacagcaccctgaacgaggtggccgccgccctggccgagagcggcttccccgtgttcgcctggaagggcgagagcgaggacgacttctggtggtgcatcgacagatgcgtgaacgtggagggctggcagcccaacatgatcctggacgacggcggcgacctgacccactggatctacaagaagtaccccaacatgttcaagaagatcaagggcatcgtggaggagagcgtgaccggcgtgcacagactgtaccagctgagcaaggccggcaagctgtgcgtgcccgccatgaacgtgaacgacagcgtgaccaagcagaagttcgacaacctgtactgctgcagagagagcatcctggacggcctgaagagaaccaccgacatgatgttcggcggcaagcaggtggtggtgtgcggctacggcgaggtgggcaagggctgctgcgccgccctgaaggccatgggcagcatcgtgtacgtgaccgagatcgaccccatctgcgccctgcaggcctgcatggacggcttcagactggtgaagctgaacgaggtgatcagacaggtggacatcgtgatcacctgcaccggcaacaagaacgtggtgaccagagagcacctggacagaatgaagaacagctgcatcgtgtgcaacatgggccacagcaacaccgagatcgacgtggccagcctgagaacccccgagctgacctgggagagagtgagaagccaggtggaccacgtgatctggcccgacggcaagagaatcgtgctgctggccgagggcagactgctgaacctgagctgcagcaccgtgcccaccttcgtgctgagcatcaccgccaccacccaggccctggccctgatcgagctgtacaacgcccccgagggcagatacaagcaggacgtgtacctgctgcccaagaagatggacgagtacgtggccagcctgcacctgcccaccttcgacgcccacctgaccgagctgaccgacgagcaggccaagtacctgggcctgaacaagaacggccccttcaagcccaactactacagatactag

SEQ ID NO: 48491 - DNA, 5026 bp, Artificial Sequence
  derived and/or modified sequence
gagccggtggttgcagcggaggcggtgatgtcggtgcaggttgtgtcagccgcggctgccgccaaggtgcctgaggtggagctgaaggacctgagcccctccgaggcggagtcgcaactaggactgagcacggccgccgtgggcgccatggcccccccggcgggcggtggagaccctgaggctccagctcccgccgcggagcggcccccggtccccggcccgggctcggggcccgccgccgctctcagccccgccgccgggaaggtgcctcaggcgtcggccatgaagcggagcgacccacatcaccagcaccagcggcaccgcgacggcggcgaggccctggtcagccccgacggcaccgtcaccgaggcgccgcgcacagtcaagaagatccagtttgctgaccagaagcaagaattcaacaaacgtcccaccaaaattggacgtcgctctttgtctcgttccatttctcagtcatctactgacagctacagctcagcggcttcatatacagatagctctgatgatgagacatcgcccagggacaagcagcaaaagaactctaagggaagcagtgacttctgtgttaagaacatcaaacaggcagagtttggacgaagagaaattgaaattgctgaacaagaaatgcctgcattgatggctttgaggaagagagctcaaggagaaaagcctttggctggagccaaaatcgtgggttgcacacacatcactgctcagactgctgtgcttatggaaactctgggtgctctgggggcccagtgccgatgggctgcctgcaacatctattccactctcaatgaagtggctgctgctctagcagaaagtggatttcctgtttttgcctggaagggagagtcagaagatgacttttggtggtgtatcgatagatgtgtgaatgtggagggctggcagccaaacatgatcttggatgatggaggggatcttacccactggatttataaaaagtatcccaacatgtttaagaaaatcaagggcatagtagaggagagtgttactggagttcacaggctgtaccaactgtccaaagctgggaagctgtgtgttccagccatgaatgtcaatgactcagtcaccaaacagaaatttgacaacctctactgttgccgtgaatcaattcttgatggacttaaaaggacaacagacatgatgtttggtggaaagcaagtggtagtctgtggctatggagaggtggggaaagggtgctgtgctgccctgaaagccatgggctccattgtgtatgtaactgaaattgaccccatctgtgccctgcaagcctgtatggatggatttcgactggtgaaattaaatgaggtcatccgacaagtggacattgttattacctgtacaggtaacaagaatgtggtaaccagagagcacttggaccgtatgaagaatagctgcatcgtttgtaacatgggacattccaacacagagattgacgtggcgagtctgcggacaccagaactgacctgggagcgagtgagatctcaagttgaccatgtgatatggcctgatggcaagaggatagtactgctggcagagggccgcctgctgaaccttagctgctccacagtgcctacatttgtgctctcaatcactgctactactcaggctcttgccttgatagagctttacaatgctcctgagggtcgctataagcaggatgtctacctgttgcccaagaagatggatgagtatgtggccagcctacacctgcctacctttgatgcccacttgacagagctgacagatgaacaggccaagtatctgggactcaacaagaatgggcccttcaagcctaattactacaggtattaagttcctgtaactcaaaccagaatttttaaggaatagaactccaagccttttctccactactatacaagaaagaattcagcaagctgcttctccaatcaaagctgcctgccgtgctcaccctgtgtgttaggttatttatttattaaaatcaagaatcctgtgcctgtagtgttggcccagagtgtggttactgccctgagggccatgaaagccacagaggatgggctgaggaaggaaagaaatggggttactgctcccagtgcatcatttgcatcattccccattgactgaatcctcagcagtggccgtttttcctcttgtccaggctcacgagttagtccagggattccatactccctattccctggagttttctggaataaattttcagcacctgcttttctcagcttggcccttccccgggtgaggccgtttggaattaacatggccagtgtttcacacaagattgggttcccaatcttgaccatcactatcactgccttctttatataaaggctaataaggaaggagtgttatttatggctttgccaagctacatcaagaactcagctgtgctgtgcctaccaggggtctcctttcttacccaggactcctttcttctccttgaatatttatgtccattttaacacttcctggttgcaagagggatgtgcctccattatttcctccacagttttggtatttgtcagacatttgttctgctgtctttctaatccagccaacgtctgctcaggaagtggggccagctccactgggacccatagttttacttccttgtcatttgattggatagtttccaaggaagcccctccagattggcactatctcagaaaaggagagcttgttgtgaaacactgcttcctgaaacttcctgctattgcctaaagctacgtctgaaactgagtagggaaaggcatacttttccagggacttagggggataggctttggaaatgggacaggtctttcagactcacagcttgataccctaacaaagcagagtatatttatttgtttcccaggaaggccattgcagtttgactggctgagggatacagagatgaaattgtaaactgtatccagattatcaaagctaatttgactagtttgaacctcgtcagacattcattcctttggccattgccatggatgaaaccgagatctgcagtctgatctgtggacttctctgctggcatatcttttatgatttaacctcttccatttgatgattctgtatttcagagtcagtttcttgagtaactccagtgctacaaaaagaattagtaatgtggtgtgggcagcgtgacattttatgtcccacccaaaaattggattccttttggagactgatctgttggtctcaggcatttcattaggaccagattggttctaagagttagtctggactggccctaggaaacttgaattaaataagcctcttccccttaccgatcctttttaacactctcaggtttgtttgtttcccacttttttcctatgctggtctgcctcaaagtctcaagaccaaggtgactcaagataacaccagaccacgcatgatcaccaaaaccttcccatcctgattctcttcttctacctctaccctctccaacttctcctggtcttcacatatactctcaaagctagtctgaaagtgaccttactttcggaagtagggaagtggaactttggtaaatgactgtttgcctcatttaatagtatacaggctcagcccatagactacagttcttcagaggccatatgtctcagcaagtactggttatattctttttttgtaaggaagatcataaatgctaaaaattccactaagccattcagttcttccttttgcctacctagtcctgatttttgtattaattggttccctttagcaagggattcagatctttgtaccttatcttatatccagagcagattccatttggcagatagatggtctctagcctattgtattcttagaccaaaaatcataacctgctgtttctcagcaaagccttgctctctggagcttactatgtgctggtacttaaagagtacattctgccttgctgtagtgaagagacccactccaaataaaaaaggggccacacggggcttctaagttaggttgccagtgttgctgcccatgatgagttatttgcctctgagtttcagatgacctctctgtagggacactgtgttatcaaccattaagaagaaagaaccacaagcctcccaagtatttgggttctatcttagggttgaaatctggtcattattccctctacccttggaatcagagcaatgtgtcttctttcctccaacctcttaccttagatgcatcctggttatctggaagcatgggaaagaaggctacttatctctttgtatgtggctccagtctgtgaggatacataacattttctctacaatgaatctgtgctaatattttgccttctttctttcttttcttttcacccttagagacagggtttcactatgttgcccaggctggtctcaaactcctgggctcaagcaatcctcctgcctcagcttcctgagtagctggaaccacaggtgtgtgctaccgtgcctggcacttttttgccttcttaatggagatattcagttttctttttttcatttaaacaaagaaaaaaaatgtatctactctaccttccctctgctctcctccctccctatcctacttgcccatatgagcacggctccccatggccacatactcctgcaaagcttttatgctgcttcgcttttctctaaacagatctgatattgctgctcctgtggttttctcaaaattaactttgccgtggtttttaaaaaggaatcaaaatgcattgttgcattaagctttttcaataaaggaaaattacggaaggaaaataggcaacaccagcaaattatatgtggacaggttctaaactctatatatacatatatatatatatatctatatatctatatacgtaatcatctagttctgtcatcttactgaaaggaataacacttctaaagatcaccatttctgagaagttcttggaaatctttatgtctaagtgattgtattagatcagcaataatgactatgtaatctcaaaaaacaaataaaatattcttaacatgga

SEQ ID NO: 48492 - DNA, 1833 bp, Artificial Sequence
  derived and/or modified sequence
atgtccgtccaggtcgtgagcgcagctgctgctgcaaaggttcccgaggtggagctcaaagatctgtcccctagcgaggcagaatcccaactggggctgtctaccgctgccgtgggggcaatggcaccccctgccggagggggagatcctgaggcccccgcgcctgcagcggagcgcccaccagtgccaggacctggctctggaccagcggcagccctgtctcccgccgccggtaaagtgccacaggcctccgcgatgaagcgtagtgatccacatcatcaacatcagcgacacagagatggcggtgaggccctcgtgtcaccagacgggaccgttacagaggctccacgtaccgtcaagaaaatccaatttgctgatcagaaacaagagttcaacaaaagaccaacgaaaattgggagacgatcactgtccagatcaatcagccagtcatcaaccgactcatactcttcagcggcttcatatactgatagctcagatgatgagactagcccccgagacaagcagcaaaagaatagcaagggctcatccgatttctgtgtgaaaaatatcaagcaggccgagtttggaaggcgcgaaattgagatcgccgagcaagaaatgccggctttgatggctcttcgcaaaagagcccagggcgagaagcctttagctggagctaagatcgtcgggtgcacacatattaccgctcagaccgcagtcctgatggaaacacttggtgcgcttggggctcagtgtaggtgggccgcttgtaacatatattcaactctaaacgaggtggcagcagccttagccgagagtggatttccagtctttgcttggaagggtgagtcagaggatgacttctggtggtgcatcgacaggtgcgtgaacgtggaggggtggcagccaaacatgatcctggatgacggcggagatcttacccactggatttacaaaaaatatcctaacatgtttaaaaaaattaaaggaattgtggaggagagtgtgacaggagtgcacagactctaccagctctctaaggctggtaagctctgtgttccggccatgaacgtcaacgactccgtgactaaacagaagtttgacaatttgtattgttgccgggagagtatcctggacggcttgaagcgtactacagacatgatgttcggcggaaaacaagtcgttgtctgcgggtacggtgaggtgggcaaggggtgctgcgcggctctgaaggcaatgggatccatagtgtatgtgacagaaatcgacccaatctgcgctctgcaagcctgcatggacggattcagactcgttaaactgaacgaagtgatccgccaggttgatatcgtgataacctgcaccggtaacaagaatgtcgtcactcgcgagcacctggatcgaatgaaaaactcttgtattgtgtgtaatatgggtcacagcaacactgagattgatgtggccagtctgcgcaccccagaacttacatgggaacgggtgcggtcacaggttgatcatgtcatctggccagacgggaaacgcattgtgcttctcgcggagggcaggcttcttaacctgtcctgctccacagtccccaccttcgtgctgagtataacagctaccacccaggccctcgccttgattgaactgtacaatgcaccggaaggacgttacaagcaggatgtttatctcctcccaaaaaagatggacgaatacgtggcctctctgcatctccccacttttgacgcgcacctaaccgaactgacagacgagcaagctaaatacttgggtcttaacaaaaacggaccattcaagccgaactactatcgatactag

SEQ ID NO: 48493 - DNA, 1833 bp, Artificial Sequence
  derived and/or modified sequence
atgtctgtgcaggtggtgtctgctgctgctgctgccaaggtgcctgaggtggagctgaaggacctgagccccagcgaggccgagagccagctgggcctgagcacagctgctgtgggcgccatggcccctcctgctgggggcggggaccctgaggccccagccccagctgctgagcggccccctgtgcccggccctggcagcggccctgctgctgccctgagccctgctgctgggaaggtgccccaggccagcgccatgaagagaagtgacccccaccaccagcaccagaggcacagagatggaggagaggccctggtgtccccagatggcaccgtgacagaggcccccaggacagtgaagaagatccagtttgctgaccagaagcaggagttcaacaagaggcccaccaagattggccgccgcagcctgagccgcagcatcagccagagcagcacagacagctacagcagcgctgccagctacacagacagcagtgatgatgagaccagcccccgggacaagcagcagaagaacagcaagggcagcagtgacttctgtgtgaagaacatcaagcaggccgagtttggaagaagagaaattgaaattgctgagcaggagatgcctgccctgatggccctgaggaagagggcccagggcgagaagcccctggccggggccaagatcgtgggctgcacccacatcacagcccagacagctgtgctgatggagaccctgggcgccctgggcgcccagtgccgctgggccgcctgcaacatctacagcaccctgaatgaggtggccgccgccctggccgagagcggcttccctgtgtttgcctggaagggggagagtgaagatgacttctggtggtgcatcgacagatgtgtgaatgtggagggctggcagcccaacatgatcctggatgatggaggagacctgacccactggatctacaagaagtaccccaacatgttcaagaagatcaagggcatcgtggaggagagcgtgactggagtgcaccggctgtaccagctgagcaaggccggcaagctgtgtgtgcctgccatgaatgtgaatgattctgtgaccaagcagaagtttgacaacctgtactgctgccgggagagcatcctggatggcctgaagaggaccacagacatgatgtttggaggcaagcaggtggtggtgtgtggctatggagaggtgggcaagggctgctgtgccgccctgaaggccatgggcagcatcgtgtatgtgacagaaattgaccccatctgtgccctgcaggcctgcatggatggcttccggctggtgaagctgaatgaagtcatccggcaggtggacatcgtcatcacctgcaccggcaacaagaatgtggtgacccgggagcacctggacaggatgaagaacagctgcatcgtgtgcaacatgggccacagcaacacagaaattgatgtggccagcctgcggaccccagagctgacctgggagcgggtgcgcagccaggtggaccacgtgatctggccagatggcaagagaattgtgctgctggccgagggccgcctgctgaacctgagctgcagcacagtgcccacctttgtgctgagcatcacagccaccacccaggccctggccctgattgagctgtacaatgcccctgagggccgctacaagcaggatgtgtacctgctgcccaagaagatggatgaatatgtggccagcctgcacctgcccacctttgatgcccacctgacagagctgacagatgagcaggccaagtacctgggcctgaacaagaatggccccttcaagcccaactactaccgctactag

SEQ ID NO: 48494 - DNA, 1833 bp, Artificial Sequence
  derived and/or modified sequence
atgagcgtgcaggtggtgagcgccgccgccgccgccaaggtgcccgaagtcgagctcaaggatctgtcaccttctgaggccgagtcccagcttggtttgtctaccgcagcagttggggctatggctccacctgcaggcgggggagacccggaagctccagctcccgcagccgagcggcccccagtccccggtccagggagcggaccagcggccgcccttagtccagctgccgggaaggtgcctcaggcttctgccatgaagaggtccgatcctcaccatcagcatcaaaggcacagggatggcggagaggctttggtgtcaccagacggcactgttacagaagctccccgaactgtgaaaaaaatccagttcgctgatcagaagcaggaattcaacaaacgtcctacgaaaataggccggagatctctttcccggtccatttcacagagctcgaccgatagttattcctccgcagcatcttataccgacagctccgatgacgaaaccagccccagagacaagcagcagaaaaactcaaaagggagctcggatttctgtgtaaaaaatatcaagcaggcagaattcggccgccgggaaatcgaaatcgcagagcaggagatgcctgcactcatggcgctgcggaagagagcccagggggagaagcctctcgcaggcgccaagattgtagggtgcacacatatcacggctcagactgccgtgctgatggagacattaggcgccctgggagctcaatgcaggtgggccgcctgcaatatctattccaccttgaacgaggtggcagctgctctggcagagagtggtttccccgtatttgcctggaaaggggaatctgaagacgatttttggtggtgtatcgacaggtgtgtcaacgtggagggctggcaacccaacatgatactggacgacggaggcgatttaactcattggatctacaaaaagtacccaaacatgttcaagaagatcaagggcatcgtcgaggagagcgttacgggggtgcacagactgtatcagttgagcaaggcgggtaagctgtgcgtgcctgctatgaatgtcaatgactcagtgacaaaacagaagttcgacaacctctactgttgcagggaatccatactcgacggactgaaaagaacgactgacatgatgtttggcgggaagcaggtcgttgtgtgcggctacggagaggttggtaagggatgctgtgccgccttgaaggccatgggctctattgtctatgttaccgaaatcgacccgatttgcgcactccaggcatgtatggacggattccgcctggtgaaactgaacgaggtcatccggcaagtggatatcgtcatcacttgcacgggcaataaaaatgtggtgacaagggaacatctggaccggatgaaaaacagttgcatcgtgtgcaacatgggacacagcaacacggaaattgatgttgctagcctcaggactcctgagttaacttgggagagggttaggagtcaggtggatcatgtaatctggcctgatggcaaaaggatcgtcctcctggccgagggtcgactgttgaacctaagttgctccactgtacctacatttgtgctcagcatcacggctacaacccaggccctggctttaatcgagttatacaacgcccccgaggggaggtacaaacaggatgtttatttactacccaagaagatggatgaatatgtcgcttcgttgcatttgccaactttcgacgcgcacttaacagagctgacagatgaacaagccaagtatctgggccttaacaaaaatggaccctttaagcccaactattataggtattag

SEQ ID NO: 48495 - DNA, 1833 bp, Artificial Sequence
  derived and/or modified sequence
atgagtgtccaagtggtgtccgctgccgctgcagccaaagtgccggaagtggagctcaaagacttatctcctagtgaggccgagtcacagctgggcttaagtactgccgcagtgggtgccatggctccaccggcaggcggaggagaccccgaggcccctgctccggctgctgaacgccctcccgtaccaggacctgggtcgggcccagctgctgcactgagcccagccgctggtaaggttccccaggccagcgccatgaaaagatcagatcctcatcaccagcaccagcggcaccgggacggtggggaagcactggtgtccccggacggaactgtaaccgaggcaccaaggactgtgaagaagattcagttcgcagatcagaagcaggaattcaataaaagaccgacgaaaatcgggaggcggtctctgagtagaagcatatcccagtcatccaccgattcctattctagtgcagcgtcatatactgacagctctgacgatgagacaagccctcgagacaaacagcaaaagaacagtaaagggtcctctgatttttgcgttaaaaatataaaacaggctgagtttgggcgacgagagattgaaatagccgagcaagagatgcccgcactgatggcactaaggaagagggcccagggcgagaaaccactggcaggggctaagatagtaggttgtactcacatcactgcacagactgctgtgttgatggaaactctgggcgcactgggggctcagtgtcggtgggctgcgtgtaatatctacagcacgttgaacgaagttgctgctgctttagccgagtccggctttcctgtgttcgcatggaagggcgagagtgaagacgatttttggtggtgcatcgatcggtgcgtgaatgttgagggctggcaacccaacatgatcctcgatgatgggggagacttaacccattggatttataagaagtaccctaacatgttcaaaaagatcaaggggatcgttgaagagagtgtgactggcgttcaccgcctttaccagctgtctaaggccggaaaactatgtgtccccgctatgaatgttaatgactcagtcacgaaacaaaagtttgataacctctactgctgtagagaaagcattctggatggcttaaaaagaacaacagacatgatgtttgggggtaaacaggtggtcgtctgtgggtacggggaagttggtaagggttgctgcgctgctctaaaggccatgggcagtatagtttatgttaccgagatcgatcctatatgtgcccttcaagcatgcatggacggcttccgtctagtgaagctgaacgaggtcattagacaagtggatatcgtcataacctgtacagggaacaaaaacgtcgtcacccgggagcacttggatcgtatgaaaaattcttgcattgtatgcaatatgggccattcaaacactgaaatcgacgtcgcctcacttcggacacctgaactgacctgggagagagtccgctcacaggttgaccatgtaatctggccagatggaaagaggattgtgctcttagcagagggcaggcttctgaacctgtcttgtagtaccgtccctaccttcgtactgtcaattactgctaccacccaggctctggctctaattgaactgtacaatgcacccgagggccgatacaagcaggatgtttacctgttgcctaagaagatggatgagtacgtcgcaagccttcatctgccaacttttgatgctcatctcactgagctgaccgacgagcaggccaaatatctaggcctgaacaaaaacggccctttcaagcctaattactatcggtattag

SEQ ID NO: 48496 - protein, 508 aa, Artificial Sequence
  derived and/or modified sequence
MLGSKKKYIVNGNSGIKAQIQFADQKQEFNKRPTKIGRRSLSRSISQSSTDSYSSAASYTDSSDDETSPRDKQQKNSKGSSDFCVKNIKQAEFGRREIEIAEQEMPALMALRKRAQGEKPLAGAKIVGCTHITAQTAVLMETLGALGAQCRWAACNIYSTLNEVAAALAESGFPVFAWKGESEDDFWWCIDRCVNVEGWQPNMILDDGGDLTHWIYKKYPNMFKKIKGIVEESVTGVHRLYQLSKAGKLCVPAMNVNDSVTKQKFDNLYCCRESILDGLKRTTDMMFGGKQVVVCGYGEVGKGCCAALKAMGSIVYVTEIDPICALQACMDGFRLVKLNEVIRQVDIVITCTGNKNVVTREHLDRMKNSCIVCNMGHSNTEIDVASLRTPELTWERVRSQVDHVIWPDGKRIVLLAEGRLLNLSCSTVPTFVLSITATTQALALIELYNAPEGRYKQDVYLLPKKMDEYVASLHLPTFDAHLTELTDEQAKYLGLNKNGPFKPNYYRY

SEQ ID NO: 48497 - DNA, 1527 bp, Artificial Sequence
  derived and/or modified sequence
atgctgggcagcaagaagaagtacatcgtgaacggcaacagcggcatcaaggcccagatccagttcgccgaccagaagcaggagttcaacaagagacccaccaagatcggcagaagaagcctgagcagaagcatcagccagagcagcaccgacagctacagcagcgccgccagctacaccgacagcagcgacgacgagaccagccccagagacaagcagcagaagaacagcaagggcagcagcgacttctgcgtgaagaacatcaagcaggccgagttcggcagaagagagatcgagatcgccgagcaggagatgcccgccctgatggccctgagaaagagagcccagggcgagaagcccctggccggcgccaagatcgtgggctgcacccacatcaccgcccagaccgccgtgctgatggagaccctgggcgccctgggcgcccagtgcagatgggccgcctgcaacatctacagcaccctgaacgaggtggccgccgccctggccgagagcggcttccccgtgttcgcctggaagggcgagagcgaggacgacttctggtggtgcatcgacagatgcgtgaacgtggagggctggcagcccaacatgatcctggacgacggcggcgacctgacccactggatctacaagaagtaccccaacatgttcaagaagatcaagggcatcgtggaggagagcgtgaccggcgtgcacagactgtaccagctgagcaaggccggcaagctgtgcgtgcccgccatgaacgtgaacgacagcgtgaccaagcagaagttcgacaacctgtactgctgcagagagagcatcctggacggcctgaagagaaccaccgacatgatgttcggcggcaagcaggtggtggtgtgcggctacggcgaggtgggcaagggctgctgcgccgccctgaaggccatgggcagcatcgtgtacgtgaccgagatcgaccccatctgcgccctgcaggcctgcatggacggcttcagactggtgaagctgaacgaggtgatcagacaggtggacatcgtgatcacctgcaccggcaacaagaacgtggtgaccagagagcacctggacagaatgaagaacagctgcatcgtgtgcaacatgggccacagcaacaccgagatcgacgtggccagcctgagaacccccgagctgacctgggagagagtgagaagccaggtggaccacgtgatctggcccgacggcaagagaatcgtgctgctggccgagggcagactgctgaacctgagctgcagcaccgtgcccaccttcgtgctgagcatcaccgccaccacccaggccctggccctgatcgagctgtacaacgcccccgagggcagatacaagcaggacgtgtacctgctgcccaagaagatggacgagtacgtggccagcctgcacctgcccaccttcgacgcccacctgaccgagctgaccgacgagcaggccaagtacctgggcctgaacaagaacggccccttcaagcccaactactacagatactag

SEQ ID NO: 48498 - DNA, 1884 bp, Artificial Sequence
  derived and/or modified sequence
aatggctgttgagccactaacagaaatgccttattaaattggggctgtactgctgaaggggttgttggagctgcttcagggattccaaggaagagtagtcccccactccccagcccaaaaagctggctggaaccagagccaacagaattgctgatgaggaaagtttaaaggcctgatcacaagggtccctggaccacagaggtggcagtggggctggtaatgtcactatgctgggcagcaagaagaaatacattgttaatggcaactctgggattaaggcccagatccagtttgctgaccagaagcaagaattcaacaaacgtcccaccaaaattggacgtcgctctttgtctcgttccatttctcagtcatctactgacagctacagctcagcggcttcatatacagatagctctgatgatgagacatcgcccagggacaagcagcaaaagaactctaagggaagcagtgacttctgtgttaagaacatcaaacaggcagagtttggacgaagagaaattgaaattgctgaacaagaaatgcctgcattgatggctttgaggaagagagctcaaggagaaaagcctttggctggagccaaaatcgtgggttgcacacacatcactgctcagactgctgtgcttatggaaactctgggtgctctgggggcccagtgccgatgggctgcctgcaacatctattccactctcaatgaagtggctgctgctctagcagaaagtggatttcctgtttttgcctggaagggagagtcagaagatgacttttggtggtgtatcgatagatgtgtgaatgtggagggctggcagccaaacatgatcttggatgatggaggggatcttacccactggatttataaaaagtatcccaacatgtttaagaaaatcaagggcatagtagaggagagtgttactggagttcacaggctgtaccaactgtccaaagctgggaagctgtgtgttccagccatgaatgtcaatgactcagtcaccaaacagaaatttgacaacctctactgttgccgtgaatcaattcttgatggacttaaaaggacaacagacatgatgtttggtggaaagcaagtggtagtctgtggctatggagaggtggggaaagggtgctgtgctgccctgaaagccatgggctccattgtgtatgtaactgaaattgaccccatctgtgccctgcaagcctgtatggatggatttcgactggtgaaattaaatgaggtcatccgacaagtggacattgttattacctgtacaggtaacaagaatgtggtaaccagagagcacttggaccgtatgaagaatagctgcatcgtttgtaacatgggacattccaacacagagattgacgtggcgagtctgcggacaccagaactgacctgggagcgagtgagatctcaagttgaccatgtgatatggcctgatggcaagaggatagtactgctggcagagggccgcctgctgaaccttagctgctccacagtgcctacatttgtgctctcaatcactgctactactcaggctcttgccttgatagagctttacaatgctcctgagggtcgctataagcaggatgtctacctgttgcccaagaagatggatgagtatgtggccagcctacacctgcctacctttgatgcccacttgacagagctgacagatgaacaggccaagtatctgggactcaacaagaatgggcccttcaagcctaattactacaggtattaagttcctgtaactcaaaccagaatttttaaggaatagaactccaagccttttctccactactatacaagaaagaattcagcaagctgcttctccaatcaaagctgcctgccgtgctcaccctgtgtgttag

SEQ ID NO: 48499 - DNA, 1527 bp, Artificial Sequence
  derived and/or modified sequence
atgttgggatccaagaagaagtatattgtcaatggaaacagcggcatcaaggcccagattcagttcgctgaccaaaaacaggagtttaacaagcgacctactaagattggtcggcgaagcctgagcagaagtatcagccaatcctccaccgatagctacagctccgctgcttcctacaccgattcttccgatgatgagacaagccctagagataaacaacaaaagaactccaaaggcagctccgacttttgtgtgaagaacattaagcaagccgaattcgggcggagggagattgagatcgcagaacaggagatgcccgcactgatggcactgcgtaaacgagcccagggcgagaagcccctggccggcgcgaaaattgtcggatgcacacacatcactgcccagaccgccgtgctaatggaaacgctgggcgcactgggagctcaatgcagatgggccgcctgcaacatttactcgactcttaacgaagtcgccgccgccttagccgaatcgggtttccctgtattcgcttggaaaggcgaatcagaagatgatttctggtggtgtatcgatagatgcgtgaacgtggaggggtggcagcccaatatgattttagacgatggcggggatcttactcattggatttacaagaaataccccaacatgtttaaaaaaattaaagggatcgtcgaagagtctgtgacaggggttcacaggttataccagctcagcaaagcaggaaaactgtgtgtgccagctatgaatgttaacgattctgtcacgaagcaaaaatttgataatttgtactgttgtagggaaagcatcctggacggcctgaagaggacgacagacatgatgtttgggggcaagcaggtggtggtctgcggctatggtgaagtgggcaagggttgctgcgctgcgctgaaggctatgggatcaatcgtgtatgtgacggaaattgacccaatctgcgctctacaggcatgcatggacgggttccggctggtgaagctcaatgaggttatcaggcaggtcgacatcgtaataacatgcactggcaacaagaacgtggtgacacgggagcacttggataggatgaaaaattcttgcattgtatgtaacatgggacacagcaataccgagattgatgtggcgtccctccggaccccagagctcacctgggaaagagtccgctcgcaggttgaccatgtaatttggccggacggtaaacgcatcgtcttgttagccgagggacggctgttaaatctcagctgtagtactgtccctactttcgttctgagcattaccgctacaacccaagctctcgcgttgattgagttgtataatgcaccggaaggtagatacaagcaggacgtatacctgctgccaaaaaaaatggacgaatatgtggcctcactccaccttccaaccttcgacgcacaccttacagagcttactgatgaacaggcaaaatacctcggcctgaacaagaacggacctttcaagcccaactactaccggtattag

SEQ ID NO: 48500 - DNA, 1527 bp, Artificial Sequence
  derived and/or modified sequence
atgctgggcagcaagaagaagtacatcgtgaatggaaacagcggcatcaaggcccagatccagtttgctgaccagaagcaggagttcaacaagaggcccaccaagattggccgccgcagcctgagccgcagcatcagccagagcagcacagacagctacagcagcgctgccagctacacagacagcagtgatgatgagaccagcccccgggacaagcagcagaagaacagcaagggcagcagtgacttctgtgtgaagaacatcaagcaggccgagtttggaagaagagaaattgaaattgctgagcaggagatgcctgccctgatggccctgaggaagagggcccagggcgagaagcccctggccggggccaagatcgtgggctgcacccacatcacagcccagacagctgtgctgatggagaccctgggcgccctgggcgcccagtgccgctgggccgcctgcaacatctacagcaccctgaatgaggtggccgccgccctggccgagagcggcttccctgtgtttgcctggaagggggagagtgaagatgacttctggtggtgcatcgacagatgtgtgaatgtggagggctggcagcccaacatgatcctggatgatggaggagacctgacccactggatctacaagaagtaccccaacatgttcaagaagatcaagggcatcgtggaggagagcgtgactggagtgcaccggctgtaccagctgagcaaggccggcaagctgtgtgtgcctgccatgaatgtgaatgattctgtgaccaagcagaagtttgacaacctgtactgctgccgggagagcatcctggatggcctgaagaggaccacagacatgatgtttggaggcaagcaggtggtggtgtgtggctatggagaggtgggcaagggctgctgtgccgccctgaaggccatgggcagcatcgtgtatgtgacagaaattgaccccatctgtgccctgcaggcctgcatggatggcttccggctggtgaagctgaatgaagtcatccggcaggtggacatcgtcatcacctgcaccggcaacaagaatgtggtgacccgggagcacctggacaggatgaagaacagctgcatcgtgtgcaacatgggccacagcaacacagaaattgatgtggccagcctgcggaccccagagctgacctgggagcgggtgcgcagccaggtggaccacgtgatctggccagatggcaagagaattgtgctgctggccgagggccgcctgctgaacctgagctgcagcacagtgcccacctttgtgctgagcatcacagccaccacccaggccctggccctgattgagctgtacaatgcccctgagggccgctacaagcaggatgtgtacctgctgcccaagaagatggatgaatatgtggccagcctgcacctgcccacctttgatgcccacctgacagagctgacagatgagcaggccaagtacctgggcctgaacaagaatggccccttcaagcccaactactaccgctactag

SEQ ID NO: 48501 - DNA, 1527 bp, Artificial Sequence
  derived and/or modified sequence
atgctgggcagcaagaagaagtacatcgtgaacggcaacagcggcatcaaggcccagattcagtttgccgaccagaagcaggaattcaataagagacccacaaaaattgggagaagaagcctctctcggtctatctctcagtcctcaaccgacagttacagcagtgcagcttcttatacagactcttccgatgatgaaacaagccctcgggacaaacagcagaagaatagtaaaggtagttctgatttttgcgttaagaatattaaacaggccgaatttgggagaagggaaattgaaatagccgaacaggagatgcctgctctgatggccctgcgaaaacgggcccagggggaaaaacctctagccggggccaaaatagtaggctgtacacacatcacagcacaaaccgccgtgctgatggaaactctcggagctcttggagcacagtgccggtgggctgcctgtaatatttattccaccctgaacgaagttgcagcggccttggcagaaagcggcttccccgtgtttgcatggaaaggggagagtgaggatgatttttggtggtgtatcgatcggtgtgtcaacgtggagggttggcagccgaatatgatcctagatgatggcggcgacctcacacactggatatacaaaaagtatccaaatatgttcaagaaaattaaagggattgtggaggaatccgtgactggtgttcacagactatatcagctgagcaaggctgggaagctgtgtgtgcccgcaatgaatgttaacgactccgtcacgaagcagaaattcgataatttatactgttgtcgggagtcaatactggacggcttgaagcggaccacggatatgatgtttggcggcaagcaagttgtagtctgcggctacggagaagtgggcaagggctgctgcgcggccctgaaagcgatgggcagcatcgtttacgtgactgagattgatcccatctgcgccttgcaggcttgtatggatgggttcagactcgttaaactgaatgaagtgattcgtcaggtcgacattgtgatcacttgtaccggaaacaagaacgtggttacaagggagcacctagataggatgaaaaatagttgcatagtgtgcaacatgggccactccaacaccgagatcgatgtggccagccttcgtacaccagagctcacatgggagagggttcggtcccaggtggatcacgttatctggcctgacgggaagcggattgtgctgctggctgagggtagactgttaaacctgagttgttctaccgtaccgacattcgtcctgtccatcaccgccacgacacaggctctcgctcttatcgaactgtacaacgccccagaggggagatacaagcaggacgtttatctactccccaaaaaaatggacgagtacgtggcttcactgcacctgccaaccttcgatgcccacctgaccgaattgacagacgagcaggctaaatacctgggccttaacaaaaatgggcctttcaagcctaactactataggtattag

SEQ ID NO: 48502 - DNA, 1527 bp, Artificial Sequence
  derived and/or modified sequence
atgctcgggtccaagaaaaagtacattgtgaatgggaatagcggcattaaagcccaaattcaattcgcagatcaaaagcaggagtttaataaacgccctaccaaaattggccgacgttcattaagccggtccatctctcaatcgagtactgacagctactccagtgcagcaagctacacagattcctcggacgacgaaacttctcctcgggacaagcaacagaaaaactccaaaggcagctccgacttttgtgtcaaaaatattaaacaggctgagtttggacgtagagagatcgagatcgccgaacaggagatgccagcgctgatggccctgcgtaagagagcccagggcgaaaaacctcttgccggagctaaaatagttggctgtacccacattactgcgcagaccgctgttttgatggagaccctaggcgcactaggtgcacagtgccgctgggctgcttgtaatatctactccacacttaacgaagtggccgcagcgctggccgagagcggattccctgttttcgcttggaagggagaaagcgaggacgacttttggtggtgcattgacaggtgtgtcaatgttgaggggtggcaacccaacatgatactggacgacggaggggatttgacccactggatttacaagaagtatcccaatatgttcaaaaagatcaagggaatcgttgaggaaagcgtgacaggtgtgcacaggctgtatcagctttctaaggccggtaaactctgtgtaccagctatgaatgtgaacgatagtgtgacaaagcaaaagtttgacaatctctattgttgtcgcgaatctatcctagatggactaaagcgcacaaccgatatgatgtttgggggaaagcaagtggtagtgtgcggttatggcgaagtgggtaaagggtgctgtgcagcactgaaagcgatgggcagcatcgtttatgtgactgagatcgacccaatatgcgcactgcaggcttgtatggatgggttcaggttggtgaaactcaacgaggtgattcgccaggtcgatatagtaattacatgtaccggtaacaagaacgtagtcacccgcgaacatctcgacaggatgaaaaacagctgtatcgtgtgcaatatggggcactctaataccgaaatcgacgttgcttccctcagaacaccggagttgacatgggagagagtgcgaagccaggtggatcatgttatttggccggatggcaagagaatcgtgctactggccgaaggcaggctccttaacctgtcgtgcagcacagtgcctactttcgtgctatccattactgcaaccacacaggcccttgccttgatcgaactatataacgccccagaaggcaggtataagcaggatgtgtacctgctgcccaagaagatggacgagtacgtcgcatcgctgcacctacccacttttgatgctcatctgactgagcttactgacgagcaggcaaagtacctgggcttgaataagaatggtccttttaagcccaactactaccgctattag

SEQ ID NO: 48503 - protein, 508 aa, Artificial Sequence
  derived and/or modified sequence
MEKWDGNEGTSAFHMPEWMIQFADQKQEFNKRPTKIGRRSLSRSISQSSTDSYSSAASYTDSSDDETSPRDKQQKNSKGSSDFCVKNIKQAEFGRREIEIAEQEMPALMALRKRAQGEKPLAGAKIVGCTHITAQTAVLMETLGALGAQCRWAACNIYSTLNEVAAALAESGFPVFAWKGESEDDFWWCIDRCVNVEGWQPNMILDDGGDLTHWIYKKYPNMFKKIKGIVEESVTGVHRLYQLSKAGKLCVPAMNVNDSVTKQKFDNLYCCRESILDGLKRTTDMMFGGKQVVVCGYGEVGKGCCAALKAMGSIVYVTEIDPICALQACMDGFRLVKLNEVIRQVDIVITCTGNKNVVTREHLDRMKNSCIVCNMGHSNTEIDVASLRTPELTWERVRSQVDHVIWPDGKRIVLLAEGRLLNLSCSTVPTFVLSITATTQALALIELYNAPEGRYKQDVYLLPKKMDEYVASLHLPTFDAHLTELTDEQAKYLGLNKNGPFKPNYYRY

SEQ ID NO: 48504 - DNA, 1527 bp, Artificial Sequence
  derived and/or modified sequence
atggagaagtgggacggcaacgagggcaccagcgccttccacatgcccgagtggatgatccagttcgccgaccagaagcaggagttcaacaagagacccaccaagatcggcagaagaagcctgagcagaagcatcagccagagcagcaccgacagctacagcagcgccgccagctacaccgacagcagcgacgacgagaccagccccagagacaagcagcagaagaacagcaagggcagcagcgacttctgcgtgaagaacatcaagcaggccgagttcggcagaagagagatcgagatcgccgagcaggagatgcccgccctgatggccctgagaaagagagcccagggcgagaagcccctggccggcgccaagatcgtgggctgcacccacatcaccgcccagaccgccgtgctgatggagaccctgggcgccctgggcgcccagtgcagatgggccgcctgcaacatctacagcaccctgaacgaggtggccgccgccctggccgagagcggcttccccgtgttcgcctggaagggcgagagcgaggacgacttctggtggtgcatcgacagatgcgtgaacgtggagggctggcagcccaacatgatcctggacgacggcggcgacctgacccactggatctacaagaagtaccccaacatgttcaagaagatcaagggcatcgtggaggagagcgtgaccggcgtgcacagactgtaccagctgagcaaggccggcaagctgtgcgtgcccgccatgaacgtgaacgacagcgtgaccaagcagaagttcgacaacctgtactgctgcagagagagcatcctggacggcctgaagagaaccaccgacatgatgttcggcggcaagcaggtggtggtgtgcggctacggcgaggtgggcaagggctgctgcgccgccctgaaggccatgggcagcatcgtgtacgtgaccgagatcgaccccatctgcgccctgcaggcctgcatggacggcttcagactggtgaagctgaacgaggtgatcagacaggtggacatcgtgatcacctgcaccggcaacaagaacgtggtgaccagagagcacctggacagaatgaagaacagctgcatcgtgtgcaacatgggccacagcaacaccgagatcgacgtggccagcctgagaacccccgagctgacctgggagagagtgagaagccaggtggaccacgtgatctggcccgacggcaagagaatcgtgctgctggccgagggcagactgctgaacctgagctgcagcaccgtgcccaccttcgtgctgagcatcaccgccaccacccaggccctggccctgatcgagctgtacaacgcccccgagggcagatacaagcaggacgtgtacctgctgcccaagaagatggacgagtacgtggccagcctgcacctgcccaccttcgacgcccacctgaccgagctgaccgacgagcaggccaagtacctgggcctgaacaagaacggccccttcaagcccaactactacagatactag

SEQ ID NO: 48505 - DNA, 2047 bp, Artificial Sequence
  derived and/or modified sequence
attgctgcagaaagtccccactggggaggtgcgggtagagtgtttgggtagcattaaaacagtgagtgccctgtgagaagcacagtgcctgggtgcagcactttgcatcagctctgattttgaaatcagacacagaaggctttgaagccggccagtaaggggttgtcaggcagttgactaatgctcttgatttgaatcggaggctgctgtgaaaagggatgcagcttctgctagccactgtgaacttctgaatctcactagggttgggtctgctttggggcactcagataaccccagtatttccaaaccagctttcccttttgcttcaggacatatcttacccaagcctgcactatggagaagtgggacggtaatgagggcacctcagcttttcacatgcctgagtggatgatccagtttgctgaccagaagcaagaattcaacaaacgtcccaccaaaattggacgtcgctctttgtctcgttccatttctcagtcatctactgacagctacagctcagcggcttcatatacagatagctctgatgatgagacatcgcccagggacaagcagcaaaagaactctaagggaagcagtgacttctgtgttaagaacatcaaacaggcagagtttggacgaagagaaattgaaattgctgaacaagaaatgcctgcattgatggctttgaggaagagagctcaaggagaaaagcctttggctggagccaaaatcgtgggttgcacacacatcactgctcagactgctgtgcttatggaaactctgggtgctctgggggcccagtgccgatgggctgcctgcaacatctattccactctcaatgaagtggctgctgctctagcagaaagtggatttcctgtttttgcctggaagggagagtcagaagatgacttttggtggtgtatcgatagatgtgtgaatgtggagggctggcagccaaacatgatcttggatgatggaggggatcttacccactggatttataaaaagtatcccaacatgtttaagaaaatcaagggcatagtagaggagagtgttactggagttcacaggctgtaccaactgtccaaagctgggaagctgtgtgttccagccatgaatgtcaatgactcagtcaccaaacagaaatttgacaacctctactgttgccgtgaatcaattcttgatggacttaaaaggacaacagacatgatgtttggtggaaagcaagtggtagtctgtggctatggagaggtggggaaagggtgctgtgctgccctgaaagccatgggctccattgtgtatgtaactgaaattgaccccatctgtgccctgcaagcctgtatggatggatttcgactggtgaaattaaatgaggtcatccgacaagtggacattgttattacctgtacaggtaacaagaatgtggtaaccagagagcacttggaccgtatgaagaatagctgcatcgtttgtaacatgggacattccaacacagagattgacgtggcgagtctgcggacaccagaactgacctgggagcgagtgagatctcaagttgaccatgtgatatggcctgatggcaagaggatagtactgctggcagagggccgcctgctgaaccttagctgctccacagtgcctacatttgtgctctcaatcactgctactactcaggctcttgccttgatagagctttacaatgctcctgagggtcgctataagcaggatgtctacctgttgcccaagaagatggatgagtatgtggccagcctacacctgcctacctttgatgcccacttgacagagctgacagatgaacaggccaagtatctgggactcaacaagaatgggcccttcaagcctaattactacaggtattaagttcctgtaactcaaaccagaatttttaaggaatagaactccaagccttttctccactactatacaagaaagaattcagcaagctgcttctccaatcaaagctgcctgccgtgctcaccctgtgtgttaggttatttatttattaaaatcaagaatcctgtgcctg

SEQ ID NO: 48506 - DNA, 1527 bp, Artificial Sequence
  derived and/or modified sequence
atggagaagtgggacggcaacgagggcacctccgcttttcacatgccggagtggatgattcagttcgccgatcagaagcaagagtttaataagaggcccaccaaaatcggtcggcggagtttgtctagaagcataagccagagctccaccgactcatattctagcgctgcgagttataccgatagcagcgatgacgaaacgtcgcctcgagataagcagcagaaaaatagcaagggcagttctgacttctgcgttaaaaatattaagcaggccgaatttgggcggcgcgagatagagattgcggaacaggagatgccagccctgatggcactcaggaagcgtgctcagggcgagaagcctctggcaggggctaagatagtcgggtgcacccatatcaccgctcagaccgcagtactgatggagaccctcggagcactgggagcccagtgcaggtgggccgcctgtaatatatactctactctcaatgaggtggctgcagctctggccgaatccggttttccagtgttcgcatggaaaggcgaaagcgaagatgatttctggtggtgcatagataggtgcgtcaacgtggagggttggcagcccaatatgatcctggatgacggaggcgatctgacacattggatctacaagaaataccctaatatgttcaaaaaaatcaaaggcatcgtggaagagagtgtaaccggagttcatagactataccagctgtccaaggccgggaaattatgcgtccctgcaatgaatgtgaatgatagcgtcaccaaacagaagttcgataatctctactgttgtcgagaatcaattctcgatgggctcaagcgtacaacagatatgatgtttggaggcaaacaggtcgttgtgtgcggttacggtgaagtgggaaagggatgctgtgccgcactgaaggctatgggttccattgtctacgttacagagattgaccccatctgtgctcttcaagcctgtatggacgggtttcggctcgtgaaattgaacgaggtcattcggcaggtcgacatcgtgatcacctgcacaggaaacaagaacgtcgtgacccgggagcatcttgaccggatgaagaatagctgtatcgtttgcaacatggggcattctaatactgaaatcgacgtcgcctctctgcgcactcccgaactgacttgggaacgggtccggtcccaggttgatcacgttatatggcccgacggcaagcggattgtgctactcgcagagggtcgactcctgaacttatcgtgttccacagtgccaaccttcgtccttagcatcacagccacaactcaggctttggcactgatcgagctttacaacgcccctgaaggacggtacaagcaggacgtgtacctgctgcccaagaagatggacgagtacgttgccagcctgcatcttcctactttcgacgcccacctcaccgaattaaccgacgaacaggctaagtacctcggactcaataaaaacggccccttcaaacccaactactatagatactag

SEQ ID NO: 48507 - DNA, 1527 bp, Artificial Sequence
  derived and/or modified sequence
atggagaagtgggatggaaatgaaggcaccagcgccttccacatgcctgagtggatgatccagtttgctgaccagaagcaggagttcaacaagaggcccaccaagattggccgccgcagcctgagccgcagcatcagccagagcagcacagacagctacagcagcgctgccagctacacagacagcagtgatgatgagaccagcccccgggacaagcagcagaagaacagcaagggcagcagtgacttctgtgtgaagaacatcaagcaggccgagtttggaagaagagaaattgaaattgctgagcaggagatgcctgccctgatggccctgaggaagagggcccagggcgagaagcccctggccggggccaagatcgtgggctgcacccacatcacagcccagacagctgtgctgatggagaccctgggcgccctgggcgcccagtgccgctgggccgcctgcaacatctacagcaccctgaatgaggtggccgccgccctggccgagagcggcttccctgtgtttgcctggaagggggagagtgaagatgacttctggtggtgcatcgacagatgtgtgaatgtggagggctggcagcccaacatgatcctggatgatggaggagacctgacccactggatctacaagaagtaccccaacatgttcaagaagatcaagggcatcgtggaggagagcgtgactggagtgcaccggctgtaccagctgagcaaggccggcaagctgtgtgtgcctgccatgaatgtgaatgattctgtgaccaagcagaagtttgacaacctgtactgctgccgggagagcatcctggatggcctgaagaggaccacagacatgatgtttggaggcaagcaggtggtggtgtgtggctatggagaggtgggcaagggctgctgtgccgccctgaaggccatgggcagcatcgtgtatgtgacagaaattgaccccatctgtgccctgcaggcctgcatggatggcttccggctggtgaagctgaatgaagtcatccggcaggtggacatcgtcatcacctgcaccggcaacaagaatgtggtgacccgggagcacctggacaggatgaagaacagctgcatcgtgtgcaacatgggccacagcaacacagaaattgatgtggccagcctgcggaccccagagctgacctgggagcgggtgcgcagccaggtggaccacgtgatctggccagatggcaagagaattgtgctgctggccgagggccgcctgctgaacctgagctgcagcacagtgcccacctttgtgctgagcatcacagccaccacccaggccctggccctgattgagctgtacaatgcccctgagggccgctacaagcaggatgtgtacctgctgcccaagaagatggatgaatatgtggccagcctgcacctgcccacctttgatgcccacctgacagagctgacagatgagcaggccaagtacctgggcctgaacaagaatggccccttcaagcccaactactaccgctactag

SEQ ID NO: 48508 - DNA, 1527 bp, Artificial Sequence
  derived and/or modified sequence
atggagaagtgggacggcaacgagggcaccagcgccttccacatgccagagtggatgatacagtttgctgatcaaaagcaggagtttaataaaaggcccaccaaaatcggccgcaggagcctgtctagaagcatatctcagagcagcacggacagttactcgtcagctgctagctatacagactctagcgacgacgagactagccccagggacaagcagcagaaaaatagtaagggatcaagcgacttctgtgtcaagaatattaaacaagcagagtttgggcgaagggaaattgagatagcagagcaggaaatgcccgctctgatggccctgcgaaaacgtgcacagggcgagaagcctctggccggagctaagatagtcggctgcacccatattactgctcaaacagcagtccttatggaaacccttggcgcgctgggtgcacagtgcaggtgggcagcctgtaacatttactcgaccttgaacgaagtcgctgctgcgctcgcagagagtggatttccagtgttcgcatggaaaggcgagtctgaggatgacttctggtggtgtatagatcgttgcgtcaatgtggagggctggcaaccaaatatgattcttgatgatggcggggacctgacccattggatctataaaaagtacccaaacatgttcaagaagattaaaggtattgtggaggagagcgttaccggagtgcaccggctgtaccagctttcaaaagccgggaaactatgcgtccctgccatgaatgtcaacgattccgtgacaaagcagaagttcgacaacctctactgctgtcgggagtccattctagacgggctcaagaggacaacagatatgatgtttggaggtaagcaagtagtggtgtgtgggtatggcgaagtggggaagggttgctgtgccgccctaaaagctatgggctctattgtgtacgtcacagagattgaccccatatgtgccctgcaggcgtgtatggacggatttcggctggtgaagctgaatgaagtgattaggcaggtcgacattgtcatcacatgtaccggcaataaaaacgttgtcactcgcgaacatttagaccgtatgaagaattcttgcatagtgtgcaacatgggccactccaacacagagatcgacgtggcttcactgcggacacccgagcttacttgggaaagggttcggtctcaggttgaccacgttatttggccagatggtaagcggatagtgctcctggccgaaggcagattgctgaacctctcgtgttctacagtcccaacgtttgtactctcaattactgccactacccaggcactggctctaatcgagctctacaacgcccccgaagggcgctacaagcaggatgtgtacttactgcccaagaagatggatgagtatgtggcatctcttcacctgcccaccttcgacgcacacctgacagaactgacagatgaacaggcgaagtatctggggcttaataaaaacggtccctttaaaccaaattattataggtactag

SEQ ID NO: 48509 - DNA, 1527 bp, Artificial Sequence
  derived and/or modified sequence
atggagaaatgggacgggaatgagggtacctctgcctttcacatgcccgaatggatgatccaattcgcagaccagaaacaggagtttaacaagcgaccaactaagataggtcgaaggtctctctcccgctctatctcccagtcctccacggattcttattcaagcgctgcgagctataccgattcaagtgatgatgaaacgtctccgagggacaagcaacaaaagaacagtaaagggtctagcgacttttgcgtgaagaacattaagcaggcagaattcgggaggcgcgaaattgagattgccgagcaggagatgcccgctctcatggctctacgcaagagagctcaaggggagaagccactggccggtgccaagattgtgggttgcacccacataacagcccaaacagcggtactcatggagactcttggggctttaggcgcacagtgtaggtgggcagcatgtaacatctactcaacactgaacgaggtggcagccgcactcgctgaaagcggtttccctgtgttcgcatggaagggcgagagcgaagatgatttttggtggtgcatcgaccggtgtgtgaacgttgaaggatggcagccaaacatgattctggatgatggaggagatttgactcactggatttacaagaaatatcctaacatgttcaagaaaatcaaaggcatagttgaggaaagcgtgactggagtacacaggctctaccagctatcaaaggctggaaaactctgcgtacccgctatgaacgtcaacgacagcgtcacaaagcagaagttcgataatctgtactgttgccgcgagtcaattttggacggattgaaaaggaccactgatatgatgttcggtggcaagcaggtggtggtatgtgggtacggagaggttgggaagggctgttgcgccgcactgaaagccatgggttccatagtgtatgtcactgaaatcgatccaatctgtgcgttgcaagcttgcatggatgggttcaggctggtgaaactgaacgaggtgattagacaggtggatatcgtaataacatgcaccggcaataaaaacgtcgtgacaagggagcatctggatcgcatgaaaaatagctgcatcgtgtgtaacatggggcactctaataccgagatcgacgtcgcatcactacgcactcccgaactaacatgggaacgcgtgagaagccaggtggaccacgtaatttggccagacggcaagcgaattgtactcctcgccgagggcagactgctcaacctgtcatgcagcactgtcccgactttcgtgctgtcaatcactgcaaccactcaggctctggcccttatcgagctctacaatgccccagagggacgctataaacaagacgtctatcttctgcccaaaaagatggatgaatacgtagcctcactgcacctgccaacctttgatgcccacttaactgagctcaccgacgagcaagccaagtatctgggcctgaacaaaaatgggccttttaaaccgaattactacagatactag

SEQ ID NO: 48510 - DNA, 483 bp, Artificial Sequence
  derived and/or modified sequence
atggccgggggcgcagcagattgcagcttttgggaacggttgctggccaggcagtgccggatatatgagctccgaaacaaggaacggatttccgtagcggctgcttccaaacttctggcaaacatggtctatcagtataaaggtatgggactaagcatggggaccatgatttgcggctgggacaaacgcgggcctggcctgtattatgtggactcagagggaaacagaatttctggcgcaactttctcagtgggctccggatccgtttacgcctatggtgttatggatcgggggtactcttatgacctagaagtagagcaggcctatgatctcgcgagaagagccatctaccaggccacctacagggacgcatactcagggggagccgttaatctctaccacgtgcgcgaagatggatggataagggtgagctccgacaacgtggcagatctgcacgaaaagtactcaggttccacaccctag

SEQ ID NO: 48511 - DNA, 483 bp, Artificial Sequence
  derived and/or modified sequence
atggccggcggcgctgctgactgcagcttctgggagcggctgctggcccggcagtgccgcatctatgagctgaggaacaaggagcgcatctctgtggccgccgccagcaagctgctggccaacatggtgtaccagtacaagggcatgggcctgtccatgggcaccatgatctgtggctgggacaagaggggccctggcctgtactacgtggacagcgagggcaaccgcatcagcggggccaccttctctgtgggcagcggctctgtgtatgcctacggcgtgatggaccggggctacagctatgacctggaggtggagcaggcctatgacctggcccggcgggccatctaccaggccacctacagagatgcctacagcggcggcgctgtgaacctgtaccacgtgagagaagatggctggatccgggtgtccagtgacaacgtggccgacctgcacgagaagtacagcggcagcaccccctag

SEQ ID NO: 48512 - DNA, 483 bp, Artificial Sequence
  derived and/or modified sequence
atggccggcggcgccgccgactgcagcttctgggagcggctgctggctcgccagtgtagaatctatgaattacggaacaaagaacggatttcggtcgccgctgccagcaaactattggccaacatggtttaccagtataagggcatgggactctctatgggaactatgatttgcggatgggataaacgaggaccaggactctactatgtagacagcgagggaaaccgtatcagcggagccacattctccgtggggagcgggtccgtgtacgcatacggagttatggaccgcgggtactcatacgatttagaggtggagcaggcatacgatctcgcaaggcgagcgatctaccaggcgacttaccgcgatgcgtactctggtggcgccgtgaatctctatcacgtaagggaggacggctggatacgtgtttcctccgacaatgttgcagacctgcatgagaagtactcgggctccaccccatag

SEQ ID NO: 48513 - DNA, 483 bp, Artificial Sequence
  derived and/or modified sequence
atggctggcggagcagctgactgttccttttgggagcgcttactcgctcgtcagtgccggatttacgaattacggaataaggagcgaatttctgttgccgcagcctctaagctgctggccaatatggtctatcagtataagggaatgggattgtctatggggacaatgatatgtggctgggacaagcgcggtcctggtctgtattacgtcgattcagagggcaaccgcatctcaggggctacgttctcagttgggagtgggtctgtgtacgcctatggtgtgatggaccgtgggtatagttatgatctggaggtggaacaggcttacgacctagctaggagggcgatatatcaggccacatatagagacgcttactcagggggagccgtcaacttatatcatgtgagagaggatggatggatacgagtcagctcagataatgtcgccgacctacatgagaaatattcaggaagtaccccctag

SEQ ID NO: 48514 - DNA, 483 bp, Artificial Sequence
  derived and/or modified sequence
atggccggcggcgccgccgactgcagcttctgggagagactgctggccagacagtgcagaatctacgagctgagaaacaaggagagaatcagcgtggccgccgccagcaagctgctggccaacatggtgtaccagtacaagggcatgggcctgagcatgggcaccatgatctgcggctgggacaagagaggccccggcctgtactacgtggacagcgagggcaacagaatcagcggcgccaccttcagcgtgggcagcggcagcgtgtacgcctacggcgtgatggacagaggctacagctacgacctggaggtggagcaggcctacgacctggccagaagagccatctaccaggccacctacagagacgcctacagcggcggcgccgtgaacctgtaccacgtgagagaggacggctggatcagagtgagcagcgacaacgtggccgacctgcacgagaagtacagcggcagcaccccctag

SEQ ID NO: 48515 - protein, 1632 aa, Artificial Sequence
  derived and/or modified sequence
MPARTAPARVPTLAVPAISLPDDVRRRLKDLERDSLTEKECVKEKLNLLHEFLQTEIKNQLCDLETKLRKEELSEEGYLAKVKSLLNKDLSLENGAHAYNREVNGRLENGNQARSEARRVGMADANSPPKPLSKPRTPRRSKSDGEAKRSRDPPASASQVTGIRAEPSPSPRITRKSTRQTTITSHFAKGPAKRKPQEESERAKSDESIKEEDKDQDEKRRRVTSRERVARPLPAEEPERAKSGTRTEKEEERDEKEEKRLRSQTKEPTPKQKLKEEPDREARAGVQADEDEDGDEKDEKKHRSQPKDLAAKRRPEEKEPEKVNPQISDEKDEDEKEEKRRKTTPKEPTEKKMARAKTVMNSKTHPPKCIQCGQYLDDPDLKYGQHPPDAVDEPQMLTNEKLSIFDANESGFESYEALPQHKLTCFSVYCKHGHLCPIDTGLIEKNIELFFSGSAKPIYDDDPSLEGGVNGKNLGPINEWWITGFDGGEKALIGFSTSFAEYILMDPSPEYAPIFGLMQEKIYISKIVVEFLQSNSDSTYEDLINKIETTVPPSGLNLNRFTEDSLLRHAQFVVEQVESYDEAGDSDEQPIFLTPCMRDLIKLAGVTLGQRRAQARRQTIRHSTREKDRGPTKATTTKLVYQIFDTFFAEQIEKDDREDKENAFKRRRCGVCEVCQQPECGKCKACKDMVKFGGSGRSKQACQERRCPNMAMKEADDDEEVDDNIPEMPSPKKMHQGKKKKQNKNRISWVGEAVKTDGKKSYYKKVCIDAETLEVGDCVSVIPDDSSKPLYLARVTALWEDSSNGQMFHAHWFCAGTDTVLGATSDPLELFLVDECEDMQLSYIHSKVKVIYKAPSENWAMEGGMDPESLLEGDDGKTYFYQLWYDQDYARFESPPKTQPTEDNKFKFCVSCARLAEMRQKEIPRVLEQLEDLDSRVLYYSATKNGILYRVGDGVYLPPEAFTFNIKLSSPVKRPRKEPVDEDLYPEHYRKYSDYIKGSNLDAPEPYRIGRIKEIFCPKKSNGRPNETDIKIRVNKFYRPENTHKSTPASYHADINLLYWSDEEAVVDFKAVQGRCTVEYGEDLPECVQVYSMGGPNRFYFLEAYNAKSKSFEDPPNHARSPGNKGKGKGKGKGKPKSQACEPSEPEIEIKLPKLRTLDVFSGCGGLSEGFHQAGISDTLWAIEMWDPAAQAFRLNNPGSTVFTEDCNILLKLVMAGETTNSRGQRLPQKGDVEMLCGGPPCQGFSGMNRFNSRTYSKFKNSLVVSFLSYCDYYRPRFFLLENVRNFVSFKRSMVLKLTLRCLVRMGYQCTFGVLQAGQYGVAQTRRRAIILAAAPGEKLPLFPEPLHVFAPRACQLSVVVDDKKFVSNITRLSSGPFRTITVRDTMSDLPEVRNGASALEISYNGEPQSWFQRQLRGAQYQPILRDHICKDMSALVAARMRHIPLAPGSDWRDLPNIEVRLSDGTMARKLRYTHHDRKNGRSSSGALRGVCSCVEAGKACDPAARQFNTLIPWCLPHTGNRHNHWAGLYGRLEWDGFFSTTVTNPEPMGKQGRVLHPEQHRVVSVRECARSQGFPDTYRLFGNILDKHRQVGNAVPPPLAKAIGLEIKLCMLAKARESASAKIKEEEAAKD

SEQ ID NO: 48516 - protein, 1484 aa, Artificial Sequence
  derived and/or modified sequence
GSCHSPASASQVAGTTAEPSPSPRITRKSTRQTTITSHFAKGPAKRKPQEESERAKSDESIKEEDKDQDEKRRRVTSRERVARPLPAEEPERAKSGTRTEKEEERDEKEEKRLRSQTKEPTPKQKLKEEPDREARAGVQADEDEDGDEKDEKKHRSQPKDLAAKRRPEEKEPEKVNPQISDEKDEDEKEEKRRKTTPKEPTEKKMARAKTVMNSKTHPPKCIQCGQYLDDPDLKYGQHPPDAVDEPQMLTNEKLSIFDANESGFESYEALPQHKLTCFSVYCKHGHLCPIDTGLIEKNIELFFSGSAKPIYDDDPSLEGGVNGKNLGPINEWWITGFDGGEKALIGFSTSFAEYILMDPSPEYAPIFGLMQEKIYISKIVVEFLQSNSDSTYEDLINKIETTVPPSGLNLNRFTEDSLLRHAQFVVEQVESYDEAGDSDEQPIFLTPCMRDLIKLAGVTLGQRRAQARRQTIRHSTREKDRGPTKATTTKLVYQIFDTFFAEQIEKDDREDKENAFKRRRCGVCEVCQQPECGKCKACKDMVKFGGSGRSKQACQERRCPNMAMKEADDDEEVDDNIPEMPSPKKMHQGKKKKQNKNRISWVGEAVKTDGKKSYYKKVCIDAETLEVGDCVSVIPDDSSKPLYLARVTALWEDSSNGQMFHAHWFCAGTDTVLGATSDPLELFLVDECEDMQLSYIHSKVKVIYKAPSENWAMEGGMDPESLLEGDDGKTYFYQLWYDQDYARFESPPKTQPTEDNKFKFCVSCARLAEMRQKEIPRVLEQLEDLDSRVLYYSATKNGILYRVGDGVYLPPEAFTFNIKLSSPVKRPRKEPVDEDLYPEHYRKYSDYIKGSNLDAPEPYRIGRIKEIFCPKKSNGRPNETDIKIRVNKFYRPENTHKSTPASYHADINLLYWSDEEAVVDFKAVQGRCTVEYGEDLPECVQVYSMGGPNRFYFLEAYNAKSKSFEDPPNHARSPGNKGKGKGKGKGKPKSQACEPSEPEIEIKLPKLRTLDVFSGCGGLSEGFHQAGISDTLWAIEMWDPAAQAFRLNNPGSTVFTEDCNILLKLVMAGETTNSRGQRLPQKGDVEMLCGGPPCQGFSGMNRFNSRTYSKFKNSLVVSFLSYCDYYRPRFFLLENVRNFVSFKRSMVLKLTLRCLVRMGYQCTFGVLQAGQYGVAQTRRRAIILAAAPGEKLPLFPEPLHVFAPRACQLSVVVDDKKFVSNITRLSSGPFRTITVRDTMSDLPEVRNGASALEISYNGEPQSWFQRQLRGAQYQPILRDHICKDMSALVAARMRHIPLAPGSDWRDLPNIEVRLSDGTMARKLRYTHHDRKNGRSSSGALRGVCSCVEAGKACDPAARQFNTLIPWCLPHTGNRHNHWAGLYGRLEWDGFFSTTVTNPEPMGKQGRVLHPEQHRVVSVRECARSQGFPDTYRLFGNILDKHRQVGNAVPPPLAKAIGLEIKLCMLAKARESASAKIKEEEAAKD

SEQ ID NO: 48517 - DNA, 4899 bp, Artificial Sequence
  derived and/or modified sequence
atgccagcccgcacagcccctgcccgagtgcctacactggcggtccccgccatctcactaccagacgacgtgcggcggaggttgaaagacttagagcgggattcacttacagaaaaggaatgtgtcaaggagaaactgaacctgctgcacgaatttcttcagacagagatcaagaaccagttgtgtgatctggagaccaaactgagaaaggaggagttgtcagaagaggggtaccttgcaaaagtgaagtcacttctgaataaggacctaagcttggagaatggcgctcatgcatataacagggaggtgaacgggcggcttgagaacggcaatcaggccaggtccgaggctcgccgcgtgggcatggctgatgccaacagcccaccaaaacccttgtccaaaccacgtacgccacgcagaagcaagagcgacggagaggccaagcggagcagggacccccctgccagcgctagccaggtcaccgggatccgtgctgaacccagcccctcacccaggattacaagaaaaagtacccggcagacaaccatcacttcccactttgccaagggtcctgccaagcgcaaaccacaggaagaatctgaaagggccaagtcggatgagtctatcaaagaggaggataaggaccaagatgagaaacgtagacgtgtgacctcaagggaacgcgtcgcccgtccactcccggccgaggagccggagagagctaagtctggtactagaaccgagaaagaagaggagagggacgaaaaggaggaaaagaggctgagatcacagaccaaagagccgacccctaagcagaaactgaaagaggaacccgatcgcgaggcgcgggcgggggtccaggccgacgaagacgaagatggagatgaaaaagacgagaaaaaacaccggtcgcagccaaaggatctggcggcaaagagaaggccagaagagaaagaacccgaaaaggtgaaccctcagatatccgacgagaaggacgaggacgagaaagaggagaagcggcgcaaaacaacaccaaaggaaccgaccgagaaaaaaatggcaagggctaaaacagttatgaattccaaaactcatccgccaaaatgcatacagtgtgggcagtatctggacgacccagatctcaagtatggccagcatccacctgacgccgtcgacgaacctcagatgttgaccaatgagaaactaagcatcttcgatgctaatgagtccggttttgagagttatgaagcgctgccgcagcacaagctgacgtgcttttctgtgtactgtaagcatgggcacctctgtcccatcgatactggcctgattgaaaagaacatagaactgttcttttccggttccgcaaaaccgatttacgatgacgacccctcattggaggggggtgtgaacggaaagaacttaggtcctatcaacgagtggtggataaccgggttcgatggtggggagaaagcgctgatcggcttcagcacatcatttgctgaatatattttaatggacccctcacctgaatatgctcccatcttcggactgatgcaagaaaaaatctatatttcgaagatcgtcgtggaatttttgcagtccaattcagactcaacatacgaggatttaatcaataagatcgagacaacagtgcccccgtcaggcctcaatctgaatcggtttactgaggattcgttgctcaggcatgcacagttcgtggtcgagcaggttgagagttatgatgaagcaggggattctgacgagcagccaattttcttgaccccatgcatgagggatctgatcaagcttgctggcgtgacactcgggcagcgacgcgcacaggctagaaggcagacgatcagacactcaacccgggagaaggatcgcggtcctaccaaagctactactactaaattagtctaccagatattcgataccttttttgcagagcagatagagaaggatgaccgagaagacaaggagaacgcctttaagaggcgcaggtgtggcgtgtgcgaggtgtgccagcagcctgagtgcggaaaatgtaaagcctgcaaggatatggttaaatttggcgggtcaggacgaagtaagcaggcgtgccaagaacgccggtgcccaaacatggcaatgaaggaggcagacgatgacgaggaagttgatgataacattccagaaatgccttcccccaaaaagatgcaccagggaaaaaagaagaagcagaataaaaaccggatcagctgggtgggggaggccgtaaagacggacgggaagaaaagctactacaaaaaagtgtgtatagacgccgaaacccttgaggtgggggactgtgtgagcgtcatcccggacgattcctcaaaacccctctatctagcgagggtcactgcactgtgggaagactcttccaacggccagatgttccatgcccactggttctgcgccggtactgataccgtattgggcgccacatcagatccactcgaattgttccttgtggatgagtgtgaggacatgcaattaagctacatccactcaaaggttaaggtgatctataaagcaccttctgagaactgggcgatggagggaggcatggatcctgagtctcttttggaaggtgacgatggtaagacctacttctaccagttatggtacgaccaggactacgccaggttcgagtcaccccccaagacgcagcccactgaagataataagttcaaattttgcgtgtcatgcgccagactcgccgaaatgagacaaaaagaaatccctagagtcctggagcagctggaagacctggacagcagagtgctgtactattctgctacaaagaacgggatactgtatcgcgtgggcgacggagtttacctgccacccgaggctttcactttcaatatcaaactctctagcccagtgaaacgcccccgcaaagaacccgttgatgaggatctgtatccagagcactatcgaaagtacagcgactacattaaggggagtaatttggacgcccctgaaccttatcgcattgggcggataaaggagattttctgtccgaagaaatctaacgggaggcccaatgagacagacattaagattcgagtgaacaaattttataggccagaaaatactcataagtcgacacctgctagctatcacgccgatatcaatctgctgtactggagcgacgaggaagccgtggtggatttcaaagccgtgcagggacggtgcactgtagagtacggggaagatttgcctgaatgtgtgcaggtctatagtatgggtggcccgaacagattttacttcttagaagcctataatgccaaaagtaaaagtttcgaggatccccctaatcatgcacggtcacctggcaataaaggaaagggcaaaggcaaagggaaggggaaaccaaaatcacaggcctgcgaaccaagtgaacccgagatcgaaattaagctgccaaagctgcgcactctcgacgtatttagcgggtgcggcgggctttccgaaggattccaccaggcaggcatctctgacacactgtgggcaattgaaatgtgggatcccgccgcccaagctttcagactgaacaatcctgggtcaacagtcttcacagaggattgcaacattctccttaagctcgtcatggcaggcgagactactaattctaggggccagcgcctcccccagaaaggagacgtcgaaatgctgtgcggtggtccgccctgccagggtttttccggaatgaatcgcttcaatagccggacctactcaaaatttaaaaactctctggtggtgtccttcttatcctactgcgactactacaggcccagattttttctattggagaacgtgcggaacttcgtgtcctttaagagaagtatggttttgaagcttactctaagatgcctggttagaatgggataccagtgtacattcggagtccttcaggccggccaatacggggtggcccaaacacggcgcagggctattattttagctgccgcccccggtgagaagctccccctgttcccagagccgttacacgtcttcgcgcccagggcctgccagctgagcgtcgttgtcgatgataagaagtttgtctctaacatcacaagactgtcctctggaccctttcggaccattacggttcgtgacaccatgtctgaccttccagaagtgagaaatggtgcaagcgccttggaaatttcctataacggtgagcctcagtcctggttccaacgacagttgaggggcgctcaataccagcccatactccgagatcacatctgtaaagatatgtctgcccttgtggccgcacggatgagacacatccccctggccccaggcagtgattggcgggacctcccgaatattgaagtgagactgtccgacgggaccatggcgcggaagctacgctacacccatcacgatagaaagaacggacgatcttcctctggggccttacgaggggtttgcagctgtgtcgaggccggaaaggcttgtgatcctgccgcccggcagtttaataccctcataccatggtgtctcccgcatacaggaaacaggcataaccattgggccgggctgtacggccgactggagtgggacggatttttcagtactaccgtgaccaaccctgaacctatgggcaagcaggggcgcgttctgcaccccgaacaacaccgcgtggtgtctgtgagagagtgcgcccggagccagggcttccccgatacatatcgtctcttcgggaatattctcgacaagcaccgacaggtgggaaacgccgtgcctccgcccttggccaaggccatcgggttagaaatcaagctgtgcatgctcgccaaggcacgcgagagtgcatcggctaaaattaaggaggaagaggccgcgaaagactag

SEQ ID NO: 48518 - DNA, 4899 bp, Artificial Sequence
  derived and/or modified sequence
atgcctgccaggacagccccagcccgggtgcccaccctggccgtgcctgccatcagcctgcctgatgatgtgagaagaaggctgaaggacctggagcgggacagcctgacagagaaggaatgtgtgaaggagaagctgaacctgctgcacgagttcctgcagacagagatcaagaaccagctgtgtgacctggagaccaagctgaggaaggaggagctgtctgaggagggctacctggccaaggtgaagagcctgctgaacaaggacctgagcctggagaatggagcccacgcctacaaccgggaggtgaatggccgcctggagaatggaaaccaggcccggtctgaggcccggcgggtgggcatggctgatgccaacagcccccccaagcccctgagcaagcccaggaccccaagaagaagcaagagtgatggagaggccaagaggagccgggaccccccagccagcgccagccaggtgacaggcatccgggcagagcccagccccagcccccgcatcaccaggaagagcacccggcagaccaccatcaccagccactttgccaagggccctgccaagaggaagccccaggaggagagcgagcgggccaagagtgatgagagcatcaaggaggaggacaaggaccaggatgagaagagaagaagagtgaccagccgggagcgggtggcccggcccctgcctgctgaggagcctgagcgggccaagagcggcaccaggacagagaaggaggaggagagagatgagaaggaggagaagaggctgcggagccagaccaaggagcccacccccaagcagaagctgaaggaggagccagaccgggaggcccgggccggcgtgcaggctgatgaagatgaagatggagatgagaaggatgagaagaagcacaggagccagcccaaggacctggccgccaagagaagacctgaggagaaggagcctgagaaggtgaacccccagatcagtgatgagaaggatgaagatgagaaggaggagaagaggaggaagaccacccccaaggagcccacagagaagaagatggcccgggccaagacagtgatgaacagcaagacccacccccccaagtgcatccagtgtggccagtacctggatgatcctgacctgaagtatggccagcaccccccagatgctgtggatgagccccagatgctgaccaatgagaagctgagcatctttgatgccaatgaaagtggctttgagagctatgaggccctgccccagcacaagctgacctgcttctctgtgtactgcaagcacggccacctgtgccccatcgacaccggcctgattgagaagaacatcgagctgttcttcagcggcagcgccaagcccatctatgatgatgaccccagcctggagggcggcgtgaatggcaagaacctgggccccatcaatgagtggtggatcactggatttgatggaggagagaaggccctgattggcttcagcaccagctttgctgagtacatcctgatggaccccagcccagaatatgcccccatcttcggcctgatgcaggagaagatctacatcagcaagatcgtggtggagttcctgcagagcaacagcgacagcacctatgaagatctcatcaacaagattgagaccaccgtgccccccagcggcctgaacctgaaccgcttcacagaggacagcctgctgcggcatgcccagtttgtggtggagcaggtggagagctatgatgaagctggggacagtgatgagcagcccatcttcctgaccccctgcatgagggacctgatcaagctggccggcgtgaccctgggccagaggcgggcccaggcccggcggcagaccatccgccacagcacccgggagaaggaccggggccccaccaaggccaccaccaccaagctggtgtaccagatctttgacaccttctttgctgagcagatcgagaaggatgaccgggaggacaaggaaaatgccttcaagagaagaagatgtggggtgtgtgaggtgtgccagcagccagaatgtgggaagtgcaaggcctgcaaggacatggtgaagtttggaggcagcggccgcagcaagcaggcctgccaggagcggcgctgccccaacatggccatgaaggaggctgatgatgatgaggaggtggatgacaacatccctgagatgcccagccccaagaagatgcaccagggcaagaagaagaagcagaacaagaaccgcatctcctgggtgggggaggccgtgaagacagatggcaagaagagctactacaagaaggtgtgcattgatgctgagaccctggaggtgggggactgtgtgtctgtcatcccagatgacagcagcaagcccctgtacctggcccgggtgacagccctgtgggaggacagcagcaatggccagatgtttcatgcccactggttctgtgccggcacagacacagtgctgggcgccaccagtgaccccctggagctgttcctggtggatgaatgtgaggacatgcagctgagctacatccacagcaaggtgaaggtgatctacaaggcccccagcgagaactgggccatggagggcggcatggaccctgagagcctgctggagggagatgatggcaagacctacttctaccagctgtggtatgaccaggactatgccaggtttgagagcccccccaagacccagcccacagaggacaacaagttcaagttctgtgtgtcctgtgcccggctggccgagatgaggcagaaggagatcccccgggtgctggagcagctggaggacctggacagccgggtgctgtactacagcgccaccaagaatggcatcctgtacagagtgggagatggagtgtacctgcccccagaggccttcaccttcaacatcaagctgagcagccctgtgaagaggcccaggaaggagcctgtggatgaggacctgtacccagagcactacaggaagtacagcgactacatcaagggcagcaacctggatgcccctgagccctacagaattggccgcatcaaggagatcttctgccccaagaagagcaatggccggcccaatgaaacagacatcaagatccgggtgaacaagttctacagacctgagaacacccacaagagcaccccagccagctaccacgccgacatcaacctgctgtactggagcgatgaggaggccgtggtggacttcaaggctgtgcagggccgctgcaccgtggagtatggagaggacctgcctgaatgtgtgcaggtgtacagcatgggcggccccaaccgcttctacttcctggaggcctacaatgccaagagcaagagctttgaagatcctcccaaccacgcccggagccctggcaacaagggcaagggcaagggcaagggcaagggcaagcccaagagccaggcctgtgagcccagcgagcctgagattgagatcaagctgcccaagctgcggaccctggatgtgttcagcggctgcggcggcctgtctgagggcttccaccaggccggcatcagtgacaccctgtgggccatcgagatgtgggaccctgctgcccaggccttccggctgaacaaccctggcagcacagtgttcacagaggactgcaacatcctgctgaagctggtgatggccggggagaccaccaacagccggggccagaggctgccccagaagggagatgtggagatgctgtgtggcggccccccctgccagggcttcagcggcatgaaccgcttcaacagcaggacctacagcaagttcaagaacagcctggtggtgtccttcctgagctactgtgactactaccggccccgcttcttcctgctggagaatgtgaggaactttgtgtccttcaagaggtccatggtgctgaagctgaccctgcgctgcctggtgaggatgggctaccagtgcaccttcggcgtgctgcaggccggccagtatggagtggcccagaccaggagaagagccatcatcctggccgccgcccctggagagaagctgcccctcttccctgagcccctgcacgtgtttgccccccgggcctgccagctgtctgtggtggtggatgacaagaagtttgtgagcaacatcacccggctgagcagcggccccttccgcaccatcaccgtgcgggacaccatgtctgacctgcctgaggtgagaaatggagccagcgccctggagatctcctacaatggagagccccagagctggttccagaggcagctgcggggggcccagtaccagcccatcctgcgggaccacatctgcaaggacatgtctgccctggtggccgccaggatgaggcacatccccctggcccctggcagtgactggagggacctgcccaacatcgaggtgcggctgagtgatggcaccatggccaggaagctgcgctacacccaccacgacaggaagaatggccgcagcagcagcggggccctgcggggcgtgtgcagctgtgtggaggccggcaaggcctgtgaccctgctgcccggcagttcaacaccctcatcccctggtgcctgccccacactggaaacagacacaaccactgggccggcctgtatggccgcctggagtgggatggcttcttcagcaccaccgtgaccaaccctgagcccatgggcaagcagggccgggtgctgcaccctgagcagcaccgggtggtgtctgtgcgggagtgtgcccggagccagggcttcccagacacctaccgcctgtttggaaacatcctggacaagcaccggcaggtgggcaatgctgtgcccccacccctggccaaggccatcggcctggagatcaagctgtgcatgctggccaaggcccgggagagcgccagcgccaagatcaaggaggaggaggccgccaaggactag

SEQ ID NO: 48519 - DNA, 4899 bp, Artificial Sequence
  derived and/or modified sequence
atgcccgcccggaccgcccccgcccgggtgcccaccctggccgtgccagcaatttccctgcccgacgacgtgaggaggcgcttgaaagatttagaacgtgactccctaacagaaaaggaatgcgtgaaagagaaactgaatttgctgcacgagttcttacagacagagattaagaatcaactgtgcgacttggaaacgaaactgaggaaagaggagctgtccgaggaaggttatctggctaaagtaaagtccctgctgaataaggatctctcactggagaatggcgctcacgcgtataacagagaagtaaatgggaggcttgagaatggcaaccaggcaaggtctgaggctagaagggtaggaatggccgacgcaaactctcctcctaagcccctgagtaagccgagaacacctcggcgctcgaagagcgacggagaggctaaacgaagtcgggacccccctgcttctgcgtcgcaggtcactggcattcgcgccgagccttcacccagcccacgaattaccagaaaaagcactcgacagactactattaccagccactttgccaagggccctgccaagcgaaagccccaggaagagagcgagagggcgaaatccgacgagagtattaaagaggaggataaagaccaggatgagaagcggcgccgagtgactagtcgggaacgcgtggctcggccattgcccgccgaggagccggagagggccaagtccggcacgcgcactgaaaaggaggaagagcgcgatgagaaggaggagaaaagactcaggtctcagacgaaagagcccactcctaagcaaaagctgaaggaagagcccgaccgggaagcaagagctggcgtccaggccgacgaggacgaagacggcgatgaaaaagatgagaagaaacatcgaagccaacccaaagatctcgctgctaaacggaggccggaggagaaggagcctgagaaggtgaacccccaaatcagtgacgagaaggatgaggacgagaaggaagaaaaaaggagaaaaactacacccaaagaaccaacagaaaaaaagatggccagagcaaagacggtaatgaatagtaagacccatccgcccaaatgtatccagtgcgggcaatacttggatgacccggacctcaaatatgggcagcacccccccgacgctgtcgacgagcctcagatgctgacgaacgaaaagctgtccattttcgacgcaaacgagtccgggttcgagtcttatgaagcgttgccccagcataaactcacctgttttagcgtgtactgcaagcacggacacttgtgccccatcgacactgggttgattgaaaagaacatcgaattatttttcagtggaagcgcaaaacccatttatgatgatgaccctagtctggagggcggcgttaatgggaaaaatctgggtcctattaacgagtggtggatcacgggctttgacgggggtgaaaaggccctcatcggctttagcacatcatttgccgagtatattttaatggatcctagccctgaatatgctccaatcttcggactcatgcaggagaagatctacatctcaaaaatcgtggtggaattcttgcagagcaacagcgatagtacatacgaagatctgattaataagatcgagacgaccgtcccacccagtggcctgaatctgaacaggtttactgaggattcactgctgaggcacgcccaattcgttgttgaacaagtggagtcttatgacgaggccggtgactcagacgaacagccaatttttctcaccccatgcatgagagatctcatcaagttagcgggcgtgactctcgggcagcgtagagcacaagcacgccgacagacaattcggcactcaacccgagagaaagatcgaggacccacgaaggcaacaaccacgaagcttgtctaccagatcttcgataccttttttgccgagcagattgagaaggacgacagagaagacaaagagaatgcttttaagcgaagaaggtgtggtgtgtgtgaggtgtgccagcaaccagagtgcggcaagtgtaaggcttgtaaagacatggtcaagtttggcggcagcggtcggtcaaaacaggcatgtcaggaacggcggtgtcctaatatggctatgaaggaggccgatgacgacgaggaggtggatgacaatatccccgagatgccatcaccaaaaaaaatgcaccaaggcaagaagaagaaacaaaataagaacagaatctcttgggttggggaagccgtaaaaaccgatgggaagaaaagctattacaagaaggtgtgcatcgatgcggagacgctcgaagtcggagattgcgtctccgttattcccgatgattctagtaaaccactgtacctggccagagttaccgcactttgggaggattcatccaacggacagatgtttcacgcccattggttctgtgccggtaccgacaccgtgttgggggccaccagtgaccctctcgagttattcctcgtcgatgagtgcgaagacatgcaactctcttacattcattctaaggtgaaggttatatacaaggcgcctagcgaaaactgggccatggagggagggatggacccagagtccctgcttgaaggtgatgacggcaaaacttacttctaccaactatggtacgaccaggactatgctagatttgagagcccccctaaaacacagcccactgaagacaacaaattcaagttctgcgtgtcctgtgcccgcttggccgagatgcgccagaaagaaattcctcgtgtgctggagcaactggaagacctggactcccgcgtgctctactatagtgcaacaaagaatggaatcctatatcgcgtcggcgacggcgtgtatttgccaccagaagccttcacattcaacattaagctctcctctcccgtgaagaggccacggaaggaacccgtggacgaagatttgtatcccgagcactacagaaaatactcggactatatcaaaggctctaacttggacgcaccagaaccttacagaattgggcgcattaaggagatcttctgccctaagaaatccaacgggcgccccaatgaaactgatattaaaattcgggtgaacaaattttaccggcccgaaaacacccacaaaagcacccctgcaagttaccacgctgacattaacttactgtactggagcgatgaggaggcagttgtcgacttcaaagctgtgcaaggccgttgcactgtcgagtacggagaggatctcccagaatgcgtgcaggtgtattccatggggggccccaaccgtttctactttttagaggcctacaatgccaagagcaaaagctttgaagacccgcctaaccatgctcgctcaccaggcaacaagggaaaggggaaaggcaaaggaaaaggaaagcctaagagccaggcttgcgagccttctgagcctgaaatcgagattaaattgcccaaactgcggaccctggatgtgttctccggatgcggaggtctttcggaaggattccatcaggctggcatcagtgataccctctgggctatagagatgtgggatccagccgcacaggctttccggcttaacaatcctggctcgaccgtttttaccgaggattgcaatatcctcctgaagcttgttatggccggcgagactactaactccagaggacagcgcctgccgcagaagggtgatgtcgagatgctatgcggcgggccaccttgccaggggtttagcggaatgaaccggtttaactcgagaacatactcaaagttcaaaaattctttggtagtgtccttcttgagctattgtgactattacagacctagattttttcttctcgaaaacgtccgaaattttgtctcattcaaaagatccatggttttgaaacttacactgcggtgcctggtgcggatgggttatcagtgtacattcggcgtgctgcaggccggacaatatggtgttgcccagacaaggagacgcgccattattctcgcagccgcaccaggcgagaaactgcctctgtttccggagccactgcacgtgttcgctccacgggcctgtcagctgtctgttgttgtcgacgacaagaagttcgtgagtaatatcacccgcctttctagcggaccttttcggacaattacggtgagggatacgatgtctgatctgcctgaggtgcgcaatggcgcgtccgccctggaaattagctataacggagaaccccaaagttggttccagagacagctaaggggggcccagtatcagccgatccttcgagatcacatctgtaaggacatgtcagcgctggtggcagccagaatgaggcatatccctctggcaccggggtctgattggcgggacttaccaaacatcgaggtcagactcagcgacggaacaatggcccgcaagttgcgctatacccatcacgatcggaaaaatggacggtcgtccagtggcgctcttaggggagtttgctcctgcgttgaagctggaaaagcatgtgatccggctgcccggcagtttaacacacttattccctggtgtcttccacataccggcaataggcacaatcactgggccgggctgtatgggaggctcgagtgggatgggttcttcagtactactgttaccaatccagagcctatgggcaagcaggggcgggtgctgcaccccgaacagcatagggtggtctccgtacgcgagtgcgctagatcacagggcttccccgatacgtacagactctttggcaatattctcgacaagcatcggcaggtcggcaacgcagtcccacctcctctggctaaagcaattggattagagatcaagctatgtatgctggcaaaggcccgcgagagcgccagcgccaagatcaaggaggaagaagccgccaaagactag

SEQ ID NO: 48520 - DNA, 4899 bp, Artificial Sequence
  derived and/or modified sequence
atgcctgcaagaaccgcgcctgccagagtccccacgctggccgttcctgctatctccttacctgacgatgtgaggcggagactgaaagatttggaaagagattccctaacagagaaggagtgcgtgaaagagaagctgaatctgctgcacgaatttctgcagaccgagatcaaaaatcaattatgcgatctcgaaaccaaactgagaaaggaagaactctctgaggagggttatctggccaaggtcaagagtttactgaataaagaccttagccttgaaaatggagcacacgcctataacagagaagtcaacggtcgcctggagaacgggaatcaggcccgtagcgaggctaggcgtgtcggaatggctgatgcgaactcgccacccaaaccactttctaaaccccgaacccccagacggtcaaaatcggacggagaggcaaagcgttctagggatccgccagctagtgcttcccaggtgaccggaatcagagccgagcccagtccaagcccacgcattacccgaaagtctaccagacaaacaactatcacttcccactttgccaagggcccagctaaacggaaaccacaggaggagagcgaaagagctaagtctgatgaatcgatcaaggaagaggataaagaccaggatgagaagcgacgcagagtgacatcacgcgaacgcgtggctaggcctctccccgctgaagaacctgagcgagcaaagtccgggaccagaacagaaaaggaagaagaacgggacgagaaggaggagaagagactgcgatctcagacgaaagaacccactccaaaacagaagctgaaggaggaacctgatcgagaggcaagggccggagtgcaggccgatgaagacgaagatggcgatgagaaggatgaaaaaaaacatcggagtcagcctaaggacctggccgctaagcgcaggccggaagagaaggaaccagaaaaggtaaacccccagatctccgatgaaaaggacgaagatgaaaaggaggaaaagcggaggaaaaccactcctaaggagcccaccgagaaaaaaatggctcgtgctaaaacagtcatgaattccaaaactcacccaccgaagtgtattcaatgcggtcagtatctggacgaccccgacctcaagtacggacagcatccaccagacgctgtggacgaaccacagatgctgaccaatgagaaactttccatcttcgacgcaaacgagagcggctttgagtcatatgaggccctgccacagcacaagcttacctgcttttccgtttactgcaagcacgggcatttatgcccaattgatactggtctaatcgagaaaaacatcgagctgttttttagtggctccgcaaagcccatctacgacgatgaccctagtctagagggtggcgtaaacgggaaaaacctcggaccgattaatgaatggtggattacaggctttgacggaggcgagaaggcactgattggattttccacgtcatttgctgaatacatcctgatggatccttcccccgagtatgcgccaatttttggcctgatgcaggagaaaatttacatcagcaagatagttgtggaatttctacagtcgaattctgacagtacctatgaggatctcataaataagattgagactaccgtgccaccttctggtctgaacctcaatcgctttacagaggactctctgctcaggcatgctcagttcgtggtcgaacaggtagagtcgtatgatgaggccggagattcagacgagcaaccaatctttctgacgccctgcatgcgcgacctcatcaaactggcaggcgttacgttaggccagcgcagagcccaggctagacggcaaaccatccggcactctacccgagagaaggaccggggacccactaaagccaccacaacaaaactggtttaccaaatcttcgacacattcttcgccgagcagatcgaaaaggacgaccgagaggacaaggaaaacgccttcaaaaggaggcgctgcggcgtttgtgaagtatgccagcagcctgaatgtggcaaatgcaaggcctgtaaggatatggtaaaattcgggggaagcggtcggtcaaaacaagcctgccaggaaagacgttgccctaacatggcaatgaaagaggccgacgatgacgaggaggtggatgataatattcccgagatgccctcccccaaaaagatgcaccagggaaaaaagaaaaaacagaataaaaaccggatttcatgggtgggagaagctgttaaaaccgatggaaagaagtcttactacaagaaggtgtgcatcgacgccgagactttagaggtgggagattgcgtgagcgtcattccagacgattcttcaaagcccctgtaccttgctagagttaccgcactgtgggaagattctagcaatggccagatgttccatgcccactggttctgcgcgggaacagacaccgtgttaggtgccacctccgatcccctggaactgttcctggtggacgagtgcgaagacatgcagttgtcttacatccacagtaaggttaaggttatctataaagctccatcagagaattgggcgatggagggcggtatggacccagaaagcctgcttgaaggcgatgatgggaagacctacttctaccagctgtggtatgaccaagactacgcacggtttgagtccccaccgaagacacagcctaccgaggacaataagttcaagttttgcgtgtcctgcgctaggctggccgagatgaggcagaaggagattccgagggttcttgaacaactggaggatctggacagtagagttctctattactctgccacaaaaaatggaatcctatatcgggtgggggacggtgtttaccttccgcctgaagcttttacctttaacattaagttgtcttcccctgtgaagcgacctaggaaagagccagtggacgaagatctgtatcccgagcactatagaaagtattccgattacatcaaaggctcaaatctggacgcaccggagccataccggattggacgcattaaggaaatcttttgtccgaagaagtctaacgggaggcccaacgaaaccgatattaaaatcagggtgaacaagttctacaggccagagaacactcacaaatcgaccccagccagctatcacgctgatatcaacctcttatattggagtgacgaagaggccgtagtggatttcaaagccgtccagggtcggtgtactgtggagtatggcgaggacctccccgaatgtgtccaggtgtactcaatggggggtcctaacaggttttattttttggaagcctacaatgcaaagtctaagagcttcgaggacccgcctaatcacgctcgctcacccggaaacaagggtaaaggcaagggaaaaggcaaaggcaagcccaagtcacaggcctgcgaacctagtgaacctgagatcgagatcaagctgccgaagctgcggactctggatgtcttcagtggttgcggcggtctgtccgagggcttccatcaggcagggatcagcgacacgctgtgggctattgaaatgtgggatccggctgctcaggcctttcgcctgaataatccaggttcaaccgtgttcaccgaggattgcaacatcctgctaaagctggtcatggcaggtgagactaccaacagtcgtggacagcggctgcctcagaagggtgatgtagaaatgctatgcggaggccctccatgccaaggcttcagcgggatgaatagatttaacagtcggacctatagtaagttcaaaaatagtttagtcgtgtcatttctgtcatattgtgattattatagacccaggttctttctgctagagaatgttcggaattttgtgtcctttaagcggtcaatggtgttaaagctgaccttacgctgtctggtccggatgggttaccagtgtacgtttggcgtgctccaggccggacaatatggcgtcgcgcagactaggcggcgagcaattatccttgctgctgcgccaggagagaagttgcctttatttccagagcccctgcatgtcttcgcgcctcgagcctgccagctgtcagtcgtggtggatgacaagaagtttgtttctaacatcacgaggctgtctagcgggcctttcaggacgatcacagtcagggacaccatgtctgacctgccggaggtcaggaatggggcttctgctttggagatctcctacaacggcgagccccagagctggtttcagcgccagctcaggggcgcacaatatcagccaatccttagagaccacatctgtaaagacatgtccgcccttgtggccgcacgcatgaggcacatccctcttgcgcctggcagcgactggcgggacctgcccaacattgaagtgcgattaagcgatgggacgatggccagaaagcttcggtatactcaccacgaccgcaagaacgggagatcaagttccggagcgctgaggggcgtgtgctcatgtgtggaggctgggaaggcatgcgaccccgctgccagacaatttaatacactgattccttggtgcttgccccatacaggcaacagacataaccattgggccggactttacggtcgcctcgagtgggacggattttttagcacaaccgtcacgaacccagagcctatgggcaagcagggtagagttctgcaccccgaacaacaccgtgtggtgagcgtgcgggaatgtgctcgctcccaagggttcccagatacttatcggcttttcggcaatatcttggacaaacacaggcaagtgggcaacgcggtgcccccaccacttgccaaggccatcggactggagatcaagctctgtatgctggccaaagctagggaaagcgccagcgccaagattaaagaggaagaggctgcgaaggactag

SEQ ID NO: 48521 - DNA, 4899 bp, Artificial Sequence
  derived and/or modified sequence
atgcccgccagaaccgcccccgccagagtgcccaccctggccgtgcccgccatcagcctgcccgacgacgtgagaagaagactgaaggacctggagagagacagcctgaccgagaaggagtgcgtgaaggagaagctgaacctgctgcacgagttcctgcagaccgagatcaagaaccagctgtgcgacctggagaccaagctgagaaaggaggagctgagcgaggagggctacctggccaaggtgaagagcctgctgaacaaggacctgagcctggagaacggcgcccacgcctacaacagagaggtgaacggcagactggagaacggcaaccaggccagaagcgaggccagaagagtgggcatggccgacgccaacagcccccccaagcccctgagcaagcccagaacccccagaagaagcaagagcgacggcgaggccaagagaagcagagacccccccgccagcgccagccaggtgaccggcatcagagccgagcccagccccagccccagaatcaccagaaagagcaccagacagaccaccatcaccagccacttcgccaagggccccgccaagagaaagccccaggaggagagcgagagagccaagagcgacgagagcatcaaggaggaggacaaggaccaggacgagaagagaagaagagtgaccagcagagagagagtggccagacccctgcccgccgaggagcccgagagagccaagagcggcaccagaaccgagaaggaggaggagagagacgagaaggaggagaagagactgagaagccagaccaaggagcccacccccaagcagaagctgaaggaggagcccgacagagaggccagagccggcgtgcaggccgacgaggacgaggacggcgacgagaaggacgagaagaagcacagaagccagcccaaggacctggccgccaagagaagacccgaggagaaggagcccgagaaggtgaacccccagatcagcgacgagaaggacgaggacgagaaggaggagaagagaagaaagaccacccccaaggagcccaccgagaagaagatggccagagccaagaccgtgatgaacagcaagacccacccccccaagtgcatccagtgcggccagtacctggacgaccccgacctgaagtacggccagcacccccccgacgccgtggacgagccccagatgctgaccaacgagaagctgagcatcttcgacgccaacgagagcggcttcgagagctacgaggccctgccccagcacaagctgacctgcttcagcgtgtactgcaagcacggccacctgtgccccatcgacaccggcctgatcgagaagaacatcgagctgttcttcagcggcagcgccaagcccatctacgacgacgaccccagcctggagggcggcgtgaacggcaagaacctgggccccatcaacgagtggtggatcaccggcttcgacggcggcgagaaggccctgatcggcttcagcaccagcttcgccgagtacatcctgatggaccccagccccgagtacgcccccatcttcggcctgatgcaggagaagatctacatcagcaagatcgtggtggagttcctgcagagcaacagcgacagcacctacgaggacctgatcaacaagatcgagaccaccgtgccccccagcggcctgaacctgaacagattcaccgaggacagcctgctgagacacgcccagttcgtggtggagcaggtggagagctacgacgaggccggcgacagcgacgagcagcccatcttcctgaccccctgcatgagagacctgatcaagctggccggcgtgaccctgggccagagaagagcccaggccagaagacagaccatcagacacagcaccagagagaaggacagaggccccaccaaggccaccaccaccaagctggtgtaccagatcttcgacaccttcttcgccgagcagatcgagaaggacgacagagaggacaaggagaacgccttcaagagaagaagatgcggcgtgtgcgaggtgtgccagcagcccgagtgcggcaagtgcaaggcctgcaaggacatggtgaagttcggcggcagcggcagaagcaagcaggcctgccaggagagaagatgccccaacatggccatgaaggaggccgacgacgacgaggaggtggacgacaacatccccgagatgcccagccccaagaagatgcaccagggcaagaagaagaagcagaacaagaacagaatcagctgggtgggcgaggccgtgaagaccgacggcaagaagagctactacaagaaggtgtgcatcgacgccgagaccctggaggtgggcgactgcgtgagcgtgatccccgacgacagcagcaagcccctgtacctggccagagtgaccgccctgtgggaggacagcagcaacggccagatgttccacgcccactggttctgcgccggcaccgacaccgtgctgggcgccaccagcgaccccctggagctgttcctggtggacgagtgcgaggacatgcagctgagctacatccacagcaaggtgaaggtgatctacaaggcccccagcgagaactgggccatggagggcggcatggaccccgagagcctgctggagggcgacgacggcaagacctacttctaccagctgtggtacgaccaggactacgccagattcgagagcccccccaagacccagcccaccgaggacaacaagttcaagttctgcgtgagctgcgccagactggccgagatgagacagaaggagatccccagagtgctggagcagctggaggacctggacagcagagtgctgtactacagcgccaccaagaacggcatcctgtacagagtgggcgacggcgtgtacctgccccccgaggccttcaccttcaacatcaagctgagcagccccgtgaagagacccagaaaggagcccgtggacgaggacctgtaccccgagcactacagaaagtacagcgactacatcaagggcagcaacctggacgcccccgagccctacagaatcggcagaatcaaggagatcttctgccccaagaagagcaacggcagacccaacgagaccgacatcaagatcagagtgaacaagttctacagacccgagaacacccacaagagcacccccgccagctaccacgccgacatcaacctgctgtactggagcgacgaggaggccgtggtggacttcaaggccgtgcagggcagatgcaccgtggagtacggcgaggacctgcccgagtgcgtgcaggtgtacagcatgggcggccccaacagattctacttcctggaggcctacaacgccaagagcaagagcttcgaggacccccccaaccacgccagaagccccggcaacaagggcaagggcaagggcaagggcaagggcaagcccaagagccaggcctgcgagcccagcgagcccgagatcgagatcaagctgcccaagctgagaaccctggacgtgttcagcggctgcggcggcctgagcgagggcttccaccaggccggcatcagcgacaccctgtgggccatcgagatgtgggaccccgccgcccaggccttcagactgaacaaccccggcagcaccgtgttcaccgaggactgcaacatcctgctgaagctggtgatggccggcgagaccaccaacagcagaggccagagactgccccagaagggcgacgtggagatgctgtgcggcggccccccctgccagggcttcagcggcatgaacagattcaacagcagaacctacagcaagttcaagaacagcctggtggtgagcttcctgagctactgcgactactacagacccagattcttcctgctggagaacgtgagaaacttcgtgagcttcaagagaagcatggtgctgaagctgaccctgagatgcctggtgagaatgggctaccagtgcaccttcggcgtgctgcaggccggccagtacggcgtggcccagaccagaagaagagccatcatcctggccgccgcccccggcgagaagctgcccctgttccccgagcccctgcacgtgttcgcccccagagcctgccagctgagcgtggtggtggacgacaagaagttcgtgagcaacatcaccagactgagcagcggccccttcagaaccatcaccgtgagagacaccatgagcgacctgcccgaggtgagaaacggcgccagcgccctggagatcagctacaacggcgagccccagagctggttccagagacagctgagaggcgcccagtaccagcccatcctgagagaccacatctgcaaggacatgagcgccctggtggccgccagaatgagacacatccccctggcccccggcagcgactggagagacctgcccaacatcgaggtgagactgagcgacggcaccatggccagaaagctgagatacacccaccacgacagaaagaacggcagaagcagcagcggcgccctgagaggcgtgtgcagctgcgtggaggccggcaaggcctgcgaccccgccgccagacagttcaacaccctgatcccctggtgcctgccccacaccggcaacagacacaaccactgggccggcctgtacggcagactggagtgggacggcttcttcagcaccaccgtgaccaaccccgagcccatgggcaagcagggcagagtgctgcaccccgagcagcacagagtggtgagcgtgagagagtgcgccagaagccagggcttccccgacacctacagactgttcggcaacatcctggacaagcacagacaggtgggcaacgccgtgcccccccccctggccaaggccatcggcctggagatcaagctgtgcatgctggccaaggccagagagagcgccagcgccaagatcaaggaggaggaggccgccaaggactag

SEQ ID NO: 48522 - DNA, 5399 bp, Artificial Sequence
  derived and/or modified sequence
ggctccgttccatccttctgcacagggtatcgcctctctccgtttggtacatcccctcctcccccacgcccggactggggtggtagacgccgcctccgctcatcgcccctccccatcggtttccgcgcgaaaagccggggcgcctgcgctgccgccgccgcgtctgctgaagcctccgagatgccggcgcgtaccgccccagcccgggtgcccacactggccgtcccggccatctcgctgcccgacgatgtccgcaggcggctcaaagatttggaaagagacagcttaacagaaaaggaatgtgtgaaggagaaattgaatctcttgcacgaatttctgcaaacagaaataaagaatcagttatgtgacttggaaaccaaattacgtaaagaagaattatccgaggagggctacctggctaaagtcaaatcccttttaaataaagatttgtccttggagaacggtgctcatgcttacaaccgggaagtgaatggacgtctagaaaacgggaaccaagcaagaagtgaagcccgtagagtgggaatggcagatgccaacagcccccccaaacccctttccaaacctcgcacgcccaggaggagcaagtccgatggagaggctaagcgttcaagagaccctcctgcctcagcctcccaagtaactgggattagagctgaaccttcacctagccccaggattacaaggaaaagcaccaggcaaaccaccatcacatctcattttgcaaagggccctgccaaacggaaacctcaggaagagtctgaaagagccaaatcggatgagtccatcaaggaagaagacaaagaccaggatgagaagagacgtagagttacatccagagaacgagttgctagaccgcttcctgcagaagaacctgaaagagcaaaatcaggaacgcgcactgaaaaggaagaagaaagagatgaaaaagaagaaaagagactccgaagtcaaaccaaagaaccaacacccaaacagaaactgaaggaggagccggacagagaagccagggcaggcgtgcaggctgacgaggacgaagatggagacgagaaagatgagaagaagcacagaagtcaacccaaagatctagctgccaaacggaggcccgaagaaaaagaacctgaaaaagtaaatccacagatttctgatgaaaaagacgaggatgaaaaggaggagaagagacgcaaaacgacccccaaagaaccaacggagaaaaaaatggctcgcgccaaaacagtcatgaactccaagacccaccctcccaagtgcattcagtgcgggcagtacctggacgaccctgacctcaaatatgggcagcacccaccagacgcggtggatgagccacagatgctgacaaatgagaagctgtccatctttgatgccaacgagtctggctttgagagttatgaggcgcttccccagcacaaactgacctgcttcagtgtgtactgtaagcacggtcacctgtgtcccatcgacaccggcctcatcgagaagaatatcgaactcttcttttctggttcagcaaaaccaatctatgatgatgacccatctcttgaaggtggtgttaatggcaaaaatcttggccccataaatgaatggtggatcactggctttgatggaggtgaaaaggccctcatcggcttcagcacctcatttgccgaatacattctgatggatcccagtcccgagtatgcgcccatatttgggctgatgcaggagaagatctacatcagcaagattgtggtggagttcctgcagagcaattccgactcgacctatgaggacctgatcaacaagatcgagaccacggttcctccttctggcctcaacttgaaccgcttcacagaggactccctcctgcgacacgcgcagtttgtggtggagcaggtggagagttatgacgaggccggggacagtgatgagcagcccatcttcctgacaccctgcatgcgggacctgatcaagctggctggggtcacgctgggacagaggcgagcccaggcgaggcggcagaccatcaggcattctaccagggagaaggacaggggacccacgaaagccaccaccaccaagctggtctaccagatcttcgatactttcttcgcagagcaaattgaaaaggatgacagagaagacaaggagaacgcctttaagcgccggcgatgtggcgtctgtgaggtgtgtcagcagcctgagtgtgggaaatgtaaagcctgcaaggacatggttaaatttggtggcagtggacggagcaagcaggcttgccaagagcggaggtgtcccaatatggccatgaaggaggcagatgacgatgaggaagtcgatgataacatcccagagatgccgtcacccaaaaaaatgcaccaggggaagaagaagaaacagaacaagaatcgcatctcttgggtcggagaagccgtcaagactgatgggaagaagagttactataagaaggtgtgcattgatgcggaaaccctggaagtgggggactgtgtctctgttattccagatgattcctcaaaaccgctgtatctagcaagggtcacggcgctgtgggaggacagcagcaacgggcagatgtttcacgcccactggttctgcgctgggacagacacagtcctcggggccacgtcggaccctctggagctgttcttggtggatgaatgtgaggacatgcagctttcatatatccacagcaaagtgaaagtcatctacaaagccccctccgaaaactgggccatggagggaggcatggatcccgagtccctgctggagggggacgacgggaagacctacttctaccagctgtggtatgatcaagactacgcgagattcgagtcccctccaaaaacccagccaacagaggacaacaagttcaaattctgtgtgagctgtgcccgtctggctgagatgaggcaaaaagaaatccccagggtcctggagcagctcgaggacctggatagccgggtcctctactactcagccaccaagaacggcatcctgtaccgagttggtgatggtgtgtacctgccccctgaggccttcacgttcaacatcaagctgtccagtcccgtgaaacgcccacggaaggagcccgtggatgaggacctgtacccagagcactaccggaaatactccgactacatcaaaggcagcaacctggatgcccctgagccctaccgaattggccggatcaaagagatcttctgtcccaagaagagcaacggcaggcccaatgagactgacatcaaaatccgggtcaacaagttctacaggcctgagaacacccacaagtccactccagcgagctaccacgcagacatcaacctgctctactggagcgacgaggaggccgtggtggacttcaaggctgtgcagggccgctgcaccgtggagtatggggaggacctgcccgagtgcgtccaggtgtactccatgggcggccccaaccgcttctacttcctcgaggcctataatgcaaagagcaaaagctttgaagatcctcccaaccatgcccgtagccctggaaacaaagggaagggcaagggaaaagggaagggcaagcccaagtcccaagcctgtgagccgagcgagccagagatagagatcaagctgcccaagctgcggaccctggatgtgttttctggctgcggggggttgtcggagggattccaccaagcaggcatctctgacacgctgtgggccatcgagatgtgggaccctgcggcccaggcgttccggctgaacaaccccggctccacagtgttcacagaggactgcaacatcctgctgaagctggtcatggctggggagaccaccaactcccgcggccagcggctgccccagaagggagacgtggagatgctgtgcggcgggccgccctgccagggcttcagcggcatgaaccgcttcaattcgcgcacctactccaagttcaaaaactctctggtggtttccttcctcagctactgcgactactaccggccccggttcttcctcctggagaatgtcaggaactttgtctccttcaagcgctccatggtcctgaagctcaccctccgctgcctggtccgcatgggctatcagtgcaccttcggcgtgctgcaggccggtcagtacggcgtggcccagactaggaggcgggccatcatcctggccgcggcccctggagagaagctccctctgttcccggagccactgcacgtgtttgctccccgggcctgccagctgagcgtggtggtggatgacaagaagtttgtgagcaacataaccaggttgagctcgggtcctttccggaccatcacggtgcgagacacgatgtccgacctgccggaggtgcggaatggagcctcggcactggagatctcctacaacggggagcctcagtcctggttccagaggcagctccggggcgcacagtaccagcccatcctcagggaccacatctgtaaggacatgagtgcattggtggctgcccgcatgcggcacatccccttggccccagggtcagactggcgcgatctgcccaacatcgaggtgcggctctcagacggcaccatggccaggaagctgcggtatacccaccatgacaggaagaacggccgcagcagctctggggccctccgtggggtctgctcctgcgtggaagccggcaaagcctgcgaccccgcagccaggcagttcaacaccctcatcccctggtgcctgccccacaccgggaaccggcacaaccactgggctggcctctatggaaggctcgagtgggacggcttcttcagcacaaccgtcaccaaccccgagcccatgggcaagcagggccgcgtgctccacccagagcagcaccgtgtggtgagcgtgcgggagtgtgcccgctcccagggcttccctgacacctaccggctcttcggcaacatcctggacaagcaccggcaggtgggcaatgccgtgccaccgcccctggccaaagccattggcttggagatcaagctttgtatgttggccaaagcccgagagagtgcctcagctaaaataaaggaggaggaagctgctaaggactagttctgccctcccgtcacccctgtttctggcaccaggaatccccaacatgcactgatgttgtgtttttaacatgtcaatctgtccgttcacatgtgtggtacatggtgtttgtggccttggctgacatgaagctgttgtgtgaggttcgcttatcaactaatgatttagtgatcaaattgtgcagtactttgtgcattctggattttaaaagttttttattatgcattatatcaaatctaccactgtatgagtggaaattaagactttatgtagtttttatatgttgtaatatttcttcaaataaatctctcctataaacc

SEQ ID NO: 48523 - protein, 181 aa, Artificial Sequence
  derived and/or modified sequence
MVPPPPGEESQTVILPPGWQSYLSPQGRRYYVNTTTNETTWERPSSSPGIPASPGSHRSSLPPTVNGYHASGTPAHPPETAHMSVRKSTGDSQNLGSSSPSKKQSKENTITELERLEVERVEMIRQHLCQYTQLRHETDMFNQSTVEPVDQLLRKVDPAKDRELWVREHKTGNIRPVDMEI

SEQ ID NO: 48524 - protein, 125 aa, Artificial Sequence
  derived and/or modified sequence
MKTQQLEIKLSNKTEEDIKKARRKSTQAGDDLMRCVDLYNQAQSKWFEEMVTTTLELERLEVERVEMIRQHLCQYTQLRHETDMFNQSTVEPVDQLLRKVDPAKDRELWVREHKTGNIRPVDMEI

SEQ ID NO: 48525 - DNA, 546 bp, Artificial Sequence
  derived and/or modified sequence
atggtgcctccacccccaggggaggaatctcagactgttatcttacctcccggctggcagagctacttgagtccacaggggagacgctattacgtgaacaccactacaaacgagactacatgggagaggccctcttcctcaccgggtatacccgccagccctgggtctcacagatcaagtctgccacccactgtgaatggctaccatgcttccggaacacctgctcatccccctgagacagctcacatgtccgtgaggaagagcacaggagactcccagaacctggggagcagtagcccatcaaagaagcagagtaaggaaaacacaatcactgaactggaaaggctggaggtcgaacgcgtcgagatgatccgccagcacctgtgccagtatactcaactgaggcacgagaccgatatgttcaatcagtccactgtggagcctgtcgaccagttacttcgtaaggtggacccggccaaggatagagaactctgggtcagggagcataagaccggaaatattcggcccgtagacatggaaatctag

SEQ ID NO: 48526 - DNA, 546 bp, Artificial Sequence
  derived and/or modified sequence
atggtgcccccacctcctggagaggagagccagaccgtcatcctgcccccaggctggcagagctacctgagcccccagggccgccgctactacgtgaacaccaccaccaatgagaccacctgggagcggcccagcagcagccctggcatcccagccagccctggcagccacaggagcagcctgccccccaccgtgaatggctaccacgccagcggcaccccagcccaccccccagagacagcccacatgtctgtgaggaagagcactggagacagccagaacctgggcagcagcagccccagcaagaagcagagcaaagaaaacaccatcacagagctggagcggctggaggtggagcgggtggagatgatccggcagcacctgtgccagtacacccagctgcggcatgaaacagacatgttcaaccagagcacagtggagcctgtggaccagctgctgaggaaggtggaccctgccaaggaccgggagctgtgggtgcgggagcacaagacaggcaacatccggcctgtggacatggagatctag

SEQ ID NO: 48527 - DNA, 546 bp, Artificial Sequence
  derived and/or modified sequence
atggtgccccccccccccggcgaggagagccagaccgtgatcctgccccctgggtggcaaagttacctgtccccacaaggacgccgatattacgtgaacactacgacaaacgaaactacctgggagaggccaagtagcagcccgggtattcccgcctctcccgggagccatcgctcatcgctgcctccaactgtcaacgggtatcacgcgagtgggacgcccgcgcaccctcccgaaactgcacatatgagcgtccgtaaatctacaggtgattctcagaacctgggcagcagtagtcctagtaaaaagcagtctaaggagaacaccattacggaactggaacgcttagaagtcgaaagagtggagatgattcgacaacacttgtgccagtacactcagctgcgacacgagactgatatgttcaatcagtccaccgtagaacctgttgatcagttgctgaggaaggtcgaccccgcaaaagatcgcgagctgtgggtccgcgagcataaaacaggcaacatacgtcctgtggatatggagatatag

SEQ ID NO: 48528 - DNA, 546 bp, Artificial Sequence
  derived and/or modified sequence
atggttcctccaccaccgggagaagagagtcaaacagtcattcttcctcccggttggcaatcctacctgtcccctcagggccgaagatactatgtcaatactacgaccaacgagacaacatgggaacgcccttcttcaagtccaggtattccggcttcccctggttcacatagaagctcactccctcctaccgtaaacggctaccacgcgagtggaacacctgcacaccctccagagacagcccatatgtctgtcagaaaatccacaggcgactctcaaaacctcggctccagttctccctccaaaaagcagtcaaaggagaatacaattacagagttagagagactcgaggtggaacgggtagagatgatacgccagcatctctgtcaatacactcagctgcgacacgagaccgatatgtttaaccaatcaacagtggaaccggtggatcagctactccgcaaggtggaccctgccaaggaccgcgagctgtgggtgcgtgagcacaaaacaggtaacatccggccagtggatatggagatttag

SEQ ID NO: 48529 - DNA, 546 bp, Artificial Sequence
  derived and/or modified sequence
atggtgccccccccccccggcgaggagagccagaccgtgatcctgccccccggctggcagagctacctgagcccccagggcagaagatactacgtgaacaccaccaccaacgagaccacctgggagagacccagcagcagccccggcatccccgccagccccggcagccacagaagcagcctgccccccaccgtgaacggctaccacgccagcggcacccccgcccacccccccgagaccgcccacatgagcgtgagaaagagcaccggcgacagccagaacctgggcagcagcagccccagcaagaagcagagcaaggagaacaccatcaccgagctggagagactggaggtggagagagtggagatgatcagacagcacctgtgccagtacacccagctgagacacgagaccgacatgttcaaccagagcaccgtggagcccgtggaccagctgctgagaaaggtggaccccgccaaggacagagagctgtgggtgagagagcacaagaccggcaacatcagacccgtggacatggagatctag

SEQ ID NO: 48530 - protein, 331 aa, Artificial Sequence
  derived and/or modified sequence
MSSTPHDPFYSSPFGPFYRRHTPYMVQPEYRIYEMNKRLQSRTEDSDNLWWDAFATEFFEDDATLTLSFCLEDGPKRYTIGRTLIPRYFSTVFEGGVTDLYYILKHSKESYHNSSITVDCDQCTMVTQHGKPMFTKVCTEGRLILEFTFDDLMRIKTWHFTIRQYRELVPRSILAMHAQDPQVLDQLSKNITRMGLTNFTLNYLRLCVILEPMQELMSRHKTYNLSPRDCLKTCLFQKWQRMVAPPAEPTRQPTTKRRKRKNSTSSTSNSSAGNNANSTGSKKKTTAANLSLSSQVPGLGAIPNCSLNPGRDGDLCHSTAVTPSGQFKEKH

SEQ ID NO: 48531 - DNA, 996 bp, Artificial Sequence
  derived and/or modified sequence
atgtccagtacgccccacgaccctttctattcttctcctttcggacctttttaccggagacacaccccctacatggtccagcccgagtacaggatctatgaaatgaacaagcgcctgcaaagtagaaccgaggatagtgataatctttggtgggacgcatttgcgactgagtttttcgaagatgatgccactctcacactgagtttttgcctggaagatggcccaaaacgttacacgataggacgaaccctgattcctcggtactttagtaccgtgttcgagggtggtgtaaccgatttatactacatccttaagcattccaaagagagctaccataattcctccatcaccgtggattgcgaccagtgtactatggtcacacagcacggtaaaccaatgtttaccaaggtatgcacagaggggcgcctaatcttagagtttacattcgatgatctgatgaggataaagacatggcacttcacaatccggcagtatcgggagctggtcccccgttcaatactggctatgcacgctcaagatccccaggttctggatcagctctcaaagaacatcacacgcatgggactcaccaactttacattgaattacctgagattgtgtgtgattctggaacccatgcaagagcttatgagccgacataaaacttacaatctcagtccgcgcgattgtctgaagacatgtttattccagaagtggcagagaatggtggccccacctgccgaaccgacacgccagcctacaacaaagcgccgcaaaagaaagaactcaaccagttcgacttctaacagctccgccggcaacaatgccaactccactggctctaaaaaaaagactaccgccgctaatctgtcgctgtctagccaggtacccggtctcggcgccatcccgaactgttccctgaacccaggtcgcgatggggacctctgtcacagcacagcagtgaccccatccgggcaatttaaggagaaacactag

SEQ ID NO: 48532 - DNA, 996 bp, Artificial Sequence
  derived and/or modified sequence
atgagcagcacccctcatgaccccttctacagcagccccttcggccccttctacagaagacacaccccctacatggtgcagcctgagtaccgcatctatgagatgaacaagaggctgcagagcaggacagaggacagcgacaacctgtggtgggatgcctttgccacagagttctttgaagatgatgccaccctgaccctgtccttctgcctggaggatggccccaagcgctacaccatcggccgcaccctcatcccccgctacttcagcacagtgtttgaaggaggagtgacagacctgtactacatcctgaagcacagcaaggagagctaccacaacagcagcatcaccgtggactgtgaccagtgcaccatggtgacccagcacggcaagcccatgttcaccaaggtgtgcacagagggccgcctcatcctggagttcacctttgatgacctgatgaggatcaagacctggcacttcaccatccggcagtaccgggagctggtgcccaggagcatcctggccatgcacgcccaggacccccaggtgctggaccagctgagcaagaacatcaccaggatgggcctgaccaacttcaccctgaactacctgcggctgtgtgtgatcctggagcccatgcaggagctgatgagccgccacaagacctacaacctgagcccccgggactgcctgaagacctgcctcttccagaagtggcagaggatggtggcccctcctgctgagcccacccggcagcccaccaccaagaggaggaagaggaagaacagcaccagcagcaccagcaacagcagcgctggcaacaatgccaacagcacaggcagcaagaagaagaccacagctgccaacctgagcctgagcagccaggtgcccggcctgggcgccatccccaactgcagcctgaaccctggaagagatggagacctgtgccacagcacagctgtgacccccagcggccagttcaaggagaagcactag

SEQ ID NO: 48533 - DNA, 2476 bp, Artificial Sequence
  derived and/or modified sequence
gtgagcgtgtgtgcgtgcgtctactttgtactgggaagaacacagcccatgtgctctgcatggacgttactgatactctgtttagcttgattttcgaaaagcaggcaagatgtccagcacaccacatgaccccttctattcttctcctttcggcccattttataggaggcatacaccatacatggtacagccagagtaccgaatctatgagatgaacaagagactgcagtctcgcacagaggatagtgacaacctctggtgggacgcctttgccactgaattttttgaagatgacgccacattaaccctttcattttgtttggaagatggaccaaagcgatacactatcggcaggaccctcatcccccgttactttagcactgtgtttgaaggaggggtgaccgacctgtattacattctcaaacactcgaaagagtcataccacaactcatccatcacggtggactgcgaccagtgtaccatggtcacccagcacgggaagcccatgtttaccaaggtatgtacagaaggcagactgatcttggagttcacctttgatgatctcatgagaatcaaaacatggcactttaccattagacaataccgagagttagtcccgagaagcatcctagccatgcatgcacaagatcctcaggtcctggatcagctgtccaaaaacatcaccaggatggggctaacaaacttcaccctcaactacctcaggttgtgtgtaatattggagccaatgcaggaactgatgtcgagacataaaacttacaacctcagtccccgagactgcctgaagacctgcttgtttcagaagtggcagaggatggtggctccgccagcagaacccacaaggcaaccaacaaccaaacggagaaaaaggaaaaattccaccagcagcacttccaacagcagcgctgggaacaatgcaaacagcactggcagcaagaagaagaccacagctgcaaacctgagtctgtccagtcaggtacctgggctaggagcgatcccgaactgcagcctcaaccctgggagggatggagacctgtgtcattcaacagcagtgaccccttctggccaatttaaggagaagcattgaggggccctgaaaggagtcacttccagtcctcctcagaggatgtgatggtggtaggagagccaactctgatgggaggtgagtttggggacgaggacgaaaggctaatcactagattagaaaacacgcaatatgatgcggccaacggcatggacgacgaggaggacttcaacaattcacccgcgctggggaacaacagcccgtggaacagtaaacctcccgccactcaagagaccaaatcagaaaaccccccaccccaggcttcccaataagatgatcggcaccagaatccactgtcaataggcccgtgggtgatcattacaattgcaaatctttacttacaggagaggaaacagaagagataaaaacttttccatgcaaatatctatttctaaaccacaatgatctgattttctttcttctttctttttttctaattgagaggattattcccagtaagcttccatgaccctttcttggaggccttcacaggtaatacagatactggcactgattgtaattaaaatgagagaaaactctagcgcatcttctggcacggttttaacaacgtgtttgtgttgaatttcctttttatgcatcaaacgaaggccatattgtccataaatgctcagtgctcaggatctcattaatatgccgaacctaactacagatgactttttaatattgtaaaatattttctgctttttgacttgcatctgagagtttcttgtttcagtaaaaaaagaaaagacaaaaaaatcagctttggaaagtaatttaaatgtaccttattttttttttctttatgttttctttcattgggcaacagctaagagggcccagcaaggtaatttatggttgagctgatgtcaattggttcttgtcttgagtcgactcaatttagcccaagtgctgaaacaagaaatgtcatttttttcatcaaagacaccagggcagatttttaagtaaagaaagacaattggacccttaagaatttatgcatttgtaaagttgctgttgatccaaatattttcaagccatgtaatccattggttttgtgggcagtttaataaacctgaacctttgtgtgttttctaattgtacctgagttgaccatcctttctttttatagtatatttcttgtatgatattttgtaaagctctcacctggttcttttatggggacttttcgtttttgggcaactccagtgtatttatgtgaaactttataagagaattaatttttccatttgcatattaatatgttcctccacacatgtaaaggcacagtggctccgtgtgttaaaaaacagctgtattttatgtatgctttactgataagtgtgccaataataaactgtgttaatgaccaaa

SEQ ID NO: 48534 - DNA, 996 bp, Artificial Sequence
  derived and/or modified sequence
atgagcagcaccccccacgaccccttctacagcagccccttcggcccattttaccgccgccacaccccctatatggtacagccagagtatcggatctacgaaatgaataaacgcctgcagtcccgcaccgaggactctgataatctctggtgggatgctttcgctacggagttctttgaggatgacgccactttgacattgagcttttgcctggaagatgggccgaaacgttacacgatcggtaggaccctgatccccagatacttctccactgtcttcgaaggtggagttaccgacctgtattatatcctgaagcactctaaagaaagttatcacaatagtagtataaccgtggattgtgatcaatgcacaatggttacccagcacggaaaacccatgttcacgaaagtgtgtacggagggtagacttatcctggagtttacgtttgatgacctgatgagaatcaagacgtggcacttcacgataagacagtatcgcgagctagtcccccggagcatcctagccatgcacgcccaggacccgcaggtgctggatcagctatctaaaaacatcacccggatgggtctgactaatttcactctgaattatctgcgattgtgtgttattctggagcctatgcaggagctgatgtcaaggcacaagacctacaacctgtctccccgcgattgccttaagacttgtttgttccagaagtggcagcgcatggtggctcccccggctgagcccacccgccagcctacaacaaaaaggagaaagaggaagaatagtacatctagcacgagcaattctagtgccggcaacaacgcaaacagcactgggtcaaaaaaaaaaactacagccgctaacctgtctctcagttcccaggtccctggcctgggggctatccccaactgctcgctgaatcccgggagagatggggacttgtgtcattccacagccgtgacacccagtggacagttcaaggaaaaacactag

SEQ ID NO: 48535 - DNA, 996 bp, Artificial Sequence
  derived and/or modified sequence
atgagctccacaccgcacgatcccttttactccagtccattcggtccgttttacaggcgccacacgccatacatggtccagccagagtaccgcatctacgagatgaataagcggctgcaatctcgaactgaggacagcgataatctgtggtgggacgcatttgcaaccgagtttttcgaggatgacgccaccttgacactgagcttttgcctggaagatggccctaaacgatacacaatagggagaactctgatccctcggtatttttccaccgtttttgaagggggagttactgatctctactacattctgaagcattctaaggagagttaccataattcatctatcacagtggactgcgatcaatgcactatggttactcagcatggaaagccaatgtttacgaaggtatgcacagaggggaggttaatactggagttcacatttgacgatttgatgcggattaagacctggcattttaccatccggcaatatcgcgagctggttcccagatcgatcctggctatgcacgcccaagacccgcaggttctcgaccagctgtccaaaaacattactcgtatgggtctgactaattttactctaaattacttaaggctgtgtgtcattctcgagcctatgcaggagctgatgtcaaggcacaagacttacaatctatcccccagagactgtcttaaaacttgtctgttccagaagtggcagcggatggttgctccccctgccgaaccaacccgtcagccaactacgaagaggagaaagagaaagaactccacatcatcgaccagcaactcttcagcgggtaataacgccaacagcacaggaagcaagaaaaagacaacagcggcaaatctttcattgagctctcaggtgccagggctgggcgctattccaaactgtagcttgaacccgggacgagatggggacctatgtcacagcaccgctgtgacaccgagcggacagtttaaagagaagcactag

SEQ ID NO: 48536 - DNA, 996 bp, Artificial Sequence
  derived and/or modified sequence
atgagcagcaccccccacgaccccttctacagcagccccttcggccccttctacagaagacacaccccctacatggtgcagcccgagtacagaatctacgagatgaacaagagactgcagagcagaaccgaggacagcgacaacctgtggtgggacgccttcgccaccgagttcttcgaggacgacgccaccctgaccctgagcttctgcctggaggacggccccaagagatacaccatcggcagaaccctgatccccagatacttcagcaccgtgttcgagggcggcgtgaccgacctgtactacatcctgaagcacagcaaggagagctaccacaacagcagcatcaccgtggactgcgaccagtgcaccatggtgacccagcacggcaagcccatgttcaccaaggtgtgcaccgagggcagactgatcctggagttcaccttcgacgacctgatgagaatcaagacctggcacttcaccatcagacagtacagagagctggtgcccagaagcatcctggccatgcacgcccaggacccccaggtgctggaccagctgagcaagaacatcaccagaatgggcctgaccaacttcaccctgaactacctgagactgtgcgtgatcctggagcccatgcaggagctgatgagcagacacaagacctacaacctgagccccagagactgcctgaagacctgcctgttccagaagtggcagagaatggtggccccccccgccgagcccaccagacagcccaccaccaagagaagaaagagaaagaacagcaccagcagcaccagcaacagcagcgccggcaacaacgccaacagcaccggcagcaagaagaagaccaccgccgccaacctgagcctgagcagccaggtgcccggcctgggcgccatccccaactgcagcctgaaccccggcagagacggcgacctgtgccacagcaccgccgtgacccccagcggccagttcaaggagaagcactag

SEQ ID NO: 48537 - protein, 706 aa, Artificial Sequence
  derived and/or modified sequence
MASPADSCIQFTRHASDVLLNLNRLRSRDILTDVVIVVSREQFRAHKTVLMACSGLFYSIFTDQLKCNLSVINLDPEINPEGFCILLDFMYTSRLNLREGNIMAVMATAMYLQMEHVVDTCRKFIKASEAEMVSAIKPPREEFLNSRMLMPQDIMAYRGREVVENNLPLRSAPGCESRAFAPSLYSGLSTPPASYSMYSHLPVSSLLFSDEEFRDVRMPVANPFPKERALPCDSARPVPGEYSRPTLEVSPNVCHSNIYSPKETIPEEARSDMHYSVAEGLKPAAPSARNAPYFPCDKASKEEERPSSEDEIALHFEPPNAPLNRKGLVSPQSPQKSDCQPNSPTESCSSKNACILQASGSPPAKSPTDPKACNWKKYKFIVLNSLNQNAKPEGPEQAELGRLSPRAYTAPPACQPPMEPENLDLQSPTKLSASGEDSTIPQASRLNNIVNRSMTGSPRSSSESHSPLYMHPPKCTSCGSQSPQHAEMCLHTAGPTFPEEMGETQSEYSDSSCENGAFFCNECDCRFSEEASLKRHTLQTHSDKPYKCDRCQASFRYKGNLASHKTVHTGEKPYRCNICGAQFNRPANLKTHTRIHSGEKPYKCETCGARFVQVAHLRAHVLIHTGEKPYPCEICGTRFRHLQTLKSHLRIHTGEKPYHCEKCNLHFRHKSQLRLHLRQKHGAITNTKVQYRVSATDLPPELPKAC

SEQ ID NO: 48538 - DNA, 2121 bp, Artificial Sequence
  derived and/or modified sequence
atggcttcaccagctgattcatgcatccagttcacccgccacgcaagtgacgtgttgctgaacctgaatcggctgagaagccgggacattctcactgacgtggtcattgtcgtttcacgagagcagtttagagctcacaagactgtcctgatggcttgttctggtctgttctacagcattttcacagaccagctgaaatgtaatctttctgtcatcaacctggatcccgagatcaaccctgagggcttctgtatacttttagacttcatgtatacaagccgcctgaacctgcgagaggggaacattatggcagttatggcgacagccatgtatttacagatggagcatgtggtcgatacctgcagaaaattcatcaaagcctctgaagccgaaatggtgtccgccatcaaacccccgagagaggaatttctgaattcccgtatgcttatgccccaagatataatggcttataggggtagagaggtcgtcgagaataacctgcccctccgtagtgcccccggctgtgaatcgagggctttcgctccaagcctgtatagtgggctctctacgccccctgcttcgtattctatgtacagccacctacccgtgtcatcactcctgtttagtgacgaggaatttcgagacgtcaggatgccagttgcgaacccattccctaaggagagggctctgccttgcgactcagccaggcctgtgcctggggagtacagccgccccactctggaagtcagccctaacgtctgccattccaacatctactctccaaaggaaacaattcccgaggaggcgagaagtgatatgcactactctgtcgccgaagggctgaagccagcagccccctcggcacgtaacgccccctacttcccttgcgacaaggcctctaaggaagaagaaaggcccagcagcgaggacgagattgctctacacttcgagccccccaacgctcctctgaataggaagggccttgtcagtccccagtctccacagaagtcggattgtcagcctaatagccccaccgaatcctgctcaagcaagaatgcctgtattctccaagcgtctgggagtccgcccgcgaaatcgcccacagaccccaaggcctgcaactggaagaaatataaattcatcgtgctgaattctctgaatcagaatgctaagcccgaagggcccgaacaggcagagcttggccgcctgtctccaagagcctataccgcgccccctgcttgtcagccacctatggagccagagaacctcgaccttcagtcccctaccaaattatcagcgtccggcgaagacagcactatacctcaagcttctaggctgaacaatattgtgaatcgttccatgacgggatcgccaaggtcctcaagcgagagtcattcacctctttacatgcacccccccaagtgtacaagttgcggctcacagtctcctcaacatgcagagatgtgccttcataccgcaggcccgacgttccccgaagagatgggtgagacccagagcgagtactctgactcaagctgtgagaatggcgcatttttctgcaacgagtgcgattgccgattttccgaggaggcatctctgaagcgacacaccctccaaacccatagcgacaagccatacaagtgcgaccggtgccaggcgagctttcggtacaagggcaatctggccagtcacaagacggtgcatacaggcgagaagccctacaggtgcaatatatgcggagcacagttcaataggcccgccaacttgaaaacacataccagaatccactccggtgagaaaccatataagtgcgagacctgcggggcacggtttgtgcaggtcgcacatctgcgggctcacgttctgattcacaccggcgaaaaaccctatccgtgcgaaatctgtggcacaaggttcaggcaccttcagacactgaagtctcatctgcgcatccacaccggcgaaaagccttatcactgtgagaagtgcaaccttcactttagacacaaatcccagctcaggctgcatctgcggcaaaagcacggggctattaccaacaccaaggttcagtaccgcgtaagcgccactgatcttccccccgagcttcccaaggcctgttag

SEQ ID NO: 48539 - DNA, 2121 bp, Artificial Sequence
  derived and/or modified sequence
atggccagccctgctgacagctgcatccagttcaccaggcatgccagtgatgtgctgctgaacctgaaccggctgcggagccgggacatcctgacagatgtggtgattgtggtgtcccgggagcagttccgggcccacaagacagtgctgatggcctgcagcggcctcttctacagcatcttcacagaccagctgaagtgcaacctgagcgtcatcaacctggaccctgagatcaaccctgagggcttctgcatcctgctggacttcatgtacaccagccggctgaacctgcgggagggcaacatcatggctgtgatggccacagccatgtacctgcagatggagcacgtggtggacacctgcaggaagttcatcaaggccagcgaggccgagatggtgtctgccatcaagccaccccgggaggagttcctgaacagcaggatgctgatgccccaggacatcatggcctaccggggccgggaggtggtggagaacaacctgcccctgcggagcgcccctggctgtgagagccgggcctttgcccccagcctgtacagcggcctgagcaccccaccagccagctacagcatgtacagccacctgcctgtgagcagcctgctcttcagtgatgaggagttcagagatgtgaggatgcctgtggccaaccccttccccaaggagcgggccctgccctgtgacagcgcccggcctgtgcctggagagtacagccggcccaccctggaggtgagccccaacgtgtgccacagcaacatctacagccccaaggagaccatccctgaggaggcccggagtgacatgcactacagcgtggccgagggcctgaagccagctgcccccagcgccagaaatgccccctacttcccctgtgacaaggccagcaaggaggaggagcggcccagcagtgaagatgagatcgccctgcactttgagcccccaaatgcccccctgaacaggaagggcctggtgagcccccagagcccccagaagagtgactgccagcccaacagccccacagagagctgcagcagcaagaatgcctgcatcctgcaggccagcggcagccccccagccaagagccccacagaccccaaggcctgcaactggaagaagtacaagttcatcgtgctgaacagcctgaaccagaatgccaagccagagggccctgagcaggccgagctgggccgcctgagcccccgggcctacacagcccccccagcctgccagccccccatggagcctgagaacctggacctgcagagccccaccaagctgagcgccagcggggaggacagcaccatcccccaggccagccggctgaacaacatcgtgaacagatccatgacaggcagccccaggagcagcagcgagagccacagccccctgtacatgcacccccccaagtgcaccagctgtggcagccagagcccccagcacgccgagatgtgcctgcacacagctggccccaccttccctgaggagatgggagagacccagagcgagtacagcgacagcagctgtgaaaatggagccttcttctgcaatgaatgtgactgccgcttcagcgaggaggccagcctgaagaggcacaccctgcagacccacagcgacaagccctacaagtgtgaccgctgccaggccagcttccgctacaagggcaacctggccagccacaagacagtgcacactggagagaagccctaccgctgcaacatctgtggggcccagttcaacagacctgccaacctgaagacccacacccgcatccacagcggggagaagccctacaagtgtgagacctgtggggccaggtttgtgcaggtggcccacctgcgggcccacgtgctgatccacactggagagaagccctacccctgtgagatctgtggcacccgcttccgccacctgcagaccctgaagagccacctgcgcatccacactggagagaagccctaccactgtgagaagtgcaacctgcacttccgccacaagagccagctgcggctgcacctgcggcagaagcatggagccatcaccaacaccaaggtgcagtacagagtgtctgccacagacctgcccccagagctgcccaaggcctgctag

SEQ ID NO: 48540 - DNA, 2121 bp, Artificial Sequence
  derived and/or modified sequence
atggccagccccgccgacagctgcatccagttcacccggcacgcctccgacgttctgttgaatctgaatagactcagaagtagagatatactcaccgacgtagtcatagtcgtatcacgcgaacagttccgagcgcacaaaactgtactgatggcgtgcagcggactgttttactccatattcactgatcagttaaagtgcaatcttagcgtgattaatctggacccagagatcaaccccgaaggattctgtatcctcctcgattttatgtacacatctaggctgaatttacgggaaggcaacataatggccgttatggcaaccgccatgtatctgcagatggaacatgtggtcgatacctgcaggaaattcatcaaagcatccgaagccgaaatggtgagcgcgatcaagccaccacgggaagaattcctgaattctagaatgctgatgccacaggatatcatggcttatcgtgggcgggaggtcgtcgaaaataacctgcccctgcgtagtgctcccggatgcgaatctagagcttttgctccatcactttattccggcctctctaccccccctgctagctactcaatgtatagtcacctgcccgtgagctccctgttgttctcagacgaggaatttcgcgacgtcagaatgccggtagctaatccttttcctaaggagagagccctgccgtgtgattctgcacgacctgtgccaggcgagtattctagacctactttggaagtctccccgaatgtgtgccacagcaatatctattctccaaaagagacaatccccgaagaagcgagaagcgacatgcattattctgtcgcagaagggctgaagccagctgctcctagcgcccggaatgcaccttatttcccttgcgacaaagcatctaaagaggaagaacgaccatcttccgaagacgaaattgcccttcactttgagccaccaaatgcacccttgaatcgcaaggggctggtgagccctcaatcccctcagaagagcgattgccagccaaacagcccgactgagagctgcagtagtaagaacgcctgtattctccaggcctccgggtccccccccgctaagtcgcccactgaccctaaagcctgcaattggaagaaatacaagttcattgtcctgaattcgctgaatcagaacgcaaagccggagggccccgaacaggctgagctcggcagactaagcccaagagcatacacggcaccaccagcttgtcagccccccatggagccggagaacctggacctgcagagtcctactaaattgagcgcctctggcgaggacagcactataccacaggccagccggctcaacaacatcgtgaataggagcatgaccggttcccctcgctcctcctccgagtcacattctcccctgtacatgcatccacctaagtgcacaagctgcggctcacagtctccacagcacgctgaaatgtgtctgcacacagccggcccaaccttccccgaggagatgggtgaaacacagtccgaatattctgactcttcttgtgaaaatggggcattcttttgtaacgagtgtgattgtagattcagtgaagaggctagtttaaaacggcacacactccagacccattctgataagccttacaagtgcgatcggtgccaggcctcgtttaggtataagggaaatttggccagccataagactgttcacacgggcgagaaaccgtacagatgcaacatctgcggagctcagtttaaccggcctgctaatctgaaaactcacacccggatccactccggtgagaagccctacaaatgtgagacttgcggagcgagatttgtccaggtggcccatcttcgtgcccacgtgctaatccacactggcgaaaagccctacccctgtgagatttgcgggacacgatttaggcacctgcagaccctgaagagtcaccttcgcattcacacaggcgaaaagccgtaccactgcgagaagtgcaacctgcatttccgtcataagtcccagttgcggctccatttacgtcagaaacatggggccatcaccaataccaaagtacagtatcgagtcagcgctaccgatctgccgccagagctgcccaaagcctgttag

SEQ ID NO: 48541 - DNA, 2121 bp, Artificial Sequence
  derived and/or modified sequence
atggcctctccagcagattcttgcattcagttcacgcggcatgccagcgacgtactgttgaatctcaatcggctccgctccagagacatactaactgacgttgtcattgtagtgtctcgggagcaattcagagcacataaaaccgtcctaatggcctgctcgggtctgttctactcaatttttaccgaccagttaaaatgtaacctgagcgtgattaacctggacccggaaatcaacccagagggtttctgcatcctgcttgatttcatgtacacttcccgacttaatcttcgggagggaaatattatggcggttatggccaccgcgatgtacctgcaaatggaacatgtggtggatacatgtcggaaattcataaaggcaagtgaggccgagatggtgtccgctatcaaacctcccagggaagaatttctaaactctcggatgctgatgcctcaggacattatggcatatcggggtagagaggtggtcgagaataacctgcccctccgctccgccccaggatgcgagagcagagcctttgctcccagtctgtactcgggcctgtccactccccctgcttcttattcaatgtactcccatcttcccgtaagttctctactctttagcgacgaagagttccgcgacgttagaatgcctgtggcaaaccctttcccaaaagaacgagccctgccctgcgactcggctagaccagtgccaggtgagtactcccggcctaccctggaagttagtcccaacgtttgccactctaatatctacagccctaaagaaaccattccagaggaagctcggagcgacatgcactattcagttgctgagggcctcaagcccgcagcgccttcagcgcgtaatgctccttactttccctgcgacaaagcttccaaggaggaggagcgaccctctagtgaagacgaaattgcccttcactttgaacctcccaacgcgcctctgaacaggaaaggattggtatctcctcaatctccccagaaatccgattgccagccaaattcgcccactgaaagttgttcttcaaaaaatgcttgcatactccaggcctcagggtcaccccctgctaagagccccacagatcctaaggcatgtaactggaaaaaatataaattcatcgtactcaactcactgaatcaaaacgcaaaacctgaaggacccgaacaagccgagctgggtcgcctctctcctagagcatacacagcccctcccgcatgtcaacccccaatggaacccgagaacctagacctacagtcccccaccaaactgagtgcctccggggaggactctaccattcctcaggctagtcgtcttaataacattgtaaatcgctcaatgactgggagtcccagaagttcctctgagagtcactcacccctgtacatgcatccacccaaatgcacatcttgtggctcacagtctcctcagcacgccgagatgtgtttacataccgctggaccaaccttccccgaagagatgggagagactcagagcgaatatagtgacagttcctgcgagaacggagctttcttctgcaatgagtgcgattgccggttctctgaggaggcttctttaaagcgacacacattgcagactcactccgataaaccttacaagtgtgaccgctgccaggcatcattccgttataagggaaatcttgcatctcataaaaccgtccatacgggtgaaaagccataccggtgtaacatatgcggggctcagttcaaccgccctgctaatctgaaaacacacacacggatccactcaggggaaaaaccctataagtgcgaaacgtgtggcgcaagattcgtacaagtggctcatctgcgcgctcatgtgcttatccacaccggggaaaagccatatccctgcgagatttgcggcacccggttcagacatcttcaaaccctcaaatcccacttgcggattcacactggggagaagccttaccactgtgagaaatgcaatttgcattttcggcacaaatctcagctccggctacaccttcgacagaagcatggggcaatcactaatacaaaggttcagtacagggttagcgcgactgatctgccccctgagctgcccaaagcctgttag

SEQ ID NO: 48542 - DNA, 2710 bp, Artificial Sequence
  derived and/or modified sequence
gccacttgtcatggtgaaatggcaaatctgggcttcctgtggttccagaagcctgcgactggaaatccacaagcgagctggtggttgaagctggttaaagaacagcctaggtattccagaagtgtttgaggatcccttccatgaaggaagagaggaaagtttttaagtaaacctcccactcccatgtgtcttcagctttcttttgcaaaggagaaaatccttgaagtttggtaaagaccgagttagtctatctctctttgcctatctcgagttgggctggggagaggaggagataggttcttttgtctttttctgtcttctcccttccccacttccttccctccagtccccactcactcacatgcacacactaaccttggagccgatgggattgagtgactggcacttgggaccacagagaaatgtcagagtgtttggttacagactcaaggaaacctctcattttagagtgctcatttggttttgagcaaaattttggactgtgaagcaaggcattggtgaagacaaaatggcctcgccggctgacagctgtatccagttcacccgccatgccagtgatgttcttctcaaccttaatcgtctccggagtcgagacatcttgactgatgttgtcattgttgtgagccgtgagcagtttagagcccataaaacggtcctcatggcctgcagtggcctgttctatagcatctttacagaccagttgaaatgcaaccttagtgtgatcaatctagatcctgagatcaaccctgagggattctgcatcctcctggacttcatgtacacatctcggctcaatttgcgggagggcaacatcatggctgtgatggccacggctatgtacctgcagatggagcatgttgtggacacttgccggaagtttattaaggccagtgaagcagagatggtttctgccatcaagcctcctcgtgaagagttcctcaacagccggatgctgatgccccaagacatcatggcctatcggggtcgtgaggtggtggagaacaacctgccactgaggagcgcccctgggtgtgagagcagagcctttgcccccagcctgtacagtggcctgtccacaccgccagcctcttattccatgtacagccacctccctgtcagcagcctcctcttctccgatgaggagtttcgggatgtccggatgcctgtggccaaccccttccccaaggagcgggcactcccatgtgatagtgccaggccagtccctggtgagtacagccggccgactttggaggtgtcccccaatgtgtgccacagcaatatctattcacccaaggaaacaatcccagaagaggcacgaagtgatatgcactacagtgtggctgagggcctcaaacctgctgccccctcagcccgaaatgccccctacttcccttgtgacaaggccagcaaagaagaagagagaccctcctcggaagatgagattgccctgcatttcgagccccccaatgcacccctgaaccggaagggtctggttagtccacagagcccccagaaatctgactgccagcccaactcgcccacagagtcctgcagcagtaagaatgcctgcatcctccaggcttctggctcccctccagccaagagccccactgaccccaaagcctgcaactggaagaaatacaagttcatcgtgctcaacagcctcaaccagaatgccaaaccagaggggcctgagcaggctgagctgggccgcctttccccacgagcctacacggccccacctgcctgccagccacccatggagcctgagaaccttgacctccagtccccaaccaagctgagtgccagcggggaggactccaccatcccacaagccagccggctcaataacatcgttaacaggtccatgacgggctctccccgcagcagcagcgagagccactcaccactctacatgcaccccccgaagtgcacgtcctgcggctctcagtccccacagcatgcagagatgtgcctccacaccgctggccccacgttccctgaggagatgggagagacccagtctgagtactcagattctagctgtgagaacggggccttcttctgcaatgagtgtgactgccgcttctctgaggaggcctcactcaagaggcacacgctgcagacccacagtgacaaaccctacaagtgtgaccgctgccaggcctccttccgctacaagggcaacctcgccagccacaagaccgtccataccggtgagaaaccctatcgttgcaacatctgtggggcccagttcaaccggccagccaacctgaaaacccacactcgaattcactctggagagaagccctacaaatgcgaaacctgcggagccagatttgtacaggtggcccacctccgtgcccatgtgcttatccacactggtgagaagccctatccctgtgaaatctgtggcacccgtttccggcaccttcagactctgaagagccacctgcgaatccacacaggagagaaaccttaccattgtgagaagtgtaacctgcatttccgtcacaaaagccagctgcgacttcacttgcgccagaagcatggcgccatcaccaacaccaaggtgcaataccgcgtgtcagccactgacctgcctccggagctccccaaagcctgctgaagcatggagtgttgatgctttcgtctccagccccttctcagaatctacccaaaggatact

SEQ ID NO: 48543 - DNA, 3569 bp, Artificial Sequence
  derived and/or modified sequence
ataccatcgtcttgggcccggggagggagagccaccttcaggcccctcgagcctcgaaccggaacctccaaatccgagacgctctgcttatgaggacctcgaaatatgccggccagtgaaaaaatcttgtggctttgagggcttttggttggccaggggcagtaaaaatctcggagagctgacaccaagtcctcccctgccacgtagcagtggtaaagtccgaagctcaaattccgagaattgagctctgttgattcttagaactggggttcttagaagtggtgatgcaagaagtttctaggaaaggccggacaccaggttttgagcaaaattttggactgtgaagcaaggcattggtgaagacaaaatggcctcgccggctgacagctgtatccagttcacccgccatgccagtgatgttcttctcaaccttaatcgtctccggagtcgagacatcttgactgatgttgtcattgttgtgagccgtgagcagtttagagcccataaaacggtcctcatggcctgcagtggcctgttctatagcatctttacagaccagttgaaatgcaaccttagtgtgatcaatctagatcctgagatcaaccctgagggattctgcatcctcctggacttcatgtacacatctcggctcaatttgcgggagggcaacatcatggctgtgatggccacggctatgtacctgcagatggagcatgttgtggacacttgccggaagtttattaaggccagtgaagcagagatggtttctgccatcaagcctcctcgtgaagagttcctcaacagccggatgctgatgccccaagacatcatggcctatcggggtcgtgaggtggtggagaacaacctgccactgaggagcgcccctgggtgtgagagcagagcctttgcccccagcctgtacagtggcctgtccacaccgccagcctcttattccatgtacagccacctccctgtcagcagcctcctcttctccgatgaggagtttcgggatgtccggatgcctgtggccaaccccttccccaaggagcgggcactcccatgtgatagtgccaggccagtccctggtgagtacagccggccgactttggaggtgtcccccaatgtgtgccacagcaatatctattcacccaaggaaacaatcccagaagaggcacgaagtgatatgcactacagtgtggctgagggcctcaaacctgctgccccctcagcccgaaatgccccctacttcccttgtgacaaggccagcaaagaagaagagagaccctcctcggaagatgagattgccctgcatttcgagccccccaatgcacccctgaaccggaagggtctggttagtccacagagcccccagaaatctgactgccagcccaactcgcccacagagtcctgcagcagtaagaatgcctgcatcctccaggcttctggctcccctccagccaagagccccactgaccccaaagcctgcaactggaagaaatacaagttcatcgtgctcaacagcctcaaccagaatgccaaaccagaggggcctgagcaggctgagctgggccgcctttccccacgagcctacacggccccacctgcctgccagccacccatggagcctgagaaccttgacctccagtccccaaccaagctgagtgccagcggggaggactccaccatcccacaagccagccggctcaataacatcgttaacaggtccatgacgggctctccccgcagcagcagcgagagccactcaccactctacatgcaccccccgaagtgcacgtcctgcggctctcagtccccacagcatgcagagatgtgcctccacaccgctggccccacgttccctgaggagatgggagagacccagtctgagtactcagattctagctgtgagaacggggccttcttctgcaatgagtgtgactgccgcttctctgaggaggcctcactcaagaggcacacgctgcagacccacagtgacaaaccctacaagtgtgaccgctgccaggcctccttccgctacaagggcaacctcgccagccacaagaccgtccataccggtgagaaaccctatcgttgcaacatctgtggggcccagttcaaccggccagccaacctgaaaacccacactcgaattcactctggagagaagccctacaaatgcgaaacctgcggagccagatttgtacaggtggcccacctccgtgcccatgtgcttatccacactggtgagaagccctatccctgtgaaatctgtggcacccgtttccggcaccttcagactctgaagagccacctgcgaatccacacaggagagaaaccttaccattgtgagaagtgtaacctgcatttccgtcacaaaagccagctgcgacttcacttgcgccagaagcatggcgccatcaccaacaccaaggtgcaataccgcgtgtcagccactgacctgcctccggagctccccaaagcctgctgaagcatggagtgttgatgctttcgtctccagccccttctcagaatctacccaaaggatactgtaacactttacaatgttcatcccatgatgtagtgcctctttcatccactagtgcaaatcatagctgggggttgggggtggtgggggtcggggcctgggggactgggagccgcagcagctccccctcccccactgccataaaacattaagaaaatcatattgcttcttctcctatgtgtaaggtgaaccatgtcagcaaaaagcaaaatcattttatatgtcaaagcaggggagtatgcaaaagttctgacttgactttagtctgcaaaatgaggaatgtatatgttttgtgggaacagatgtttcttttgtatgtaaatgtgcattcttttaaaagacaagacttcagtatgttgtcaaagagagggctttaatttttttaaccaaaggtgaaggaatatatggcagagttgtaaatatataaatatatatatatataaaataaatatatataaacctaaaaaagatatattaaaaatataaaactgcgttaaaggctcgattttgtatctgcaggcagacacggatctgagaatctttattgagaaagagcacttaagagaatattttaagtattgcatctgtataagtaagaaaatattttgtctaaaatgcctcagtgtatttgtatttttttgcaagtgaaggtttacaatttacaaagtgtgtattaaaaaaaacaaaaagaacaaaaaaatctgcagaaggaaaaatgtgtaattttgttctagttttcagtttgtatatacccgtacaacgtgtcctcacggtgccttttttcacggaagttttcaatgatgggcgagcgtgcaccatccctttttgaagtgtaggcagacacagggacttgaagttgttactaactaaactctctttgggaatgtttgtctcatcccattctgcgtcatgcttgtgttataactactccggagacagggtttggctgtgtctaaactgcattaccgcgttgtaaaatatagctgtacaaatataagaataaaatgttgaaaagtcaaactgg

SEQ ID NO: 48544 - DNA, 2121 bp, Artificial Sequence
  derived and/or modified sequence
atggccagccccgccgacagctgcatccagttcaccagacacgccagcgacgtgctgctgaacctgaacagactgagaagcagagacatcctgaccgacgtggtgatcgtggtgagcagagagcagttcagagcccacaagaccgtgctgatggcctgcagcggcctgttctacagcatcttcaccgaccagctgaagtgcaacctgagcgtgatcaacctggaccccgagatcaaccccgagggcttctgcatcctgctggacttcatgtacaccagcagactgaacctgagagagggcaacatcatggccgtgatggccaccgccatgtacctgcagatggagcacgtggtggacacctgcagaaagttcatcaaggccagcgaggccgagatggtgagcgccatcaagccccccagagaggagttcctgaacagcagaatgctgatgccccaggacatcatggcctacagaggcagagaggtggtggagaacaacctgcccctgagaagcgcccccggctgcgagagcagagccttcgcccccagcctgtacagcggcctgagcaccccccccgccagctacagcatgtacagccacctgcccgtgagcagcctgctgttcagcgacgaggagttcagagacgtgagaatgcccgtggccaaccccttccccaaggagagagccctgccctgcgacagcgccagacccgtgcccggcgagtacagcagacccaccctggaggtgagccccaacgtgtgccacagcaacatctacagccccaaggagaccatccccgaggaggccagaagcgacatgcactacagcgtggccgagggcctgaagcccgccgcccccagcgccagaaacgccccctacttcccctgcgacaaggccagcaaggaggaggagagacccagcagcgaggacgagatcgccctgcacttcgagccccccaacgcccccctgaacagaaagggcctggtgagcccccagagcccccagaagagcgactgccagcccaacagccccaccgagagctgcagcagcaagaacgcctgcatcctgcaggccagcggcagcccccccgccaagagccccaccgaccccaaggcctgcaactggaagaagtacaagttcatcgtgctgaacagcctgaaccagaacgccaagcccgagggccccgagcaggccgagctgggcagactgagccccagagcctacaccgccccccccgcctgccagccccccatggagcccgagaacctggacctgcagagccccaccaagctgagcgccagcggcgaggacagcaccatcccccaggccagcagactgaacaacatcgtgaacagaagcatgaccggcagccccagaagcagcagcgagagccacagccccctgtacatgcacccccccaagtgcaccagctgcggcagccagagcccccagcacgccgagatgtgcctgcacaccgccggccccaccttccccgaggagatgggcgagacccagagcgagtacagcgacagcagctgcgagaacggcgccttcttctgcaacgagtgcgactgcagattcagcgaggaggccagcctgaagagacacaccctgcagacccacagcgacaagccctacaagtgcgacagatgccaggccagcttcagatacaagggcaacctggccagccacaagaccgtgcacaccggcgagaagccctacagatgcaacatctgcggcgcccagttcaacagacccgccaacctgaagacccacaccagaatccacagcggcgagaagccctacaagtgcgagacctgcggcgccagattcgtgcaggtggcccacctgagagcccacgtgctgatccacaccggcgagaagccctacccctgcgagatctgcggcaccagattcagacacctgcagaccctgaagagccacctgagaatccacaccggcgagaagccctaccactgcgagaagtgcaacctgcacttcagacacaagagccagctgagactgcacctgagacagaagcacggcgccatcaccaacaccaaggtgcagtacagagtgagcgccaccgacctgccccccgagctgcccaaggcctgctag

SEQ ID NO: 48545 - DNA, 2121 bp, Artificial Sequence
  derived and/or modified sequence
atggcaagcccagctgacagttgcatccagttcacccgccatgctagcgacgtgttgctcaatctcaataggctgaggtctagggacattttgacggatgtcgtgatcgttgtgagccgggagcagttcagagctcataagactgtgctgatggcatgctcaggactcttttatagcatctttactgaccagctcaagtgcaatctgtccgttatcaatctggacccagagattaaccctgagggattttgcatcctgctggatttcatgtacacgtctaggctgaacctaagggaaggcaatatcatggcagtcatggccactgctatgtatctgcaaatggagcatgtagtggacacgtgtcgcaaatttatcaaggccagtgaagcagagatggtctccgctatcaagcccccacgggaggagtttttaaatagtcgaatgttaatgccgcaggacatcatggcgtaccgaggcagggaagttgtcgaaaacaatctgcctctgcgatctgctcctggctgcgaatctagggctttcgccccatccctctattctggactctcgacaccacccgctagctactctatgtatagccatctccccgtgtcttcactactcttctccgacgaagagttccgcgacgtgagaatgccagtggcgaatccattcccaaaagaaagggccctcccgtgtgattctgcccggcctgtccccggagagtattcacgccctactctggaagtgagcccaaatgtgtgtcattcaaatatatattcccccaaagaaaccattcccgaagaggctaggagcgacatgcactatagcgttgccgagggactcaaacccgccgccccatctgctcgaaatgccccttattttccgtgcgacaaagcctccaaggaagaggagagacctagctcagaggatgagatcgccctgcatttcgagcccccaaacgctcctctgaacagaaaaggcctggtgtcccctcagtcccctcagaaatctgattgtcagcccaatagtccaactgaaagctgctctagtaagaacgcttgcattctgcaagctagtggttctccccccgctaaatctcctacagacccgaaggcatgcaattggaaaaagtataaatttatcgtattaaactcattgaaccagaatgctaagcccgagggccctgagcaggctgagctcggcagactgagcccacgcgcatacacggcccctcctgcttgccaacctcctatggagccggaaaacttggatctgcagagtcccacgaaactctctgcctcaggcgaggattcaactattcctcaggctagtaggttgaataatatcgtgaacagatccatgacgggcagccctcgctcttccagcgagagtcactcaccattatacatgcatccgccgaagtgtacatcttgtgggagccaatccccacaacacgccgagatgtgtttgcacacagccggcccaacctttccagaggagatgggggagactcagtctgagtactcagactcgtcatgtgaaaacggtgcatttttctgtaacgaatgtgactgcaggttcagtgaggaggcctccctgaaacgccataccttgcagacccattctgacaagccctacaaatgcgatcgatgccaggcatccttcaggtacaaaggaaacctggcatcacacaaaactgtgcacactggagaaaagccataccggtgcaatatctgtggagctcagttcaacaggcctgcaaatctcaagacacacaccaggatccactcaggcgagaagccctacaaatgtgagacgtgcggggcacggtttgtccaggtcgcccatctccgcgcccatgtcctcatccacactggggagaaaccctacccctgtgagatctgtggaaccaggttccgccacctgcagactttgaagtctcatttgcggatccacaccggcgaaaaaccataccattgcgagaagtgcaatctccatttcaggcataaatcccagctgcggctgcacttaaggcagaagcacggcgccataactaatacgaaggtgcaatacagagtgtcggccaccgacctcccgcctgaactgcccaaagcctgttag

SEQ ID NO: 48546 - DNA, 2121 bp, Artificial Sequence
  derived and/or modified sequence
atggccagccccgccgacagctgcatccagttcacccggcacgcctccgacgtcctgttgaatctcaatcgactgcggagtcgagacatccttaccgatgtcgtgattgtcgtgagccgggaacagttcagggcacacaagaccgtcctgatggcttgttcgggactgttttacagtatctttaccgaccagttgaaatgtaacttgtccgtgatcaacctcgacccagagatcaaccctgagggtttctgtatcctgttggactttatgtacacgtcacgcctgaacctaagagaaggaaatattatggctgtcatggcaacagctatgtatttgcagatggagcatgtggtcgatacttgcaggaagttcattaaggccagcgaagctgaaatggtgtcggccatcaagccccctcgggaggaattcctaaattccaggatgctgatgccacaggacattatggcctaccgcggtcgcgaggtcgtggagaacaatctccctttgcggtccgcgccaggttgcgagtcgcgggcctttgcgccttctctctactcaggactaagcaccccccctgcatcctacagcatgtacagtcatctcccagtgtcttctcttctgttctccgatgaggaatttagagatgtgcgcatgcccgtggctaatcccttcccaaaggaacgggccctgccctgtgactctgcgagacctgtcccgggagagtacagtcgacctaccctcgaggtttctcctaacgtgtgtcactctaacatttattcccccaaagagaccatccctgaggaggccagaagtgacatgcattacagcgtggcggagggacttaagccagccgcgccgagcgcccgtaatgcaccatacttcccatgcgacaaggcctccaaggaggaagagcggccatccagcgaggacgaaattgccctccacttcgaaccacctaacgcccccctgaatcgaaaaggcctggtgtccccgcagagcccacagaagtccgattgtcaaccgaatagcccaaccgagtcctgctctagcaaaaacgcgtgcatcctgcaggctagtggatcaccaccggccaaatctccaactgacccaaaggcctgcaactggaagaagtacaaattcattgtcttaaactccctgaaccaaaatgccaagcccgagggtccagaacaggctgaactgggaaggctcagtccacgggcctataccgccccgccagcctgtcaaccaccgatggaacccgagaacctcgacctgcaaagtcctaccaagctgtctgcttctggtgaagactccactatccctcaagcttcaagactcaataacatagtgaatcgaagcatgacaggctctccccgctcttccagtgagagccactcgccgctgtacatgcatcccccaaaatgtaccagctgcggtagccaaagtccccagcacgctgagatgtgccttcacactgctggacccacgtttccagaagagatgggagagactcagtctgagtatagcgacagcagttgtgagaacggggctttcttttgtaacgaatgcgactgccgattttctgaggaggcttctctgaagaggcacacactccagacacacagcgataaaccatacaaatgcgacaggtgccaagcttcctttagatacaagggaaatctagcgtcccacaaaacagtgcacacaggagaaaagccctaccggtgcaatatctgcggggcccagttcaatagacctgcaaacctgaagacacacacacgcattcattctggggaaaagccatataagtgtgagacgtgcggtgctcgtttcgtgcaggtcgcccatctgcgtgcacacgtgcttatccatacaggggagaaaccatacccgtgtgaaatctgtggtacaagatttcgacacctccagacactgaaatctcatctgcgaatccacacaggggaaaaaccctaccattgcgagaaatgcaacttacattttcggcacaagtcacaactgaggctccaccttcgtcaaaaacatggtgccatcactaacactaaggtccaatatcgagtgagtgcgactgacctccctcctgagctgcctaaggcctgctag

SEQ ID NO: 48547 - DNA, 2121 bp, Artificial Sequence
  derived and/or modified sequence
atggcctcacccgctgattcatgtattcagtttacacggcacgcctctgatgttcttttgaatttaaaccgcctgaggagtagggatatcctaacagacgtagtgatcgtcgtatctagggagcagtttagggcacacaagacagtactcatggcatgtagcggtctgttctactcgattttcacagatcagctgaaatgcaacctgtcagtgatcaatctggatccagagattaacccggaagggttctgcatactgttggatttcatgtacacatcccgtctgaatctccgcgaaggcaacatcatggctgtcatggcaacggccatgtatctgcagatggaacacgtagtggacacttgtcgtaaatttatcaaggctagtgaggcagaaatggtgagcgccatcaaacccccacgggaagagtttctgaactcacgcatgcttatgccccaggatatcatggcatatcgcggacgggaggttgtggagaataatctgcccttaagatctgcaccaggatgcgagagtagggcttttgcaccttccctctactccggtctttcgactccaccagcctcctatagcatgtattcccacctcccggtgtcctccctgctattcagcgatgaggaatttcgcgatgtgcggatgccggttgccaatccctttcctaaagaaagagcccttccgtgtgactctgctcggccagtgcctggcgagtattcaagaccaacgttggaagtgagccctaatgtctgtcactcaaacatttatagcccaaaggagaccataccggaagaggctcgctccgacatgcactatagcgttgctgagggcttgaaacctgccgctccttctgcaagaaacgccccatactttccctgcgacaaggcatccaaggaggaagaacgcccttcttctgaggatgagatcgccctgcattttgaacctccaaatgccccacttaacagaaaggggcttgtgtctccccagtctccccagaagagcgactgccaacctaactcccctactgagtcttgtagttctaagaacgcctgcatccttcaagcatccggcagcccccctgctaagagtcccactgaccctaaggcctgtaactggaaaaaatataagttcatcgtgctcaacagcctgaaccaaaacgccaagccagagggcccagagcaagccgagctcggcagactttccccccgagcctataccgcgccacccgcttgtcagccccctatggagcccgagaaccttgacctgcagagtcccactaaactcagtgcatctggagaagattctactattccgcaagctagcagattgaataatatcgtcaacaggagtatgacaggctcccccagaagtagcagcgagtcacattcgcccctgtacatgcacccacccaagtgtacatcatgtggtagtcagagtcctcaacacgctgaaatgtgtttacatacagccggaccgacctttcccgaagagatgggtgaaactcagagcgaatattccgactcttcctgtgagaacggcgcttttttttgcaatgaatgtgactgtagattctccgaagaggcttctcttaaaagacacacgcttcagactcatagcgataagccttacaaatgcgaccgatgtcaggccagttttcgatataaaggcaacctggcctcacataagacagtccacacgggtgaaaaaccctatcgttgtaacatctgcggggctcaatttaatagaccggcaaacctcaaaactcacacgagaatccattcaggggagaagccttacaagtgcgaaacctgtggagcgcgtttcgtgcaagttgcacacctccgggctcatgtgctgattcataccggggagaagccatatccctgcgaaatctgcgggacccgattcagacacctccagactcttaagtcacacctgcgcatccatacgggggaaaaaccctaccactgtgaaaagtgtaacttacactttagacataaatctcagctaaggcttcacctgaggcagaaacatggagcgattacaaataccaaggtgcagtatagggtttccgctacagacctaccaccggaactaccaaaggcctgttag

SEQ ID NO: 48548 - DNA, 786 bp, Artificial Sequence
  derived and/or modified sequence
atggaaaaagtgagaagggaaggcgtgaaggtgatgcctaatgcaatagttcagagcgttggagtctcttccggaaagcttcttataaaactgaaagatgggcggaaggtggagactgaccacatagttgcagccgtcggactggaaccgaacgtggagctcgccaaaacgggaggattagagatcgactcagactttggcgggtttcgcgtgaacgctgagttgcaagcacggtctaatatctgggtggcaggggacgccgcctgcttctacgacatcaagttaggccgtcggcgagtggagcaccacgaccatgcagtggtgagcggacgcctggctggcgagaacatgaccggggcagctaaaccatactggcaccagagtatgttctggagtgatttgggacccgatgttggctacgaggcgattgggctggttgacagcagtctacctaccgtgggcgtgttcgccaaggctaccgctcaggataatcctaagagtgcgactgagcaatccggaaccggcatccgatctgagagcgagaccgagagtgaggccagtgaaataacaattccaccatctactcccgctgtgccacaagccccggtccaaggagaagactacggcaaaggggttatcttctacctcagagacaaggtggtcgtcgggatcgttctgtggaacatcttcaaccgaatgcctattgctaggaagattatcaaggacggcgaacagcatgaagacctcaatgaggttgctaaactcttcaatatccatgaggattag

SEQ ID NO: 48549 - DNA, 825 bp, Artificial Sequence
  derived and/or modified sequence
atgggcaagatccttccagaatacttgtccaattggacaatggaaaaagtgcgacgcgagggggtcaaggtcatgcccaacgctatcgtgcaatcggtcggcgtttccagtgggaagttattgattaagttaaaggatgggcggaaagtagaaacagaccacattgtcgctgcagtggggctagagccaaatgtggagttggccaaaacaggggggctagaaatcgactccgattttggcggattcagagtcaatgccgaacttcaggcgcgatctaatatctgggtggctggggatgcagcctgcttttatgatattaaactgggaaggcgcagggtcgagcatcacgatcacgcagttgtgtcaggacgactggcgggcgaaaacatgacaggcgctgcaaaaccatattggcaccagagtatgttttggagcgacttaggacctgacgtcggatatgaagcaatcggcctcgtcgatagttccctgcctacggtgggcgtttttgccaaggcaaccgcccaagataacccaaagtctgccaccgagcaatcaggtaccggaatccgctcagagtcagaaacggagtctgaggcttccgagattaccattcccccatcaaccccagctgtcccgcaagcaccagtgcagggcgaggattatggaaagggagttatcttttaccttcgggataaggtggtggtcggcatcgtgctttggaacatctttaacaggatgcccattgctcgaaagatcataaaagatggggaacagcacgaggatttaaacgaggtggcaaagctgtttaacattcatgaagactag

SEQ ID NO: 48550 - DNA, 786 bp, Artificial Sequence
  derived and/or modified sequence
atggagaaggtgagaagagagggcgtgaaggtgatgcccaatgccatcgtgcagagcgtgggcgtgagcagcggcaagctgctgatcaagctgaaggatggcaggaaggtggagacagaccacatcgtggccgctgtgggcctggagcccaacgtggagctggccaagacaggaggcctggagattgacagcgactttggaggcttccgggtgaatgctgagctgcaggcccggagcaacatctgggtggccggagatgctgcctgcttctatgacatcaagctgggcagaagaagagtggagcaccacgaccatgctgtggtgtctggccgcctggccggggagaacatgaccggggccgccaagccctactggcaccagagcatgttctggagcgacctgggcccagatgtgggctatgaggccatcggcctggtggacagcagcctgcccaccgtgggcgtgtttgccaaggccacagcccaggacaaccccaagagcgccacagagcagagcggcaccggcatccgctctgagagcgagacagagagcgaggccagcgagatcaccatcccccccagcaccccagctgtgccccaggcccctgtgcagggcgaggactatggcaagggcgtcatcttctacctgcgggacaaggtggtggtgggcatcgtgctgtggaacatcttcaacaggatgcccatcgccaggaagatcatcaaggatggagagcagcacgaggacctgaatgaggtggccaagctgttcaacatccacgaggactag

SEQ ID NO: 48551 - DNA, 825 bp, Artificial Sequence
  derived and/or modified sequence
atgggcaagatcctgcctgagtacctgagcaactggaccatggagaaggtgcggcgggagggcgtgaaggtgatgcccaatgccatcgtgcagagcgtgggcgtgtcctctgggaagctgctgatcaagctgaaggatggcaggaaggtggagacagaccacatcgtggccgctgtgggcctggagcccaacgtggagctggccaagacaggaggcctggagattgacagcgactttggaggcttccgggtgaatgctgagctgcaggcccggagcaacatctgggtggccggagatgctgcctgcttctatgacatcaagctgggcagaagaagagtggagcaccacgaccatgctgtggtgtctggccgcctggccggggagaacatgactggagctgccaagccctactggcaccagagcatgttctggagcgacctgggcccagatgtgggctatgaggccatcggcctggtggacagcagcctgcccaccgtgggcgtgtttgccaaggccacagcccaggacaaccccaagagcgccacagagcagagcggcaccggcatccgctctgagagcgagacagaaagtgaggccagcgagatcaccatcccccccagcaccccagctgtgccccaggcccctgtgcagggagaagattatggaaaaggagtcatcttctacctgcgggacaaggtggtggtgggcatcgtgctgtggaacatcttcaacaggatgcccatcgccaggaagatcatcaaggatggagagcagcacgaggacctgaatgaggtggccaagctgttcaacatccatgaagattag

SEQ ID NO: 48552 - DNA, 786 bp, Artificial Sequence
  derived and/or modified sequence
atggagaaggtgcggcgggagggcgtgaaggtgatgcccaacgccatcgtacagtcagtcggagtctcatccggtaagttgctcattaagttgaaggatggtagaaaagttgagaccgaccatatcgtggcggccgtgggacttgagccaaacgtcgagctcgcgaagaccggcggtctggagattgacagcgattttggcgggttccgcgttaacgccgagctccaggctcggtctaatatatgggtggctggcgatgccgcctgcttctacgacataaagctcggcagaagaagagtcgagcaccatgatcacgcggtggtgtctggacgccttgccggggagaacatgactggcgccgccaaaccctattggcaccagtcaatgttttggtctgaccttgggcccgacgtcgggtatgaagctattggtcttgtggatagttctttacccaccgttggcgtttttgctaaagcaactgcccaggataatcccaaatcagccacagagcagtccggtaccggaatccgatctgaaagcgagactgagtcggaggcttcggagattacaattccgcccagtactcctgcagtgccacaagctcccgttcaaggggaagattatggcaaaggagttatattctacctccgtgacaaagttgttgttggaatcgtcttatggaacatcttcaacagaatgcccattgctagaaaaattatcaaagatggagagcagcacgaagacctgaacgaagtggccaagctctttaacatccacgaagactag

SEQ ID NO: 48553 - DNA, 825 bp, Artificial Sequence
  derived and/or modified sequence
atgggcaagatcctgcccgagtacctgagcaactggaccatggagaaagtgaggagagagggggtcaaagtcatgcccaatgcgatcgtacaatccgtcggagtgtcctcgggaaagttgctaatcaaactgaaggacggacgtaaagtggaaaccgatcatatcgtcgctgcggtgggtcttgagcccaacgtggaactcgctaagactggcgggctggaaattgacagcgatttcggaggctttagagtgaacgccgagctgcaggcaaggagcaatatttgggtcgccggcgacgctgcttgtttttatgacatcaagctgggacgaagacgtgtagaacatcatgaccacgccgttgtgtcaggaagattagctggcgaaaacatgacaggcgctgccaagccctactggcatcaatctatgttctggagtgacctcggccccgatgtcggttatgaagcgattggtctcgtggactctagcttacccaccgtgggggtcttcgcaaaagccaccgcccaggacaaccccaaatctgcgaccgaacagtctgggaccggaattagaagtgaatccgagacggaaagtgaggcgagtgaaatcactattccaccatccactcctgccgtgcctcaggcaccggtgcagggagaggactatggcaaaggcgtcatcttttacttacgggacaaggtagtcgtgggtattgtgctgtggaatatcttcaacaggatgccaattgctcgaaagatcattaaggacggtgaacagcatgaagatctcaacgaggtagctaagctgttcaacattcatgaagactag

SEQ ID NO: 48554 - DNA, 786 bp, Artificial Sequence
  derived and/or modified sequence
atggagaaagtacgcagagagggggtgaaggtaatgccaaacgctatagtccaatcagtcggcgtgagctccggaaagctgctgataaaattgaaagatggaagaaaggtcgaaactgatcacattgtggctgcagtaggattggagcccaatgtggagctagctaaaactggcggtctggaaattgattccgactttggcggatttagagtaaatgcggaattgcaagccagaagcaacatctgggtggccggtgacgctgcatgtttctacgacatcaagttgggtcgcagaagggttgagcaccacgatcacgctgtagtcagcggtcgcctggctggagaaaacatgacaggagcagctaagccgtactggcaccaatccatgttctggagcgacctgggaccagacgttggctacgaggcgatcggtctggtagactcgtctctgccaacagtcggggtgttcgccaaagcaacagcacaggacaaccctaagagcgccacagagcaaagcggtacaggaatccgttcagaatccgaaaccgaaagcgaggcttccgagataacaattcccccatcaacacccgctgtgccacaggccccagttcagggggaggactacggtaagggagtaattttctacctccgcgacaaggtggtggtgggcatcgtgctttggaacatctttaatcggatgcccatcgcaagaaagatcatcaaggatggcgaacagcacgaagatcttaacgaagtggctaagctgtttaatatccatgaggactag

SEQ ID NO: 48555 - DNA, 825 bp, Artificial Sequence
  derived and/or modified sequence
atggggaaaatcctgcccgagtacctgtcaaattggacgatggagaaggtcaggcgcgagggagtaaaagttatgcccaatgccatagttcaaagcgttggtgtaagctcaggcaaacttcttattaaactcaaggatggcaggaaggtggaaacagatcatatagtggccgctgttggtctggagccgaatgtggagttggccaagacaggtggcttggagatcgatagtgacttcggcggtttcagggtaaacgccgaactccaagctagatcaaacatttgggtagctggcgacgcagcgtgtttttacgacataaagctcggccgaaggcgggtggagcatcacgatcatgccgtggtatccggtcgcctggccggagaaaatatgacaggcgctgccaaaccctattggcaccagagcatgttctggtctgatcttggaccagatgtgggctatgaagctatcggcctggttgactcgtcgctgcccactgtgggggtgttcgcaaaggctaccgcccaggacaaccctaaaagcgcaaccgaacagtccggcacaggaattcgttcagaatctgaaaccgaaagcgaagcctctgagataacgattcctcctagtaccccagcggtgccacaagctcccgtgcagggcgaggactatggtaagggagtcatcttctacctccgcgacaaagttgttgtgggaatcgtgctatggaacatcttcaatcgtatgccaattgctaggaagattattaaggatggagaacagcatgaggacctcaatgaagtggccaaactcttcaacattcacgaggactag

SEQ ID NO: 48556 - DNA, 783 bp, Artificial Sequence
  derived and/or modified sequence
atggagaaagtgcgccgcgaaggtgtgaaggtcatgccgaacgccatagtgcagagcgttggagtgagtagtggaaaattgctaatcaagctgaaggacggcaggaaggtggagacagaccacattgttgcagccgttggactggagccaaacgttgaactcgcaaagactggaggattagaaattgactctgattttggtggtttccgggttaatgctgaactccaggcaagatcaaatatttgggtggccggagacgccgcatgtttctacgatattaaactcggccggagacgggtcgagcaccacgatcacgccgtggtgtccgggcgcttggctggcgaaaatatgacaggcgctgcgaagccctactggcaccagtcgatgttttggagcgacctgggacctgacgttggctacgaagccataggactcgtggattcaagcctgccaacagtgggagtattcgccaaggctacagctcaggataatcctaaaagtgccactgagcaaagtggcacgggcatccggtctgagagtgaaaccgaatctgaagcctccgagatcactatccccccttccacgccggctgtacctcaggcacctgtacagggcgaagactatggtaagggggtgatattttacttgagagacaaagtggttgtggggatcgtcctctggaacatctttaatcggatgccaatagcgagaaagatcataaaggacggggagcagcacgaagaccttaatgaggtcgccaaactattcaatatccatgaggac

SEQ ID NO: 48557 - DNA, 783 bp, Artificial Sequence
  derived and/or modified sequence
atggagaaggtgcggcgggagggggttaaggtaatgcccaacgctattgtacagagcgttggtgtatcgtcaggaaagctcctgattaagttgaaagacggccgtaaggtggagacagaccacatcgttgctgctgtgggccttgagccgaacgttgaattagccaaaacaggggggctcgagattgatagcgactttggcgggttccgcgtgaacgctgaattacaggccaggagtaatatatgggtggccggagatgcggcatgcttctatgacataaaactgggtagaagacgcgtggaacatcatgatcatgccgtggttagcggccgcttagccggcgaaaatatgacgggcgcagccaagccttactggcaccagagtatgttctggtcagatctgggacccgatgtcggctacgaggcaattgggttagtagacagctccttgcccactgtcggagtgtttgccaaggctactgcccaggataatcccaaaagcgctacggagcagtcgggtactggtatcaggtcagagagcgaaacagagagcgaagcaagcgaaattacaatcccccccagtacacccgctgtcccccaggcgcctgttcagggagaggactacggaaagggcgtgattttctatctgagggacaaagtggtggtcgggatcgttctctggaacattttcaaccgcatgcccatagccaggaagattattaaagatggcgagcagcacgaggacttaaatgaagtggctaaactatttaacatacacgaggac

SEQ ID NO: 48558 - DNA, 783 bp, Artificial Sequence
  derived and/or modified sequence
atggagaaggtcagacgtgagggcgtaaaggtgatgccgaacgccattgtgcagagtgtaggcgtatcgtctggaaagctcctgattaaactgaaggacggacggaaggtggagacagaccacattgtagcggcagtcggacttgagcctaatgtggaactggctaaaacagggggcctcgagatagactctgattttggggggtttagggtaaatgctgagctgcaggcccgatccaatatttgggtggcaggtgatgcagcttgcttctatgatatcaagctgggtcgacgaagagttgagcatcacgatcacgcagtggtaagcggcaggttggccggtgagaacatgaccggagcagcgaaaccgtactggcatcagagtatgttttggagcgacctggggcccgacgtaggatacgaggccataggtcttgtcgactcctctctccctaccgtgggcgtcttcgcaaaggctaccgcccaggataaccccaaatccgccacagaacaatcagggaccggaatacgctccgagtccgaaactgaaagtgaggccagcgaaattactattcccccttctactccagctgtcccccaagcccccgtgcagggtgaggattatggaaaaggcgtcattttctatctgcgtgataaagtggtcgttggtatagttctctggaacatttttaaccgcatgccgatcgcgcgcaagatcatcaaggatggcgagcaacatgaagatcttaacgaagtagctaagttattcaatatacatgaggat

SEQ ID NO: 48559 - DNA, 783 bp, Artificial Sequence
  derived and/or modified sequence
atggagaaagtgcggcgagaaggggtgaaggtaatgccaaatgccatagtgcagtccgtgggcgtgtcctccggaaagcttctcattaagttgaaggacggcaggaaagtggaaaccgaccacatcgtggccgctgtgggcctcgaaccgaatgtcgagttggccaaaactgggggccttgaaattgacagtgatttcggcggctttcgcgtgaacgcggagctgcaggcgcgctctaacatctgggtggccggcgatgccgcatgtttttacgatatcaaacttgggcgcaggcgcgttgagcaccacgatcacgctgtcgtcagtggtcggttggccggcgaaaatatgactggcgccgccaagccctactggcatcagtctatgttctggtctgatctcggacccgacgtgggatacgaagctatcggtttggtggattcatcacttccgacagtgggcgtgtttgcgaaggcaacagcacaagacaaccctaagagtgccacggagcagtctggtacaggcattcggtccgaatcagagactgagtctgaggcatccgagatcactatacctccgagcaccccagccgtcccacaggcccctgtccagggagaggattatggaaagggcgtgatcttttatcttcgcgacaaggtggtagtggggatcgtcttgtggaacatttttaaccgaatgcccatagcaagaaagatcataaaagacggggagcaacatgaagatcttaacgaagttgcgaagctctttaatatacatgaagac

SEQ ID NO: 48560 - DNA, 783 bp, Artificial Sequence
  derived and/or modified sequence
atggaaaaggtgcgacgcgaaggagttaaggtgatgcctaacgcaattgtgcaatcggtgggagtgtcctcaggcaaactgctgattaagctgaaggatgggagaaaggtcgaaacggatcacattgtggcagcagtcgggctcgagcctaacgtggagctggcaaagactggaggcctggaaattgattccgacttcggagggtttagagtgaatgcggaactgcaagccaggtcgaacatttgggtcgcaggtgatgcagcctgcttctacgacataaaactgggacgtcgtcgggtggagcatcacgatcatgcagtggtgtccggtagacttgctggtgagaatatgactggcgcggcgaagccatactggcatcaatccatgttttggtcagacctgggacccgacgtgggctacgaagctattggactggtggattcttctcttcccacggtgggagtctttgccaaggctactgcacaagataatccaaagtcagcaactgaacagtcggggaccggcattcgctcggagagcgagacggagtcggaagcatccgaaattactataccaccttcaactcccgcagtgcctcaagcccccgtccagggtgaagattatggtaagggggtgattttctatttgcgggataaagtggtggtgggcatcgtgctctggaacatctttaacaggatgcctatcgcccgcaaaatcattaaggatggcgaacagcatgaggatctgaatgaagtggccaagttgttcaacattcatgaggat

SEQ ID NO: 48561 - DNA, 783 bp, Artificial Sequence
  derived and/or modified sequence
atggagaaagtgcgtagagagggtgttaaggtaatgccaaacgccattgtacagtccgttggagtgtcgtcaggaaaactgttaatcaaacttaaagatggacgtaaagtcgagacggatcatattgtagctgcagttggtctagaacctaatgttgaattagcaaagaccggtggcctggaaattgattctgactttggagggttcagagtgaacgcggagttacaggcccgcagcaatatttgggtcgcaggtgacgcggcttgcttttacgatattaaattgggccggaggagggtggaacaccatgatcatgcagtcgtcagcggacgtctcgcaggggaaaatatgacaggagccgctaagccatattggcatcaatcaatgttttggagtgatcttggacctgacgtcggatatgaagcaataggactagtggactcgtcgcttccaacagttggagtctttgctaaagcgacagcgcaagataatccaaagtccgctacagagcaatcaggaaccggaatacgatcagagagtgaaactgagagcgaagcatctgaaatcacaattcctccatcgacgccagcggttccacaggctccagtccagggagaggactacggaaaaggcgtaattttctacttgcgtgataaagtggttgtgggaatcgttctttggaacattttcaacagaatgccaatcgcgcgtaaaatcataaaagatggagagcaacatgaagacctcaatgaggttgcaaaattatttaatatacatgaggac

SEQ ID NO: 48562 - DNA, 783 bp, Artificial Sequence
  derived and/or modified sequence
atggagaaggtgaggagggagggggtcaaagtgatgccaaatgcaatcgtgcagagcgtgggcgttagttcaggtaaactgctgattaaactgaaagacggtcgcaaagtcgagactgatcacatcgtggcagcagtcggactggagccgaatgtggaactggccaagaccggtggtttggagatcgatagtgatttcggtggtttccgtgtgaacgcggagctgcaggctcgttccaatatttgggttgctggtgatgcagcttgtttctatgacattaaactgggacgccgccgcgtggagcaccacgaccatgcagtggtgagcggacggctggccggcgagaacatgacgggtgcggcgaaaccttactggcaccagagtatgttttggtcggatctgggtccagacgtcggctacgaagcgattggtctggtggactcctctctgccgactgttggcgtctttgcaaaagctactgcccaagacaaccccaagagcgcgacagagcaatccggcaccggtattcgttccgagtcagaaaccgaaagcgaagcaagcgaaattaccatcccaccttccacgccagcggtgccgcaagcccccgtgcagggtgaggactatggtaaaggggttattttctatttgcgcgataaagttgtcgttgggattgtgctgtggaatattttcaaccgcatgccgatagcgcgtaaaatcattaaagacggtgagcaacacgaagatctgaatgaagtggcaaagctgtttaacattcatgaagat

SEQ ID NO: 48563 - DNA, 783 bp, Artificial Sequence
  derived and/or modified sequence
atggaaaaagtcagaagggaaggtgtgaaggtcatgcctaacgcaatcgtccagtcagtgggtgtcagctcgggcaaacttctgatcaaattgaaggatggtcggaaggtagaaactgatcacatagtggcagcggtgggattggaacccaatgtcgagctggcaaagactggcggtcttgagatcgatagcgactttggaggttttcgagtgaatgcagaactgcaagcacggtccaacatttgggttgcgggagacgccgcatgcttttacgatatcaagctcggacgtcgtcgtgtggaacatcatgatcacgccgtggtgtccggcagacttgccggggagaatatgactggcgcagcaaagccttattggcaccaaagcatgttttggtcggatcttggtccggacgtgggctacgaagctattggcctggtggattcatccctcccaacggtcggggtgttcgcaaaggcaactgcacaggataatcctaagtcagccactgaacaatcgggtaccgggatccgttcggaatcggaaaccgaatccgaagcctcagaaattactattcccccatcaactccagcagtgccacaagccccagtccagggagaagattacggcaagggggttatcttttacctgcgcgataaagtcgttgtggggatcgtgctttggaacattttcaatcgtatgcctattgcgagaaagatcataaaggacggagagcagcatgaggacctcaacgaagtggcaaaactcttcaacattcacgaagat

SEQ ID NO: 48564 - DNA, 783 bp, Artificial Sequence
  derived and/or modified sequence
atggagaaggtgaggcgagagggcgtgaaagtgatgccgaatgcaattgttcagagtgttggcgtgtcttctggaaaactccttattaaacttaaggacggaaggaaagttgagaccgatcatatcgttgctgcagtgggcttggagcccaatgtggagttggcaaaaacaggggggctcgaaatcgacagcgatttcgggggcttccgggtcaacgccgagttgcaggcaagatcgaacatttgggttgccggcgacgctgcctgtttctacgatataaaacttggacgccgaagggtcgaacaccacgatcatgctgttgtgtctggacgcctggctggagaaaacatgactggggctgcaaaaccttactggcaccaatcaatgttttggtcagacttgggacccgatgtgggctacgaagctattggcctagtcgactcctcgctgccaactgtaggagtgttcgccaaggcaaccgcccaggacaaccctaagtcagcgaccgagcagagtgggacaggaatccggtcagaatcagaaaccgagtctgaggcatccgagatcaccattccccctagcacacccgcagtgccacaagcacccgtccagggagaggattacggcaagggcgttatcttttatctgcgggacaaggtggttgtggggattgtcctgtggaatatctttaaccggatgccaattgctaggaagatcatcaaggatggtgaacagcatgaagacctcaacgaggtagccaaacttttcaatatccatgaagac

SEQ ID NO: 48565 - DNA, 783 bp, Artificial Sequence
  derived and/or modified sequence
atggaaaaggtgagaagggagggagtcaaggtgatgccgaatgccatcgtgcaatctgtgggcgtctcaagcggcaagctgctgattaagctgaaggatggtcgaaaggtggaaaccgaccatattgtagccgctgtgggactggaacctaacgtcgagcttgcgaaaacgggtggacttgagatcgatagcgattttgggggattcagggtgaatgcagaattgcaagcacgcagcaacatctgggtagcgggcgatgctgcttgtttttacgatatcaagctcgggagaaggcgcgttgagcatcacgaccacgctgtggtttcaggaagattggctggagaaaacatgactggcgcagcaaagccatattggcaccaatcgatgttttggagcgatcttggacccgacgtgggttacgaggcaattggtctggtggactcctcgcttccaaccgtcggtgtgtttgcaaaagcaaccgcccaagacaatcccaagagcgctactgaacagtccggtactgggattaggtccgagtcggaaaccgagtcagaggcctcagaaattacgattccaccttccacgcctgcagttcctcaagcgcccgtccagggggaagattacggaaaaggggtgatcttctaccttcgtgacaaagtcgtggtgggaatcgtcctttggaacatctttaatcgtatgcccattgcgagaaagattatcaaggatggagaacagcatgaggaccttaacgaagttgcaaagctgttcaacatccatgaagat

SEQ ID NO: 48566 - DNA, 783 bp, Artificial Sequence
  derived and/or modified sequence
atggagaaggtccgccgcgagggcgtcaaggtgatgcctaacgcgattgtccagtccgtcggcgtctcatccggtaagctcctgattaagctgaaggacggccgcaaggttgagacggaccatatcgtcgccgctgtcggcttggagcccaacgtcgagctggcgaagacgggcggcctggagatcgacagtgatttcggcggcttccgtgtaaacgccgagctccaggcccgctccaacatctgggtcgccggcgacgccgcctgcttctatgatattaagctgggtcgccggcgggtcgagcaccacgatcacgccgttgtatccggccgtctggcaggtgaaaatatgactggcgcggctaagccatactggcatcagtctatgttctggtccgatctggggccggacgtagggtacgaagcaatcgggctggtcgacagctctttacccaccgtcggcgtctttgcaaaggctaccgcccaggacaaccccaaaagcgctaccgagcagtcgggcaccggcatccgctccgagagcgagacagagtctgaggcgtccgagattaccattccaccttctacccctgcggttcctcaggcgccggttcaaggggaggactacggcaagggcgttatcttctatttgagggacaaagttgtcgttggaattgttctgtggaacatctttaatagaatgcctatcgcccgcaagattataaaggatggcgagcagcacgaggatctcaatgaagtcgcgaagttgttcaacatccatgaagac

SEQ ID NO: 48567 - DNA, 783 bp, Artificial Sequence
  derived and/or modified sequence
atggagaaggtgcgtcgcgagggcgtcaaggtaatgccaaacgccatagtccagtccgtcggcgtaagcagcggaaaattgttgataaaattgaaggacggaagaaaagtcgagactgaccacattgtggccgctgttggtctggagcctaatgtcgaactggcaaaaactggtggactggagattgactctgacttcggaggctttagggtaaacgctgaactgcaggctcgcagcaacatctgggtagccggcgacgcagcatgcttttatgacatcaagctgggccgcaggcgcgtggaacaccatgaccacgctgttgtgtccggccgcctggcaggtgagaatatgaccggagccgctaagccatactggcaccagtcaatgttctggagcgacctgggccccgacgtcggttacgaagcaatcggtcttgtggattccagcttgccaactgtaggagtctttgctaaagctaccgcccaggacaaccctaagtctgccaccgagcagagtggtacaggcattaggagtgaaagtgagaccgagtctgaagcttctgagataaccattccaccttctactcctgcagtgcctcaagctcctgtgcaaggtgaggactacggaaaaggtgtcatcttctacttgagagataaagtcgtcgtgggaatcgtcttgtggaacatatttaacaggatgcccatagccagaaagatcataaaggacggagaacaacatgaagatctcaatgaggtcgcaaaattgttcaacatccatgaggat

SEQ ID NO: 48568 - DNA, 783 bp, Artificial Sequence
  derived and/or modified sequence
atggagaaagtgcggcgcgagggagtgaaggtcatgcccaacgcaatcgtccagtctgtcggagtgtcttcaggtaagttacttattaagcttaaagatggacggaaagtggagaccgatcacatcgtagccgccgttggacttgaacccaacgtggagctggcaaaaacgggaggcctggagatcgattctgattttggaggcttccgcgtgaatgccgagttgcaggcgcgtagcaacatatgggtagccggtgatgccgcctgtttctacgacatcaagttaggaagacgaagggtggaacatcacgatcacgctgtcgtcagtggacgcctggcgggggagaacatgaccggcgctgcgaagccatactggcaccaaagtatgttctggagtgacttggggcccgatgtgggctacgaggccattggcctggtggattccagtctgcctaccgtgggagtctttgcaaaggcgactgcccaggacaacccgaagagcgccacggagcaaagcggcaccggcatccgatcggagtcggagaccgagagcgaagcttccgagataaccataccgccctcgacccccgcggtaccgcaggcacctgttcaaggcgaggattatggcaaaggtgtcatcttctaccttcgcgataaggtggtcgtggggatagtgttgtggaacatcttcaaccgtatgccgatagcacggaaaattattaaggacggtgaacagcacgaagatcttaacgaggtggcaaagctgtttaatatccacgaggac

SEQ ID NO: 48569 - DNA, 783 bp, Artificial Sequence
  derived and/or modified sequence
atggaaaaggtgcgccgggagggggtgaaggtcatgcctaatgccatcgtccagtcagtcggagtgtcatctggcaagctcctgatcaaactgaaagatggacggaaggtggaaactgatcacattgtggctgccgtgggactggaaccaaacgtagaattggctaaaaccggaggattggaaatcgattcagacttcggaggattccgcgtaaacgcagagctccaagcacggtccaatatctgggtggcgggggacgcagcgtgcttctacgacatcaagctgggaagaaggcgggtcgagcatcatgatcatgccgtggtgtccggacgcctggccggtgaaaacatgacgggcgctgcaaagccgtactggcaccagtcgatgttctggtccgacctgggtcctgatgttggatacgaagctattgggttggtcgattcctccctgcccactgtgggagtgttcgccaaggcaaccgcccaggacaacccaaagtcggcgaccgagcaatctggtaccggcatcagatcagaaagcgaaactgagtctgaggcaagcgaaatcactatcccgccctcgaccccggcggtcccccaggctccggtgcagggagaagattacggaaagggagtcatcttctatctgcgggataaggtggtggtgggcattgtgctgtggaacatcttcaacaggatgccgatcgccagaaaaatcatcaaggacggagaacaacacgaggacctcaacgaagtggccaagctgtttaacattcacgaggat

SEQ ID NO: 48570 - DNA, 783 bp, Artificial Sequence
  derived and/or modified sequence
atggaaaaggtgagacgggaaggcgtcaaggtgatgccaaacgcgattgttcaatctgtgggggttagctccggaaagctcctgatcaagcttaaggacggccggaaggtggaaacagatcatatcgtggcggccgtaggtttggagccaaatgtggaattggctaagaccggcggtttggaaatcgattctgacttcggtggcttccgcgtaaatgccgaactgcaggcccgcagcaatatatgggtggccggggatgccgcttgcttttacgacattaagctgggccgacgccgggtggaacaccacgatcacgccgtagtgtccgggagacttgctggcgaaaacatgactggtgctgctaaaccttattggcaccaaagtatgttttggtcagacctaggccccgatgtgggctacgaggccattggtctagtggattcgtctctgcccaccgtgggtgtgttcgcaaaggccaccgctcaggataacccaaaatccgcaacagaacaaagcgggacagggattcggtctgagagcgaaactgagtccgaggcatcagagatcactatcccccccagcacacctgctgttccacaggcccctgtgcagggcgaggactacgggaagggagtgattttttatctgagggataaggtggtcgtgggcatcgtgctgtggaatatattcaatcggatgccgatagcccgtaagatcataaaggatggagagcagcatgaagatctgaatgaggtagccaaactgttcaatatacatgaggat

SEQ ID NO: 48571 - DNA, 783 bp, Artificial Sequence
  derived and/or modified sequence
atggagaaagtgaggcgtgagggggtcaaagtgatgccaaacgctatagtgcagagcgtgggagtctcttcagggaaattgctgattaagcttaaagacggaagaaaagtggaaacagaccacattgtcgcagccgttggcctcgaacctaacgtggagttggccaaaaccgggggactcgaaatcgattccgattttggaggtttccgggtcaatgcggaactgcaagcacgctctaatatctgggtggccggggacgctgcctgcttttatgacatcaaactcggacgcagacgcgtggaacatcacgatcatgccgttgtgtctggccgactggctggggagaacatgacaggcgcggctaagccatactggcatcagtccatgttttggtctgatctggggcctgatgtggggtatgaggctatcggcctggtagacagctccctgcccactgtgggcgtgtttgccaaagcaaccgcccaggataaccccaaatccgctactgagcagtcaggaaccgggatccgttcagagagtgaaacagaaagtgaggcatcggaaatcaccatacccccaagcacaccggctgtcccacaagcacctgtgcagggcgaggattatggcaaaggggtgatcttctatctgcgcgacaaagtcgtggtgggaatcgtgttgtggaacatatttaatcggatgcctattgcaaggaagataatcaaagacggagagcaacacgaggacctgaatgaggtagccaagttatttaacattcatgaagac

SEQ ID NO: 48572 - DNA, 783 bp, Artificial Sequence
  derived and/or modified sequence
atggagaaggttaggagggaaggcgtgaaggtaatgcccaacgcgattgttcagtcagtgggagtgtcttctggtaaactgctcataaaattgaaggacggcaggaaagttgagacagaccacatcgtcgccgctgtgggcctggagcccaatgtggaactcgcaaagactggtggcttggagatcgatagtgactttggtggtttccgcgtgaacgccgagttgcaagcgaggtcaaacatctgggtcgccggcgatgccgcttgcttctatgatataaaactgggtaggcgcagagttgagcaccatgaccacgcagtcgttagtggcaggctggccggcgaaaacatgacaggtgctgctaagccttactggcatcaatcaatgttctggtccgatctgggtccagatgtaggatacgaggcgattggtttggtagatagctctcttcctaccgtcggtgtctttgcaaaagccacggcacaggacaacccaaagtcagctaccgagcagtctggcacgggcatcaggtccgaatctgagacagagtccgaggcttcagaaataacgatcccaccctcaacacctgccgtgccgcaggcacctgtgcaaggtgaggactacggtaagggagtcatcttctacttgagggataaggtcgtggtaggcatcgtgctttggaatattttcaataggatgccaatcgcgaggaaaattatcaaagacggtgaacaacacgaggaccttaatgaagtcgccaagctttttaacatacacgaagac

SEQ ID NO: 48573 - DNA, 783 bp, Artificial Sequence
  derived and/or modified sequence
atggaaaaggtgcgcagggaaggtgttaaggtgatgcctaatgcgatcgtccaaagcgtgggagtgtcaagcgggaagctgctgattaagctcaaagacggccggaaggtggaaactgatcacatagtggcagctgtgggacttgaaccaaacgttgaactggccaagactggaggcctggagatcgatagcgactttggaggttttcgggtaaatgcggagttgcaagcacgttccaacatttgggtggcaggggatgccgcgtgtttttacgacattaaactcggtcgaagaagggtggaacaccatgatcacgcagtcgtctccggtcgcctggccggtgaaaacatgactggcgctgctaagccctactggcatcagtcgatgttttggtcagatctggggccagatgtcggttatgaagcaattggtcttgtggactcctcactccccacggtaggggtgtttgcaaaggcaaccgcccaagataaccccaaatcggcgaccgagcaatcgggaaccggaataagatcggagtcagaaactgaatctgaagcaagcgagattaccattcctcctagcacgccggctgtccctcaggccccagttcagggcgaagattacggtaaaggtgtgatattctacttgcgggacaaggtagtcgtgggaatcgtgttgtggaacattttcaatcggatgcctattgcaagaaagatcattaaagatggcgaacagcatgaggaccttaacgaggtggccaagctgttcaacatccatgaggac

SEQ ID NO: 48574 - DNA, 783 bp, Artificial Sequence
  derived and/or modified sequence
atggaaaaggtccggagagagggtgtgaaggtcatgcccaacgctatcgtgcagtcagtgggcgtctccagcggaaagctcctcatcaagctgaaggatggcagaaaggtggaaaccgatcacatcgtcgctgcggtcggtctggagccgaacgtggaactggccaaaactggggggttggaaatcgactccgactttggaggattcagggtcaacgctgagttgcaggcgagaagcaacatctgggtggccggagatgcggcatgcttctacgacatcaagctgggccggcgccgggtggagcaccatgaccatgccgtcgtctccggtcgcctcgccggagaaaacatgactggcgccgccaaaccttactggcatcagagcatgttctggtctgacctgggaccggacgtgggatacgaggctatcgggctggtggattcgtcactgcctaccgtcggtgtgttcgcgaaagccactgcgcaagacaatccgaagtcagctaccgagcaatccggcactggcatccgaagcgaatccgagactgaatccgaggcgtcagaaattactatcccgccgtcaactccggccgtgccgcaggcgccagtccagggggaggattacggaaagggagtcatcttctacctgagagacaaagtcgtggtggggatcgtcttgtggaacatcttcaaccggatgcctattgcgaggaagatcatcaaggacggcgaacagcacgaggatctgaacgaagtggcgaaacttttcaacatccacgaggac

SEQ ID NO: 48575 - DNA, 783 bp, Artificial Sequence
  derived and/or modified sequence
atggagaaggtacgtagagaaggagtgaaggtgatgccaaacgcaatcgttcaatccgtaggggtgagttcggggaaactgttgatcaagttgaaagatggccgcaaggtcgagacagatcatatagtcgcggccgtgggcctggagcctaacgtggaactggcgaagacagggggattggaaattgattctgattttggcggtttccgagttaatgccgaactgcaggcccggtctaatatctgggtggccggggacgcagcctgcttctacgacattaaattaggacggaggagggtggagcaccacgatcacgccgtggtctccggcaggttggcgggcgaaaacatgaccggagctgccaagccatattggcaccaaagcatgttttggagcgacttaggacccgatgtgggctacgaggccatcggcttagtggactctagtctgccgacagtgggggtttttgcaaaagcgacagctcaggataacccaaagtccgcgacggaacaatccggcaccgggattaggtctgaaagtgaaactgagagtgaagctagcgaaattacaatacccccctcgacacccgcagttccccaggcacccgtacaaggggaagattatggcaagggggtcatcttctacctgcgcgataaagtggtcgtagggatcgtactgtggaacatcttcaataggatgcccatagcgcggaaaatcatcaaagacggcgaacagcacgaggatctgaacgaagtggccaaactctttaacatccacgaagat

SEQ ID NO: 48576 - DNA, 783 bp, Artificial Sequence
  derived and/or modified sequence
atggaaaaggttcgccgggagggcgtgaaagtgatgcctaacgcgatcgtccagtccgtgggagtatcgtcggggaaactgctcatcaaattgaaggatggacgcaaggtggaaactgaccatatcgtggcagctgttggcctggagcccaacgtcgagctggcaaagacgggagggctggaaattgactcagacttcggaggtttccgcgtcaatgccgaattgcaggctaggtcgaatatctgggtggccggcgatgctgcgtgcttctacgatatcaagctgggacgccggcgtgtggaacaccacgaccatgccgtcgtctcgggtcgtctggctggagaaaacatgactggagccgccaagccgtactggcatcagtcaatgttttggtcggacctgggtccggatgtggggtacgaagcaatcggactggtggactccagcctcccgactgtgggagtctttgccaaggcaaccgcgcaagacaacccgaagtccgcaaccgaacaatccggcactggaatccgcagtgagtcggagactgaaagcgaagcctccgaaattactattccaccatcgactccagccgtgccacaagcaccggtgcagggggaggactatgggaagggggtgatcttctacttgcgggacaaagtggtcgtcggaatcgtcctgtggaatatcttcaatcgcatgcctatagcgaggaaaatcatcaaggatggagaacaacacgaagatctcaatgaagtggccaagctcttcaacatccatgaggac

SEQ ID NO: 48577 - DNA, 783 bp, Artificial Sequence
  derived and/or modified sequence
atggaaaaagtgaggcgggaaggcgtcaaagttatgccaaatgctatagtccagtccgtaggcgtgagcagcggcaaacttctgataaaacttaaagatggccggaaggtagagaccgatcacatagttgctgccgtgggcctggagcctaatgtagagctggccaagaccgggggcctggaaatcgatagcgatttcggcgggttcagggtgaatgctgagttgcaggcccgaagtaatatctgggtggccggcgacgcagcctgtttttacgatattaagctgggccgtcggcgggtagagcaccatgatcatgccgtggtgagcggtagactagccggcgagaacatgaccggcgctgcaaagccctactggcatcagtcaatgttttggtctgatctcggacctgacgtgggctatgaggccatcggcctggtggactctagcctgcccacagtgggagtgtttgctaaggcaaccgctcaagacaatcctaaaagcgccacagagcagagtggcaccggcatacgaagcgagagtgagacagagtccgaagcctctgagatcactattcctccttctaccccagcagtccctcaggcccctgtccagggtgaagactacggaaaaggcgttatattctacctgagggacaaagtggtcgtaggaatagttctgtggaatatattcaacagaatgcctatcgcaaggaagatcataaaagacggcgaacaacatgaggatctgaatgaggtcgccaagctgtttaatatacatgaagac

SEQ ID NO: 48578 - DNA, 783 bp, Artificial Sequence
  derived and/or modified sequence
atggagaaggtgcgacgagaaggggtgaaggtcatgccgaacgccattgtgcaatccgtcggagtatcctccggcaagctgttaatcaagctgaaggacggccgaaaagttgaaacggaccacattgtcgcagcagtgggattagagcctaatgtcgagcttgccaaaacagggggtctggagatcgactctgatttcggtggattccgggtaaacgcagagctgcaggcccgaagcaacatctgggtcgctggggatgccgcctgcttttacgacataaaactgggtcgtcggagagttgagcatcacgaccacgctgttgtgagcggtcgcctcgcaggcgagaatatgaccggcgccgctaagccttactggcaccagtctatgttctggtccgatttgggtccagacgtcggttatgaggctatcggattagtcgatagctccctgcctaccgtaggcgtgtttgctaaggcgaccgcccaagacaacccaaagagcgccacggagcaatctggcacagggattcggtccgaaagtgaaaccgagtccgaggcgtccgagattactattcctccctcaaccccggctgtcccacaggccccagtccagggcgaggattatggtaaaggcgtaatcttctacctgagggacaaggttgtggtcggtatagtcctttggaacatctttaacagaatgccaatcgccaggaagatcattaaggatggcgagcagcatgaagatctaaacgaggttgccaagcttttcaacattcacgaagac

SEQ ID NO: 48579 - DNA, 783 bp, Artificial Sequence
  derived and/or modified sequence
atggaaaaagttcgccgcgagggggtgaaagtgatgcctaacgccattgtacagagcgtcggcgtttctagcggaaaacttctgattaagctgaaggacggacgtaaggtcgagacagaccatatcgtcgcggcagtgggcctcgaacccaacgtggagctcgcaaagacggggggccttgaaattgacagcgatttcgggggctttcgcgtaaacgctgaattgcaggctaggtccaatatctgggttgcaggagatgcggcttgtttctatgacatcaaattgggccggagacgggtagagcaccacgaccatgcggttgtgtctggccggcttgctggggaaaacatgacaggggccgccaagccctactggcaccagtcgatgttttggtctgacctaggccccgatgtgggatatgaggcaattggactggtagacagttctctgcccaccgttggagtctttgcgaaggcaactgcacaggataatcctaaatcagccactgagcagagcggcaccggtattaggtctgaaagtgaaactgagtctgaggcctctgaaattactattcctccctctactcccgccgtccctcaggcacccgtgcagggagaagactatggaaaaggcgtaatattctatctaagggataaggttgttgtgggcattgtgctctggaacatctttaatagaatgcctatagctcggaaaattataaaagatggcgaacagcatgaggacttgaacgaggtcgccaagctgttcaatatccacgaagat

SEQ ID NO: 48580 - DNA, 783 bp, Artificial Sequence
  derived and/or modified sequence
atggagaaagtccggcgagagggagtgaaggtgatgcccaacgcaatcgtgcaatcggtcggggtttccagtgggaaactgttaattaaactcaaggatggccgaaaggtggagaccgaccacattgtggctgcggtgggcctcgagcctaacgtggaactcgctaagactggcggcttagagatcgatagcgatttcggaggattccgtgttaatgctgaactccaagcccggtccaatatttgggttgctggagacgccgcctgtttctacgacatcaagctcggaaggagacgggtggagcaccatgaccatgccgtggtttctggacgacttgccggggagaatatgacgggagccgctaaaccatattggcaccagtccatgttttggtctgacctgggcccagacgtcggatacgaggcaattgggctagtggactcatctctgcctactgtcggcgttttcgcgaaggcaaccgcacaggataaccccaagtccgccactgagcagagtgggacgggaatccgaagtgaatcggaaaccgagtcagaagcctccgagatcacaattcccccatctaccccagccgtgccacaggctccggtgcagggggaggactacgggaaaggagtcatcttctacctgagggacaaggtcgtcgtcggtattgtcctatggaacattttcaaccgaatgcctatcgcacgaaagatcataaaggatggtgaacagcacgaggatctgaacgaagtggcaaagctgttcaacatccatgaagat

SEQ ID NO: 48581 - DNA, 783 bp, Artificial Sequence
  derived and/or modified sequence
atggagaaggtccgtcgggagggtgtcaaggtgatgccaaacgctatagtacagagcgtgggggtgtcctccggcaagctgctgattaagctaaaagatgggcggaaagtggaaaccgaccacatcgtagcagccgtggggctggagccaaatgttgagttggccaagaccggcggactggagatcgacagcgatttcggcggcttcagggttaacgccgaacttcaggctaggtcaaatatatgggtagccggcgatgcagcatgcttttatgatattaaattaggacgccgaagagtggagcatcacgaccacgccgtggtgagtggccgccttgccggggagaacatgacgggagcagcgaagccctactggcaccagtccatgttttggagcgacttgggccccgatgttggttacgaggccattggcctggttgactctagtctaccaaccgtgggggtctttgctaaggccacggcgcaggacaaccccaaatcagcaacggagcagtccggcacgggaataagaagcgaatccgagactgaaagcgaggcttcagaaattaccatcccaccctccacacccgctgtgccccaagcccctgtgcagggggaagactacggcaagggcgtgatcttctaccttagggataaggtcgtggtgggcatcgtgctgtggaatatttttaatcggatgcccatagcacggaagataattaaggacggtgaacaacacgaggatctcaatgaggtagctaaactttttaatatacacgaagac

SEQ ID NO: 48582 - DNA, 783 bp, Artificial Sequence
  derived and/or modified sequence
atggaaaaagttagaagggaaggcgtgaaggtgatgccaaatgcaattgtccaatccgtgggagtgtcatcgggcaaacttcttatcaaactgaaggatggtcggaaagttgaaactgatcatatagtggcagccgtcgggcttgaacccaacgtcgaactggcgaaaaccgggggcctcgagattgactcggatttcggtggatttagagtgaacgcagaactccaggcacggtctaatatctgggtggccggcgatgcagcctgtttttacgacattaagttgggaaggcggcgcgtggagcaccatgaccacgcagtggtgtcgggccggcttgctggtgaaaacatgaccggggcagcaaagccttactggcaccagtcaatgttttggtcggatctcggccctgatgtgggatatgaggcaattggactggttgatagcagcctgccaaccgtgggggtgtttgcaaaggcaactgcacaggacaacccaaaatcagccactgaacaatccggaactgggatcaggtccgagagcgaaacggagagcgaggcatcggagatcaccatacctccttccaccccagcagtcccacaagcccccgtgcaaggggaggactacggaaaaggggtgatattctatctgagagacaaagtggtggtgggaattgtgctctggaacattttcaatagaatgccgatagcacgcaagatcataaaagatggagaacaacacgaggatctcaatgaagtggcaaagctgtttaacattcatgaagat

SEQ ID NO: 48583 - DNA, 783 bp, Artificial Sequence
  derived and/or modified sequence
atggaaaaggtgagaagggaaggagtgaaagtgatgccaaacgccattgtgcaatctgttggggtctcaagcggtaaactcctgattaaattaaaagatggacgaaaagtcgaaacggaccatatagttgccgcggtgggactagaacccaatgttgaactggccaaaacgggcggactggagatcgactcagattttggcggattcagagtcaatgccgagctgcaagcccgctcgaatatctgggtcgcgggcgacgccgcctgtttctatgacattaagctcgggcgccggagggtcgaacaccatgaccatgccgtggtctccgggcggctcgccggcgaaaacatgaccggcgctgctaaaccttactggcaccagtccatgttctggtcagacttaggtcccgatgtggggtatgaggcaattgggcttgtggatagtagcctgccgacagtaggcgtgttcgcaaaggccactgcacaagacaaccccaaaagtgctaccgagcaatctgggactggcattcggtctgagtcagagacggagtctgaagcctccgagattacaattcctcctagcacacctgctgtcccgcaggctcccgtgcagggtgaggattatggcaaaggggtaattttctatctacgagacaaagttgtggtgggcattgtgctctggaacatttttaacagaatgcccattgccagaaagattatcaaggatggcgagcagcacgaggaccttaacgaggtggcgaaactgttcaatatccatgaagac

SEQ ID NO: 48584 - DNA, 783 bp, Artificial Sequence
  derived and/or modified sequence
atggagaaggtgcggcgagaaggcgtcaaagtgatgcctaatgccatagttcagagtgtcggagtgagttcaggcaagctgctgatcaagcttaaagatgggcggaaggtggagaccgaccacatagtggctgccgtgggacttgaacccaatgttgagctggcgaagactggaggcttagaaattgactccgatttcggtgggttcagagtgaatgcggagctgcaagcccgctccaacatctgggtagcaggggacgcggcctgcttttacgatattaagcttggtcgacggcgggtggaacatcatgatcacgctgtggttagtggccggctggcgggggaaaatatgaccggcgccgccaaaccttactggcaccagagcatgttctggtcggacctggggcctgatgtcgggtacgaagctatcggcctcgtggacagttctttacccacagtgggagtgttcgcaaaggcgacggcgcaagacaatcctaagtccgccacggagcagagcgggacggggattaggtcagagtctgaaaccgaatcggaggcttccgaaattacgatcccgccctcgacacccgccgtgccacaggcaccagttcagggagaggactacggcaagggcgtgatcttttatttacgcgataaggtggttgtgggtattgtcctgtggaatatttttaatcggatgcccatcgcaaggaaaattattaaggacggcgaacagcacgaggatttgaatgaggtggccaaactcttcaacatacacgaggat

SEQ ID NO: 48585 - DNA, 783 bp, Artificial Sequence
  derived and/or modified sequence
atggagaaggtcagacgggagggcgtgaaggtaatgcctaacgcaatcgtgcagtctgtgggagtttccagcggcaaactgcttatcaaactgaaggacggcaggaaggtggagaccgaccacatcgtggcggcagtgggcctggagcctaacgtagagctggccaagaccggcggcctggagattgactctgatttcggggggtttcgcgtcaacgcagaactgcaggcccggagtaacatctgggtggcaggtgacgctgcgtgtttttatgatattaagctgggccgtcgacgggtggagcaccacgatcacgcagttgtgtcgggcaggctggctggcgagaatatgaccggcgccgcaaaaccttattggcaccaatcaatgttttggtctgatttgggcccagatgtgggctacgaggccattgggctggtagatagttctttacccacggttggagttttcgccaaggcgaccgctcaggataatcccaagtcggcaaccgagcaatcagggaccggaattcgctccgagagcgagaccgagagcgaggcttctgaaattaccatcccgccttctacgcccgctgtccctcaagcacctgtccagggcgaagactatgggaaaggagtgattttctatttgcgggataaagtggtggtggggatagtcctttggaacatatttaaccggatgcccattgctcggaagatcatcaaagatggcgagcagcacgaagatctgaacgaggtggctaaactgttcaatattcacgaggac

SEQ ID NO: 48586 - DNA, 783 bp, Artificial Sequence
  derived and/or modified sequence
atggagaaggtgcggcgcgagggcgtaaaggttatgcccaatgctatcgtacagtccgtgggcgtctcaagcgggaagctcttgattaagctgaaagacggaagaaaggtcgagacggaccatatcgtggccgcggttgggttggaacccaatgtagaactggccaaaactggcggattggaaatcgatagtgatttcggcggctttcgggtaaacgcagaactgcaggcccgcagcaatatttgggttgccggagatgccgcctgtttctatgatattaagctgggccgccgccgggtagagcatcacgatcatgccgtagttagtggcaggctggcaggcgaaaatatgactggagcagcaaagccctactggcaccagagcatgttttggtcagacctgggacctgacgttggctacgaggcaatagggctggtggactctagcctgcctacagtcggtgtgttcgcaaaagctaccgcacaggacaacccaaagtccgcaacggaacagagcgggaccggtattcggtccgagtcagagacagaaagcgaggcgagcgagatcacgatcccaccttctactcctgccgtcccacaggctccagttcagggagaggattatgggaagggcgttatattctacttgagagacaaagtggtggtgggaattgtgttgtggaacatctttaatagaatgcccattgccagaaagataatcaaggatggagagcagcatgaggacctgaatgaggtggctaagctctttaatatccacgaagac

SEQ ID NO: 48587 - DNA, 783 bp, Artificial Sequence
  derived and/or modified sequence
atggaaaaggtgaggcgggaaggagtgaaggtcatgcctaatgctatagtgcagtcagtgggtgtctcgtccggaaaacttctgattaagctgaaagacggccgaaaggtggaaaccgaccacatagtggccgcggtggggctcgaaccgaacgttgaactggcaaagactggtggattggagattgactcagatttcgggggatttagagtgaacgccgaactgcaagcacggtcaaacatttgggtggcaggagatgctgcatgtttttacgacatcaagctcggtcgtcgccgagtcgaacatcatgatcatgcagtggtttcgggccgtcttgcgggagaaaacatgaccggcgcagctaagccttactggcatcaatccatgttctggtctgatctcggaccagatgtcgggtatgaggcaattggccttgttgatagcagcctccctactgtcggagtgtttgcaaaggcaaccgcccaggacaatccaaagtcagctactgaacagagcggaaccggaatccgctcagagagcgaaacggaatccgaagcctcggagataactatcccacccagcacccctgcagtgccacaagcaccagtgcaaggggaggattacggtaagggcgttatcttctaccttcgagataaagtggtggtcggtattgttctgtggaacatctttaatcggatgcctatcgcacgcaagatcattaaagatggagagcaacatgaggacctcaacgaggtggcaaaattgtttaacatacacgaagat

SEQ ID NO: 48588 - DNA, 783 bp, Artificial Sequence
  derived and/or modified sequence
atggaaaaggtcagacgggaaggggttaaagtgatgcccaatgcaatcgtgcaatcagtgggagtgagctcaggaaaactcctgattaagctcaaagatggacggaaggtcgaaactgatcatatagtcgcagcggtgggacttgagccaaatgtggaacttgccaagaccggaggacttgagatagactccgatttcggcggttttcgggtcaacgccgaactccaggctcggtccaatatctgggtcgcgggagatgcagcatgcttttacgacattaagctgggtcgacggcgcgtcgagcatcacgatcatgcagtcgtgtcaggacgactggcaggagagaatatgactggcgcagcaaagccatattggcaccaaagcatgttttggtcagatcttgggcccgacgtggggtacgaagcgattggactggtggactcgtccttgccaactgtcggggtctttgctaaagccaccgcacaagacaatcctaagagcgcaaccgaacaaagcggaaccggtattcgttccgaatcagagactgaaagcgaggcgtctgaaatcactatacccccttcgacccctgcggtccctcaagctccagtgcagggagaagattacggcaagggagtgatcttttacctgagggataaggtggtggtgggaatcgtgctgtggaatatctttaaccggatgcctattgccagaaagatcattaaggatggggaacaacatgaggatctgaatgaagtcgcaaagctcttcaacatccatgaggac

SEQ ID NO: 48589 - DNA, 783 bp, Artificial Sequence
  derived and/or modified sequence
atggaaaaggtgagaagagaaggtgtcaaggtgatgccgaacgcgatcgtgcagtcggtgggcgtttcgtcggggaagttgctgatcaaactgaaggatggccgcaaagtggagactgatcacatcgtggccgctgtcggactcgaacctaacgtcgaactggcaaagaccggagggctggaaatcgactccgacttcggcgggtttagggtcaacgccgagttgcaggcgcgctcaaacatctgggtggccggagacgcggcctgcttctacgacattaaacttggtagacgcagagtggaacatcacgaccacgctgtggtttctggacggttggccggtgagaatatgactggagccgctaagccgtactggcatcaatccatgttctggtccgacctgggccccgacgtcggatacgaagccatcgggctcgtggatagcagccttcctactgtgggtgtgtttgccaaagccactgcacaggacaacccaaagtcggccaccgaacaatcgggcaccggcattcgctcggagtcagagactgaatcagaagcgtcggagatcacgatccctccctcgacccctgctgtgccacaagctccagtgcaaggggaggactacggtaagggagtgatcttctacctccgcgacaaggtggtggtgggaattgtcctctggaacatcttcaatcggatgccgatcgcccgaaagatcatcaaggacggcgaacaacatgaggatctcaacgaagtggccaagttgttcaatattcacgaggat

SEQ ID NO: 48590 - DNA, 783 bp, Artificial Sequence
  derived and/or modified sequence
atggagaaagtgcggcgcgagggcgtcaaggtcatgcccaacgcgatcgtccaaagcgttggagtctcctcgggaaagctgctgatcaagctcaaagatggccgaaaggtggaaaccgatcacatagtcgcagccgtgggactcgagccgaacgtagagctggcgaaaactggcggcctcgaaatcgactcggacttcggaggcttcagagtgaacgccgagttgcaagcccggtcaaatatctgggtcgccggagatgcagcgtgtttttacgatatcaaactgggccgacgcagagtcgagcaccatgaccatgcggtggttagcggccggctcgcgggagaaaacatgactggagcagctaagccgtactggcaccagtcaatgttctggtccgatctgggtccggacgtggggtatgaggcgattggactcgttgattcctccctcccaacggtcggagtgtttgccaaggcgaccgctcaggataatcctaaatccgcgactgaacaatcgggcaccgggatccggtcagaaagcgagactgaatccgaggccagcgaaatcaccatccctccctcaaccccagccgtcccgcaggcgccggtccaaggagaggactacggaaagggcgtgatcttctacctgagagacaaggtggtcgtggggatcgtcctctggaatatcttcaaccgcatgccgatcgcccgcaagatcatcaaggacggagaacaacatgaagatctgaacgaagtggctaaactgtttaacatccacgaagat

SEQ ID NO: 48591 - DNA, 783 bp, Artificial Sequence
  derived and/or modified sequence
atggagaaagtgcgaagggaaggagttaaagttatgcccaacgccatcgtgcagtcagtcggggtgtcaagtggtaaactgcttatcaaactcaaggatggacgcaaggtcgagactgatcatattgtcgctgcagtcgggctcgagcctaacgtggagctggctaaaacaggaggtctggagatagacagcgacttcggaggctttcgggtaaatgctgagctgcaagcaaggagcaacatatgggtggcgggcgacgcagcctgcttctacgatatcaaactcggtaggagacgagtggagcaccatgaccatgcagtggtgtctggacgcttggctggcgagaacatgactggtgccgccaagccctattggcaccaatccatgttttggtcagatctgggacctgacgtaggctatgaagcaattgggctggtggattccagtctcccaacagtcggcgtcttcgctaaggcgaccgctcaagacaaccctaaatctgcaactgagcaatccggaacagggatacggagcgaatccgagacggagagtgaggccagtgaaataacaattcctccatccaccccagcggtgccacaagctcccgtgcagggggaggactacggtaagggggtaatcttttacctcagagataaggtggtagttgggatagtgttgtggaatatcttcaatcgcatgccaatagcaagaaaaattataaaggatggggaacagcacgaagatctgaacgaagttgctaagctgttcaacattcatgaggat

SEQ ID NO: 48592 - DNA, 783 bp, Artificial Sequence
  derived and/or modified sequence
atggagaaagttcgccgagaaggtgtgaaagtgatgccaaatgctattgtccagtctgttggggtctcatccggaaaactgctgatcaaactgaaggacggacgaaaggtggaaacagatcatattgtggccgctgtaggcttagagccaaatgtcgaactagccaagaccggcggacttgagattgattccgacttcggaggattccgcgttaatgcagagcttcaggccagaagcaacatatgggtggccggagatgcagcctgcttctacgacatcaagctgggccgccggcgcgtcgagcaccacgatcacgcggtggtgagcggtcgcttggcaggggaaaacatgaccggtgccgcgaagccctattggcaccaatccatgttttggtctgatctgggaccagacgtcggctacgaagccataggtctggtggactcatctctccctactgtcggagtatttgccaaggcgaccgcccaagataaccccaaatctgcaactgaacaatctggaacaggtatccggagtgagtcggagaccgaatctgaggcgagcgagatcacaatcccaccttccactcccgccgtgccccaggctcctgtgcagggggaggactatgggaagggcgtgatcttctacttgcgtgacaaagtggtggtcggtatcgtgttgtggaatattttcaacaggatgcccattgcccgaaaaatcataaaggacggagagcagcacgaagatttaaacgaagttgctaagcttttcaatattcacgaagac

SEQ ID NO: 48593 - DNA, 783 bp, Artificial Sequence
  derived and/or modified sequence
atggaaaaagttagacgtgaaggagttaaagttatgcctaatgcaatagttcaatctgtaggagtttcatctggaaagttacttattaaattaaaagacggtagaaaagtagaaacagatcatattgttgcagcagtaggtcttgagcctaatgttgaacttgcaaaaactggaggattagagatagattctgatttcggtggattccgtgttaatgctgaacttcaagcaagatctaatatttgggttgcaggagatgctgcatgcttttatgacattaaattaggaagaagaagagtagaacatcatgatcatgcagttgtatcaggtagattagcaggtgaaaatatgacaggagcagctaagccttattggcatcaatcaatgttctggagtgatcttggaccagatgttggatatgaagcaattggtcttgttgactcaagtcttccaactgtcggagtttttgctaaagcaactgcacaagataatcctaagtcagcaactgagcaatctggaacaggaattagatcagagagtgaaacagaaagtgaagcatcagaaattactattccaccttcaacaccagcagttcctcaagctccagtacaaggtgaagattacggtaaaggagttattttttatttaagagataaagtagttgttggtatcgttctttggaatatctttaatagaatgccaatcgcaagaaaaattataaaagatggagaacaacatgaagatttaaatgaagtagcaaaattgtttaacattcatgaagat

SEQ ID NO: 48594 - DNA, 783 bp, Artificial Sequence
  derived and/or modified sequence
atggaaaaagtcaggagggagggcgttaaggtgatgccaaatgcgatcgtccagtcagttggggtgtcctcgggaaagctgctgataaagctgaaggatggtcgtaaagtcgagacggatcacatcgtggcagccgtaggattggaaccaaacgtagagttggcaaaaaccggcgggcttgagatcgattccgacttcgggggatttcgcgtcaacgccgaattgcaggcaaggtccaatatctgggttgcaggcgacgccgcatgtttctatgacatcaaactaggtaggcggagggtggagcaccatgatcatgcggttgtttcaggacggctagcaggtgagaatatgactggtgcagccaaaccttactggcatcagtcaatgttctggtccgacctgggtcctgatgttgggtacgaagctatcggcctcgtagatagctcactgcccacagtgggagttttcgccaaggccactgcacaggacaaccccaagagcgccactgagcaaagcggcacggggatcaggagcgaaagtgagacggaatccgaagcttcagaaatcaccatccctccttcgactcccgccgtccctcaggcccctgttcagggggaagactatggaaaaggcgttatattttatcttcgggataaggtcgtcgtcggcatcgtgctttggaatatattcaacaggatgcccatcgccaggaaaataatcaaagatggggagcaacacgaagatctgaacgaagttgcgaaactattcaacattcatgaggac

SEQ ID NO: 48595 - DNA, 783 bp, Artificial Sequence
  derived and/or modified sequence
atggaaaaagtccggagagagggcgtgaaagtgatgcctaatgcaattgtgcaatccgtgggagtgtcttccgggaaactgttgatcaagctaaaggatggaaggaaggtggaaaccgaccatatcgttgccgccgtgggactagaaccgaacgtggagctcgccaagacaggcggcctggagatcgattccgactttgggggattccgggttaacgctgagctgcaggcacggagcaatatctgggtggccggcgacgctgcctgtttctatgatatcaaattaggtcgcaggagggtggagcaccacgaccatgcggtggtgtcaggtcgacttgctggcgaaaatatgaccggcgccgctaagccatactggcaccagtctatgttttggagtgatctgggccctgatgtgggatatgaagccattgggcttgtggacagctcgctcccaactgtcggggtgttcgctaaggccacggctcaggacaaccctaaaagtgcaactgaacagtctggaacaggaatacgcagtgaatctgaaacagaatcagaggcaagcgagataactattcctccttctactcccgccgtccctcaagcacccgttcagggtgaggactatggaaagggcgtgattttctatcttcgggataaagtggtcgtgggaatcgtgttatggaacattttcaatcgcatgcctattgcacgcaagattataaaggacggcgagcaacacgaggacctcaacgaggtggcaaagcttttcaatatccacgaagat

SEQ ID NO: 48596 - DNA, 783 bp, Artificial Sequence
  derived and/or modified sequence
atggaaaaggtgaggcgggaaggtgtgaaagtgatgccgaacgcgattgtgcagtccgtgggcgtttcgtcgggcaagctgctgatcaaactcaaagacggtaggaaagtggaaactgaccacatagtggccgcagtgggtctggaacctaacgtcgaactggccaagaccggtggactggagatcgatagcgacttcgggggattccgagttaatgccgagcttcaggctcggtccaacatttgggtggccggagacgctgcctgcttctacgatatcaagttgggaagaaggcgcgtggagcaccatgaccacgcggtggtatcaggcagattggccggggagaacatgaccggagcggcgaaaccgtactggcatcagtcgatgttctggtccgacctcggaccagatgtaggatacgaggctatcggcctcgtcgactcgtctctcccgactgtcggggtctttgccaaggcaaccgcacaagacaatcccaagtccgctaccgagcaaagcggaacgggtatccggagcgaatcagagacggaaagcgaagcatcagaaatcactattcctccatccactccggcagtcccacaggctccggtgcagggtgaggactatggaaagggggtaatcttctacctcagagataaggtcgtggtgggaatcgtcctgtggaacatctttaaccgtatgcccattgctcgtaaaatcatcaaggatggcgagcaacatgaagatctgaatgaagtggccaagctgttcaatatccacgaagat

SEQ ID NO: 48597 - DNA, 783 bp, Artificial Sequence
  derived and/or modified sequence
atggagaaggtcagaagggagggagtcaaggtaatgcctaacgccattgtgcaatccgtgggggttagcagcggaaagcttctgatcaaactgaaggatggtaggaaggtagagaccgaccacatagttgctgcagttggcttggagccaaacgtggagttagccaagacggggggcctcgaaatcgatagtgattttggcggtttccgggtcaacgccgagctccaagctcgaagtaatatctgggtcgcaggcgatgccgcatgtttctatgatattaaacttggccgccggagggtagagcatcatgatcacgctgtcgtaagcggtcgcttggcgggggaaaacatgacaggggctgctaagccctactggcaccaatctatgttttggagtgacctcggcccagacgtgggatacgaggctatcgggcttgttgatagtagccttcccaccgtgggggtcttcgcgaaagcgacagcccaggataaccccaagtcagctactgagcagtccggcacaggcattcggagcgagtccgagacagagagcgaggccagcgagatcaccattcctccctctacccctgctgtccctcaagctccggtgcagggtgaagactacggtaagggagttatcttttacctcagagataaagtcgttgtcggcatcgtcctctggaacatctttaatcggatgccgatcgctaggaagatcatcaaggatggggagcaacatgaggacctgaacgaggtggccaaactctttaacatacacgaagat

SEQ ID NO: 48598 - DNA, 783 bp, Artificial Sequence
  derived and/or modified sequence
atggagaaggtgcgccgggaaggcgtcaaggtcatgcctaatgcgatcgtgcagtccgtcggagtgtcgtccggaaagctgttgatcaagctgaaggacggcagaaaggtggagactgaccacatcgtggccgccgtgggcctggaaccgaacgtggaactcgctaagacgggaggcctggagatcgacagcgacttcggcggatttcgggtgaacgcggagcttcaggcacgttctaatatctgggtggccggtgatgccgcctgcttctacgacattaagctcgggaggcggagagtggaacaccacgatcacgcggtggtgtcaggacgcctcgctggggaaaacatgactggcgcggccaagccgtactggcaccaatccatgttttggtccgatctcggtccagatgtgggctacgaagcgattggtctggtggacagcagccttccgaccgtcggcgtctttgccaaagccactgcgcaagacaatcctaagagcgccactgaacagtcgggaacgggaattagatcggaatcagagactgaatcggaagcctctgaaatcaccatcccgccctcaactccagcagtgccgcaggcgcctgtccagggcgaggactacggaaagggcgtcatcttctatctgcgggataaagtggtggttgggatcgtgctgtggaacatcttcaataggatgccaatcgcgcggaaaatcattaaggatggagaacaacacgaggaccttaatgaggtcgccaaactgttcaacattcacgaggac

SEQ ID NO: 48599 - DNA, 783 bp, Artificial Sequence
  derived and/or modified sequence
atggaaaaagtgcgccgtgaaggcgtgaaagtgatgccgaacgctattgtgcagtcagttggcgtaagttcgggaaagcttctgatcaaactgaaggacggccgcaaggttgaaacggatcacattgtagcggctgtcgggcttgaaccgaatgtagaattagccaagacaggcggcctggaaattgactctgactttggggggtttcgagtcaacgcggagctccaggcaagatcaaatatttgggtagcgggggatgccgcatgtttttatgatataaagctcggccggagaagagtggaacatcatgatcacgcagttgtaagcggcaggttggcaggagaaaatatgacgggagcagcgaaaccatattggcatcaaagcatgttctggtctgacctcggtcccgacgtcggttacgaagcaatagggttagtcgattcctctcttcctacagtcggagttttcgcgaaagctacggcacaggacaatccaaaatcagctacagaacaatcgggaacagggattcgatcagaaagtgagacagaatctgaggcttcggagatcacaatccctccttcaactccagcggtcccgcaggccccggtccagggtgaagattatgggaaaggtgtcattttttatctgcgcgataaagtggtcgtgggtatcgtcctatggaatatttttaatcgcatgcctatagcgaggaaaattattaaagatggggaacagcatgaagatcttaatgaggtcgccaaattatttaatattcacgaggat

SEQ ID NO: 48600 - DNA, 783 bp, Artificial Sequence
  derived and/or modified sequence
atggaaaaggtacgccgggagggcgttaaggtcatgccaaatgcaatcgttcaatctgtcggagttagctctggtaagctattaataaagttgaaagatggccgtaaagtggagacggatcatatcgtggccgccgtagggttggagccaaacgttgagcttgcaaaaaccggggggcttgaaatcgattctgattttggaggttttcgtgtgaacgctgagttacaggcgcgctctaacatctgggtcgccggcgacgccgcgtgcttttatgatataaagctcggccggaggcgagttgagcaccatgaccatgcagtcgtctccgggcggctggctggcgagaacatgacaggcgcggcaaaaccgtactggcatcagagcatgttttggtccgaccttggtccagacgtcggttacgaggctatcggactcgtcgattcgagcttaccaacagtcggtgtgttcgcgaaagcaacagcgcaggacaatccgaagtctgcaactgagcagtccggtacgggtattaggtcggagtcagagactgaaagtgaggctagtgagattaccatccctccttcaaccccagccgttccgcaagccccagtgcagggggaagattacggaaagggcgtcattttctatcttcgagataaggtcgttgtcggaatagttctgtggaacatctttaaccggatgcccattgcaagaaaaatcatcaaggatggagaacagcacgaggaccttaatgaggtcgcaaagcttttcaacatccatgaggac

SEQ ID NO: 48601 - DNA, 783 bp, Artificial Sequence
  derived and/or modified sequence
atggaaaaagtgcggcgtgagggtgtcaaggtgatgccaaacgcgatagtccagtcagtcggcgtgtccagcggtaaactgctcataaaactgaaggacggtcggaaggtggaaaccgatcacatcgtcgctgcagtgggacttgagcctaacgttgaacttgcgaaaaccggcgggcttgagattgattcggattttggcggctttcgggtgaacgctgaactgcaagcccgctccaacatttgggtggcaggcgacgccgcatgcttttacgacattaagctcggacggcgcagagtcgagcaccatgaccatgcagtggtcagcgggcgtctcgcaggtgaaaacatgacgggggcagcaaaaccctactggcatcaaagcatgttttggtccgatctcggtcctgatgtcggatacgaagcgattggactcgtggattcgtcgcttcctaccgtcggtgtgtttgcgaaggcaaccgcacaagataacccaaagtcagctaccgagcaatctggaaccggaattagaagcgaatcggaaactgaatcagaggccagcgaaatcactattccgccatctacccccgcagtgcctcaggccccagtgcagggggaggattacggaaaaggagtcatcttttacctgcgcgataaggtggtggtcggaatcgtcctttggaatatctttaacagaatgccaattgcaaggaagatcatcaaggatggagaacaacatgaagatcttaacgaagttgcaaagttgtttaacattcacgaagat

SEQ ID NO: 48602 - DNA, 783 bp, Artificial Sequence
  derived and/or modified sequence
atggaaaaagtgcggcgcgagggagttaaagtgatgcccaatgcgatagtgcagtccgtgggagtgagctcgggtaagctcttgatcaaactcaaggatggtagaaaagtggaaacggaccatatcgtggccgcggtgggcctggagcctaatgttgaactggcgaaaaccggagggctggagattgattcagatttcggagggttccgagtgaacgcggagctgcaggcccggtccaacatttgggtggcaggagacgcggcatgcttctatgacatcaagttgggccgccggcgtgtggagcaccacgaccacgccgtggtgtctgggaggcttgcaggggagaacatgaccggagccgctaaaccatactggcaccagagcatgttctggtcagacctcggcccagatgtgggctacgaagccatcgggttggtggactcctcactccccactgtgggagtgtttgccaaggcgacggcccaggataatccgaaatcggccactgagcaaagcggcaccggtatccggtcggagtccgaaaccgaatcggaagcctctgagatcaccatccctccctcgaccccggcggttccacaagcaccagtccaaggcgaagattacggcaagggagtgatattctacctcagggacaaagtggtcgtcggaatcgtcctgtggaacatcttcaatcgcatgccgatcgccagaaagattatcaaagacggtgaacaacatgaagatcttaatgaagtggctaagctgttcaacattcatgaagat

SEQ ID NO: 48603 - DNA, 783 bp, Artificial Sequence
  derived and/or modified sequence
atggagaaagtccgcagagaaggtgtaaaggttatgccaaacgccattgtccagagcgttggagtcagcagcggcaagctgcttatcaaacttaaggatggtagaaaagtggagaccgatcacatcgtggccgccgtgggcctcgagcctaacgtcgagctggcaaaaactggaggcttggagattgattctgatttcggcggatttcgggtaaacgcggaacttcaggcgcggagcaacatctgggtcgcaggcgatgccgcttgcttttacgacatcaaattagggagacgccgcgttgagcatcatgatcatgcagttgtgtccggtagacttgcgggggaaaacatgactggggcagcgaaaccgtactggcaccagagtatgttctggtctgacctcggccccgatgtggggtacgaggctatcggactggtggactcatcacttccaacagtcggagtgtttgccaaggccaccgctcaagacaacccaaaatccgccactgagcagtctgggaccggcattaggagcgaaagcgaaacagagagcgaggcatccgagatcactatcccaccttctactcctgccgtgccccaggcacctgtgcagggagaagactacggaaagggcgtgatcttttacctgagggacaaagttgtggtgggtatcgtgctttggaacatttttaatagaatgccaatcgcccgtaagatcattaaagatggcgagcagcatgaagacctgaatgaggtagctaagctttttaatatccatgaggac

SEQ ID NO: 48604 - DNA, 783 bp, Artificial Sequence
  derived and/or modified sequence
atggagaaagttagacgtgaaggggtgaaagtgatgcccaacgccatagtgcagtctgtaggggtatctagtggaaaacttctgatcaaactgaaagatgggaggaaagtggagacagatcacatcgtcgccgccgttggactagaacctaacgtagaactagcaaaaacaggaggactggaaatcgattccgattttggaggatttagggtgaacgcggagcttcaggccagatccaatatctgggtcgcaggagacgccgcctgcttctatgatattaaacttgggcgacggagggtagagcatcacgatcatgcagtggtgagtgggcgcctagccggggaaaatatgacaggagctgctaagccatactggcatcagtccatgttctggtccgatctcggacccgatgtggggtacgaagctataggactcgttgattcttcacttccaacagtaggagtctttgctaaggctactgctcaggataacccaaaaagtgctacagaacagtccggaacagggatccggtcagaatcggaaacagaaagtgaagcatctgaaattactataccaccatccactcccgcagtgccccaggcacccgtacagggggaagattatggaaagggggtgatcttctatctcagagataaagtggtcgtaggaatcgttttatggaacatattcaacaggatgcctatagctcgcaagatcataaaagatggggaacagcatgaggatctgaacgaagtggcaaaactgtttaacatccatgaagat

SEQ ID NO: 48605 - DNA, 783 bp, Artificial Sequence
  derived and/or modified sequence
atggagaaggtgcgcagagaaggtgtgaaagtgatgcctaacgcgatcgtgcaatcggtgggtgtttcgagcggcaagctcctcattaaacttaaagatggaaggaaagtcgagacggatcatattgtggccgcagtgggtcttgaaccgaacgtggagttggcaaagactggcggtcttgagatcgattcggacttcgggggatttagagtcaatgcagagctccaggcgcgttcaaacatttgggtggccggggatgcagcatgtttttacgacattaagctcggccggagacgggtggaacatcatgaccatgccgtcgtgagcggacgcctcgcaggtgaaaacatgaccggtgcagcaaagccatactggcaccagtcgatgttctggtccgatctggggcctgacgtcggttacgaggcaatcggactcgtcgattcgtctctccctaccgtcggagtgtttgcaaaagcaactgctcaagacaatccaaagtcggcaactgaacagtccgggaccggcatcaggtccgaatccgaaactgaaagcgaagcaagcgaaattacgattcctccatcaacgccggcggtgcctcaagctccagttcagggggaagattatgggaaaggtgtgattttctacctccgcgataaggtggtggtggggatcgtcctctggaacattttcaacagaatgcctatagcacgcaagatcattaaggatggagaacagcacgaagatctgaacgaggtggccaaattgtttaacatccacgaagat

SEQ ID NO: 48606 - DNA, 783 bp, Artificial Sequence
  derived and/or modified sequence
atggaaaaagtccgcagagaaggtgtcaaagttatgcccaacgcgatagtgcagagcgttggagtctcgagcggcaaactcctgatcaaacttaaggatggcaggaaggttgaaaccgaccatatagtggcagccgtcggactggaacccaatgtggagttggcaaagaccggtggactcgagattgattccgattttggcggatttcgcgtgaacgcggaacttcaagcaagatctaatatctgggtggcaggtgatgcggcatgtttctacgacattaagctcgggagacgtcgggtcgagcatcatgatcatgccgtcgtctcgggtagactggctggcgagaacatgactggcgcagcgaaaccctactggcaccagtcaatgttctggagcgacctgggcccagatgttggctacgaagcaattggactggtggactcctcgcttcctaccgtcggagtgtttgcgaaagccaccgcacaagataatccaaagtcagcaaccgaacaatccggtacgggaataagatccgaatcagaaaccgaatctgaggctagcgagattactattccaccatcgactcctgcagtgccccaggcacccgtgcagggagaagattacgggaagggagtcattttctacttgagagataaggtcgtggtgggcatcgtgctgtggaacatctttaaccgaatgccgattgctcgaaagattatcaaagacggtgaacaacacgaggatctcaacgaagtggcaaagctgtttaacattcatgaagat

SEQ ID NO: 48607 - DNA, 783 bp, Artificial Sequence
  derived and/or modified sequence
atggaaaaggtgagacgggagggcgtgaaggtgatgcctaacgctattgtgcagagcgtgggtgtgagctcgggaaaactgctgatcaaactgaaagacggccgcaaggtggaaactgaccatatcgtggctgcagtgggtctggaacccaacgtggagcttgcaaagactgggggcttggaaatcgactcagatttcggcgggttcagggtgaacgccgagttgcaggccagatcgaatatctgggtggcgggagatgcagcgtgtttctacgacatcaagctcggcagacggcgggtcgagcaccacgaccacgccgtggtttccggaagattggcaggagaaaacatgaccggtgctgcgaaaccatactggcaccagtcgatgttctggtcggatctgggtccggatgttggatacgaagccatcggcctcgtggactcgtccctgccgaccgtgggagtgttcgccaaggcgaccgcccaggacaacccgaagtcagctaccgaacagtccggaaccggaatccgctcagagtccgagacggaaagcgaggcctccgagatcacgatcccaccgtcgactccggccgtgcctcaagccccggtccagggagaggattacggcaagggagtgattttctacctgagggataaagtggttgtgggaatcgtcctctggaacatcttcaacagaatgccgatcgcgaggaagatcatcaaagacggtgaacaacacgaagatctgaacgaagtggctaaacttttcaacatccacgaggac

SEQ ID NO: 48608 - DNA, 783 bp, Artificial Sequence
  derived and/or modified sequence
atggaaaaggttagacgggagggagtgaaggtcatgcctaacgcaatagtgcagtccgtcggagtgagctccggaaaacttctgattaaacttaaggacggaagaaaggtggaaaccgaccatatcgtcgccgcagttgggcttgaacctaacgtggaactggcaaagaccggaggccttgaaattgatagcgattttggtgggtttcgagtgaatgccgagcttcaagctagatcgaacatttgggtggctggtgatgcagcctgtttctacgacataaagctggggcggcgccgagtggagcaccatgaccatgcagtcgtgtccgggagattggcaggcgaaaacatgacgggggcagcaaagccgtactggcaccaaagcatgttctggtcggacctgggccccgatgttggttacgaggcaattggactggtggactcaagcctgcctactgtcggagtgtttgccaaggccaccgcacaagataatcctaagagcgctaccgaacagagcggcaccggaatccgatccgaatcagaaacggaatcagaggcaagcgaaattactattcctccttccaccccggccgtgccacaggcacctgtccagggagaagattacggaaagggagtgatcttttacctcagagataaggtcgtcgtcggtattgtgctctggaacattttcaaccgcatgcccattgcccgaaagatcattaaggacggagagcagcatgaggacttgaacgaggtggcaaaacttttcaatattcacgaagat

SEQ ID NO: 48609 - DNA, 783 bp, Artificial Sequence
  derived and/or modified sequence
atggagaaagttcgccgcgaaggagtgaaagtgatgccaaacgcaatcgtgcaatccgtcggggtcagctcgggaaagctccttatcaagctgaaggacggtcggaaggtcgaaactgatcacatcgtggccgctgtcggactcgaaccaaacgtcgaactggcgaaaactggaggactggagatcgactctgacttcgggggattccgcgtcaacgccgaactccaagctcggagtaatatctgggtcgcaggagatgccgcgtgcttctacgatatcaaactgggaaggcgccgggtggagcaccacgaccatgcggtcgtgtcggggagactggccggtgagaatatgaccggagcggccaagccgtactggcatcagagcatgttctggtcggacctgggtcctgacgtgggctatgaggccattggactggtcgactcgtcacttccgaccgtgggagttttcgctaaggccacggcccaggacaatccgaagtccgcaactgaacagtcaggaaccggtattcggagcgaatcggagactgagtctgaagcctccgagatcaccattccgccaagcacccctgccgtcccacaagcaccggtgcagggagaagattacggaaagggggtgatcttctacctgcgcgacaaggtggtcgtcgggatcgtgctctggaacatattcaatcgcatgcctatagcacggaagattatcaaggacggagagcagcatgaggatctcaacgaagtggccaagctcttcaacattcacgaggac

SEQ ID NO: 48610 - DNA, 783 bp, Artificial Sequence
  derived and/or modified sequence
atggaaaaagtgaggcgagaaggagtgaaggttatgcccaatgccattgtccagtccgtgggggtgtcttccgggaagttgcttatcaaactgaaggatggcaggaaggtcgagactgatcatatcgtggctgcggtggggttagaaccgaacgtcgagctcgcgaaaaccggcggccttgaaattgattccgactttggaggattccgcgttaacgcggagctgcaggccaggtctaacatttgggtcgccggggatgctgcttgtttttacgacatcaaactcggtcgacgcagagtcgagcatcatgaccacgccgtggtgagtggtcgccttgctggagaaaatatgaccggggccgcaaaaccctactggcatcaaagtatgttctggagtgacctaggccctgatgtgggatacgaggctatcggtctggtcgactcttctttacctaccgtcggcgtattcgcaaaggccacggctcaggacaaccccaaatccgccactgagcaatctggcaccgggatacgttccgagtcggaaaccgaaagcgaggcttccgagatcactattcctccatctacccccgccgtgccacaagcaccagtgcagggagaggattacgggaaaggggtgattttttatttgcgagataaggtcgtcgtggggatagtcctgtggaacattttcaatcgcatgcctatcgcccggaaaatcatcaaagacggcgagcagcacgaagatctcaacgaggtggcaaaactcttcaacattcacgaggat

SEQ ID NO: 48611 - DNA, 783 bp, Artificial Sequence
  derived and/or modified sequence
atggaaaaggtcaggcgggagggagtgaaggtgatgcctaatgccattgtgcagtcggtgggagtctcctcgggaaaactcctgattaagctcaaggatggacggaaagtggaaaccgaccatattgtggcggctgtgggacttgagccgaacgtcgagctggccaagactggcggactcgagatcgattcggacttcggaggattcagagtgaatgcagagctgcaagcgagaagcaacatctgggtggctggagatgcggcatgcttctacgacatcaaactcgggcgcaggcgcgtcgaacaccacgaccacgccgtcgtgtcaggaagattggccggggagaacatgactggagcagcaaagccttactggcatcaatcgatgttctggagcgatctgggaccagacgtcggatacgaagcaatcggattggtcgatagctccctgccaacggtgggcgtgtttgccaaggctactgcccaagataatcccaagagcgccactgaacagtcggggaccggaatccggtccgagtcggaaactgagtcagaagcctccgaaatcaccatccctccttccacgccagctgtgccgcaggccccagttcaaggcgaggattacgggaagggggtcatcttttatctcagagacaaagtggtggtgggtatcgtcctctggaacatattcaaccgcatgcctatcgcccggaagatcatcaaggacggagagcaacacgaagatttgaacgaggtggcgaagctgttcaacatccacgaggac

SEQ ID NO: 48612 - DNA, 783 bp, Artificial Sequence
  derived and/or modified sequence
atggagaaggtgcgcagggaaggtgtcaaggtcatgcctaacgcgatcgtccaatccgtgggagtgtcgtcgggaaagctgcttatcaagctgaaagatggaaggaaagtggaaactgaccatattgtggcagcggtggggcttgaaccgaatgtcgaactggcaaaaactgggggtctggaaatcgattcggactttggtggcttcagggtcaatgcagaactgcaagcaagaagcaacatttgggtagcaggagatgctgcctgcttttacgatatcaagctgggacggcgaagagtggaacaccatgatcacgcggtggtgtcggggcggcttgctggtgagaacatgactggggcagctaagccatactggcatcagtcaatgttttggtccgaccttggcccagacgtgggatacgaagctatcggactggtcgactcgtcattgcctactgtgggggtgtttgcaaaggcaacggcacaagataacccaaagtccgcaaccgagcagtcgggtaccggtattagatcggaatcggaaactgagtccgaggcaagcgaaataaccatccccccttccactccagcagtcccgcaggcgccagtccagggcgaagattacggtaagggagtgattttctatcttagggacaaggtcgtggtgggaattgtcctttggaacatattcaatcgtatgccgatcgctagaaagattatcaaggatggagaacaacatgaagatctcaacgaggtggcaaaattgtttaacatacatgaggat

SEQ ID NO: 48613 - DNA, 783 bp, Artificial Sequence
  derived and/or modified sequence
atggaaaaggttcggcgagaaggagttaaggttatgccaaacgcaatagttcagtctgtcggagtttcttccggtaagttattgattaaattgaaagatgggcgaaaagtagagactgatcacattgttgcagctgttggtcttgaaccaaatgtggagcttgctaaaaccggaggcctcgaaattgattcagactttggcggctttcgggtaaacgcagaactgcaagcacgatccaatatttgggttgcaggagacgctgcatgcttttacgatatcaaattaggtaggagaagagtagaacatcatgatcacgccgtggtaagtggtcgccttgctggagagaatatgacaggagctgccaagccatattggcaccaatcgatgttctggagcgatttagggcccgatgtaggttacgaggctatcggtcttgtcgattcttcattgcctactgtaggtgtctttgcaaaagcgaccgcccaagataatcccaagtccgccacagaacaatccgggactggaattagatcggagtcggaaaccgagtcagaggcttcggaaattacaatccctcctagcaccccggcagtcccacaagctccggtgcagggtgaggattatgggaaaggtgtgattttttacttgagagataaggtcgtcgttgggatagtactctggaatattttcaaccgcatgccaattgcacgtaagattatcaaggatggggagcagcatgaagatttgaacgaagtggcaaaattatttaacattcatgaggat

SEQ ID NO: 48614 - DNA, 783 bp, Artificial Sequence
  derived and/or modified sequence
atggagaaggtccggagggaaggtgtaaaggtgatgcctaatgccatcgtgcagagcgttggggtttccagcgggaagcttcttatcaagctcaaggacggtcggaaagttgaaacagatcatatcgtggccgccgtcgggctcgaacccaacgtcgagctcgcgaagacaggaggacttgagattgattcagactttggagggtttcgggtgaacgccgaattacaagcgagaagcaatatttgggtcgccggggatgctgcatgtttttacgatatcaaattaggccgccggcgtgttgaacaccatgaccacgccgtcgtcagcggcagactggctggagagaacatgactggagccgcaaaaccttattggcatcagtctatgttctggagtgatctcggccctgacgttggctatgaagccataggcctcgttgactccagcctgccaactgtgggcgttttcgcgaaggcgaccgcgcaggataatccgaagagtgcgaccgaacagagcggaactggcattcgctccgaatccgaaactgaatcggaggcctcggagattaccatccctccgagtactcctgccgtcccccaggcacctgtgcaaggtgaagattacggtaaaggcgtgatcttttacctcagggacaaggtcgtcgtcggcatcgtactgtggaacatatttaaccgcatgccgattgcaagaaagatcatcaaagacggggagcagcacgaagatttaaatgaagtcgccaaactcttcaacatccatgaggac

SEQ ID NO: 48615 - DNA, 783 bp, Artificial Sequence
  derived and/or modified sequence
atggaaaaggtgcgtagagaaggggttaaggtgatgccaaatgcaattgtccagtccgtcggcgtgtcgtcgggtaaactcttgattaagctgaaagatggacgcaaggtggagactgatcatatcgttgcagccgtgggtcttgagccgaacgtcgagctcgcaaagacgggcggactggagatagattcggacttcggtggctttcgcgtcaatgcagaactgcaagcacgaagcaacatttgggtcgcaggcgacgcagcgtgtttttacgacattaaactgggcagacgccgtgtggaacaccacgatcatgctgtggtatctggtcgcctggctggagaaaacatgaccggtgccgcaaaaccttactggcaccaaagcatgttttggtcggatctcggtcctgatgtgggatacgaagcgatcgggttggtggactcgtcactgccgactgttggtgtgtttgccaaggccactgctcaggataatcccaagagcgcaactgagcaatctgggactggaataaggtccgaaagcgaaactgaaagcgaagcatccgaaataacgattcccccctccacccctgccgtgccacaggccccagtgcagggcgaagattacgggaagggagtgatattctacctgagggataaggtggtcgtcggtatcgtgctttggaacatcttcaatagaatgccaatcgcccgcaaaatcattaaggacggtgaacaacatgaagatctgaatgaagtggccaaacttttcaatattcatgaggat

SEQ ID NO: 48616 - DNA, 783 bp, Artificial Sequence
  derived and/or modified sequence
atggagaaggtgcggcgggaaggtgtgaaggtgatgccaaacgcgatcgtccagagcgttggagtgtccagcggcaagctgctcatcaagttgaaggatggaagaaaggtggaaaccgatcacatcgtggccgcggtgggattggaacctaacgtggaactcgcaaagaccggaggactggaaatcgacagcgattttggtggattccgcgtcaatgcggagctgcaagcacgctcgaatatctgggtcgctggagacgcagcatgcttctacgacatcaaacttgggcgccgtcgcgtggagcatcacgatcacgcagtggtgtcggggaggctggctggcgagaatatgaccggggcagctaagccctactggcaccagtcaatgttttggtcggacctgggacctgacgtcggctacgaggcaattggattggtcgactcctcactgcctacggtgggcgtgtttgcaaaggcgaccgcccaagacaatcctaaaagcgcgaccgaacagtcgggcacgggaatcaggtccgaatcagaaactgaatcagaagcgtcggagattaccatcccacctagcaccccggcagtgccgcaggccccggtccaaggtgaggactacggtaagggcgtgatcttctacctccgcgacaaggtggtcgtgggaatcgtgctgtggaatatctttaaccggatgccgattgcacgaaaaatcatcaaagacggtgaacaacacgaggatctgaacgaagtggccaagctcttcaacatccatgaagat

SEQ ID NO: 48617 - DNA, 783 bp, Artificial Sequence
  derived and/or modified sequence
atggaaaaagtgcgccgagagggagtcaaagtaatgcccaatgcaattgtccagtcggtgggcgtatccagtggtaaattgctgattaaactcaaggacggcaggaaggttgaaacagatcatatagttgcagcggtggggctggagccaaacgtcgagctggctaaaactggagggctggagattgactccgatttcggtggctttcgggtgaatgctgaacttcaggcccggtctaacatatgggtggccggcgacgcggcgtgtttttatgacattaagctgggccggaggcgagttgagcatcacgatcacgccgtggtgagcggaagactggcaggcgagaatatgacgggagcggctaagccgtactggcatcagtccatgttttggagtgatctcggccctgatgttggttacgaggcaatcggattagtggacagttccctaccaacagtcggggtgttcgctaaggccactgcccaggacaatcccaaaagcgccaccgagcaatcaggcacaggtattaggtccgaatccgaaactgaaagcgaggcaagcgaaatcacgatacctccatcaacccccgccgtgccgcaggcccccgtacagggtgaggactacggaaaaggggtaatcttttacctcagggataaggttgtggtgggcattgtgttatggaatatctttaacaggatgcccattgcccggaagatcataaaagacggagaacagcatgaagacctgaacgaagtcgcaaagctgtttaacatccacgaagac

SEQ ID NO: 48618 - DNA, 783 bp, Artificial Sequence
  derived and/or modified sequence
atggaaaaggtccggagggagggtgtcaaggtgatgccaaatgccatcgtccagtccgtcggcgtgtcatcgggaaagctccttatcaaactgaaggacggacgcaaagttgagactgaccacatcgtggcagccgttgggctggaacccaatgtggagctggccaagaccggaggactggaaatcgacagcgactttggcggattccgcgtgaatgctgaactccaggctaggagcaacatttgggtggccggcgacgctgcgtgcttctacgacattaagctgggaaggcggcgcgtcgagcaccacgaccacgcggtggtgtcaggacggctggcaggcgaaaacatgaccggcgccgccaagccgtactggcaccagtcgatgttctggtccgacctgggcccggacgtcggctacgaggcgatcggactggtcgattcatcgcttccgaccgtgggagtgttcgcaaaggctactgcccaagataacccaaaatcggccaccgaacagtcgggcaccggaatccggagcgaatccgaaaccgaatcagaagcctcggaaatcaccatcccgccaagcacgccggctgtgccacaagcgccggtgcagggggaagattacggtaagggagtgattttctatttgcgggacaaggtggtggtaggaatcgtgctctggaatatctttaatcgcatgcctattgccaggaaaatcatcaaagatggcgagcagcatgaagatttgaacgaagtggcgaaattgtttaacatccatgaggac

SEQ ID NO: 48619 - DNA, 783 bp, Artificial Sequence
  derived and/or modified sequence
atggaaaaggtgaggcgcgaaggggtcaaggtgatgcccaatgccatcgtgcaatccgtgggcgtgtcgagcggtaagttgctgatcaagctgaaggacggacggaaagtggagacggatcatatagtggcagcagtcgggttggaacccaacgtcgaacttgcaaagaccggtgggctggaaatagactcggattttggcggattcagggtcaacgccgaactgcaggcaagatctaatatctgggtggccggagatgcagcgtgtttctacgatatcaaactgggtagacgtcgcgtggaacatcatgaccatgccgtggtgtctggacgtttggccggagaaaacatgaccggcgcggcaaagccgtactggcatcagtccatgttttggtcagatcttggaccagacgtgggctacgaggctattggtctggtggattcatcgctgcctaccgtgggagtgtttgccaaggctaccgcccaagataatcctaaatccgcaactgagcaatcagggactggcatcaggtcggagtccgaaaccgaatcggaagcgtcggagatcactatcccacctagcacccctgcagtcccacaagcaccggtgcagggagaagattatggcaaaggagtgatattctacttgcgagacaaagtggtggtgggaattgtgctgtggaacattttcaaccgtatgcctatagcaagaaagatcattaaggacggtgagcagcatgaggatcttaatgaagtggcaaaactctttaacattcatgaagat

SEQ ID NO: 48620 - DNA, 783 bp, Artificial Sequence
  derived and/or modified sequence
atggagaaggtgcgacgcgaaggagtcaaggtaatgcctaatgcgattgtgcaatccgtgggggtgagttcaggcaagcttctgattaagctgaaggacggtaggaaagtcgagacagaccacatcgttgctgcagtggggttggaacctaatgtcgaattagcaaagactggcggcttagagatcgattctgatttcgggggtttcagggtgaatgccgaactccaagcgaggtctaatatatgggtggcaggcgacgccgcctgtttctacgatatcaaacttggaagaaggagggtggagcaccacgaccacgccgtggtctcgggtcgattggccggggaaaacatgacgggagccgctaagccctattggcatcaatccatgttctggagtgacctcgggcccgatgtaggttacgaagccatcggtttggtagactcctctctgccaacagtgggcgtctttgccaaggcaaccgcacaggacaacccaaaatctgccaccgagcagtcaggaaccggtattaggagtgaaagcgagacagaatctgaagcatcagaaataaccataccacctagtactcctgctgtgccacaggccccagtgcagggggaggattatggcaagggcgttattttttacctgcgggataaagttgtagtgggaatagtcttatggaatatttttaacagaatgcccatcgctcgtaaaatcatcaaggatggagaacagcacgaggacttgaatgaggtggcaaagttgttcaatatacacgaagat

SEQ ID NO: 48621 - DNA, 783 bp, Artificial Sequence
  derived and/or modified sequence
atggaaaaagtacgtagggaaggagtaaaagtgatgcccaatgctatagtacagtccgtgggggtgtctagtggaaaactcttgataaaactgaaagatggaagaaaagtcgaaactgatcacatcgtcgctgctgtggggctggaaccaaacgtggaattagccaaaacagggggactagaaatcgattctgattttggagggtttcgagttaacgccgaactccaggcacggtcgaacatctgggtggcaggagacgccgcatgtttttatgatatcaaactagggaggcggagagtagaacatcacgaccacgcagtggtgtcagggcgacttgccggagagaacatgactggggcagccaaaccatactggcaccagtcaatgttctggtccgatcttgggcctgatgtggggtatgaggccataggattagtcgattcttctttaccaacagttggggtgtttgccaaagcaactgcccaggataaccccaaatccgcaactgaacagagtggaacaggaatcagatccgaatctgaaactgaatccgaagcctctgagatcacaatccctccttccacacccgctgtgcctcaggctccagtgcagggagaagattacgggaagggggtaatcttctatttacgcgataaagttgtcgtagggatcgtgctttggaacatcttcaacagaatgccaatagcacgcaaaataattaaagatggggaacagcacgaagatttaaacgaggtagcaaagctcttcaatattcatgaagat

SEQ ID NO: 48622 - DNA, 783 bp, Artificial Sequence
  derived and/or modified sequence
atggagaaggtgaggagagaaggtgtgaaagtcatgcccaatgcaattgtgcagtctgtcggggtaagttccggaaaactgctgatcaagttgaaggacggacgcaaagtggaaaccgaccatatagtcgctgcggtcggcctggaacccaatgtggagctggctaagactggtggccttgagattgacagcgattttggcggctttcgggtgaacgctgagttgcaggctagaagcaatatctgggtcgcgggggacgctgcgtgcttctatgacattaagcttggccggcggcgagtggaacaccacgaccatgccgtggtgtccggcagactagctggtgaaaatatgacaggagccgccaagccctactggcatcagtcgatgttctggagcgaccttggccctgacgttggctacgaagctatcggattagtggactcatctctgcctactgtcggggtgttcgccaaggctaccgcgcaggataatccgaaatccgccacagagcagagcggtaccgggatccgtagtgaatcagagactgagtccgaagcctctgagatcaccataccaccatcgactcctgccgtgccccaagcgccagtgcagggggaggattacgggaagggcgtgatcttctacctccgcgacaaagtggtggtgggaattgtcctgtggaacattttcaataggatgcccatagctcgaaaaattattaaagacggagagcagcatgaagatctgaacgaggtggccaagctcttcaacattcatgaggat

SEQ ID NO: 48623 - DNA, 783 bp, Artificial Sequence
  derived and/or modified sequence
atggaaaaggtgcggagagaaggagttaaggtcatgcctaacgccatcgtgcagtcagtgggggtttcgtcaggcaagctccttatcaagctcaaggacggacgaaaggtcgaaactgatcacattgtggccgccgtggggctggaacctaacgtggagctggcaaagacgggcgggctggaaatcgatagcgatttcgggggattcagagtgaacgcagagctgcaagcaagatcgaacatatgggtcgcgggagatgcagcatgtttttacgacattaaactgggtcggcggcgggtggagcatcacgaccacgcagttgtgtccggacgtcttgctggagaaaacatgaccggtgcagccaaaccttattggcatcaatctatgttctggtccgacctgggacctgatgtgggatacgaagcgattggacttgtggacagctcgctgcctactgtgggtgtgttcgcaaaagctaccgcccaagataacccaaaaagcgcaaccgaacaaagcggaaccgggattcgttccgagtcggagactgaatcagaagcctccgagataactattccgccctcaactcctgcagtgccccaggcaccggtccagggggaggattatggaaagggtgtgatcttttacttgagagataaagtggtggttggtatcgtgctgtggaacatctttaatcggatgcccattgcccgtaagatcattaaagatggagaacaacacgaagatctcaatgaagtcgccaaactgtttaacattcatgaagat

SEQ ID NO: 48624 - DNA, 783 bp, Artificial Sequence
  derived and/or modified sequence
atggagaaagtccgcagagagggagtcaaggttatgcctaacgcaattgttcaaagtgtcggagtttcaagtggcaaattattgatcaagctgaaggacggtaggaaagtggagactgaccacattgtagccgctgtcggcctcgagcctaacgtcgagctagcaaagaccggcggactggagatcgattcggacttcgggggattccgggtgaatgcagaactgcaggcaagatctaacatctgggtcgccggagacgctgcttgcttttatgatatcaaactgggcagaaggagagtggagcatcacgatcacgccgttgtgtctggaaggcttgctggagagaatatgaccggagccgctaaaccctattggcatcagtccatgttctggagcgacctgggaccagacgttggatatgaggccataggcctggtagatagcagtctacctacagtgggcgtgttcgctaaggctaccgcccaggataatcccaagtcagcaactgaacagagcggcactggcattagatctgagtcagaaaccgaaagcgaggctagtgagatcaccattcccccatctacccctgcggttccacaggcacctgtccagggcgaggactacggaaagggagtgatcttttatctccgggacaaagttgttgtggggatcgtgctgtggaacatcttcaatcgcatgccaattgcgcggaaaattattaaagacggggagcagcatgaggaccttaacgaggtggctaagctattcaacatccatgaggat

SEQ ID NO: 48625 - DNA, 783 bp, Artificial Sequence
  derived and/or modified sequence
atggagaaggttcggcgagagggggtaaaggtgatgcccaatgccatcgtccagagcgtaggcgtgagttctgggaagctgctgattaagctaaaagacggacgcaaggttgaaactgatcatatagtcgctgcagtggggctggagcccaacgtcgaactcgccaaaacgggtgggctcgagatagattctgacttcggtggctttagggttaatgcagaacttcaggcaagatccaacatctgggtggcaggggatgccgcatgtttctatgatatcaagctgggccggagacgggtcgaacatcacgatcacgccgtggtgagcgggcgtttggccggtgaaaacatgaccggagctgccaaaccctattggcatcagtccatgttctggtcagatcttggtcccgacgtggggtatgaagccataggactggttgactcgagtctgcccactgtgggcgtgttcgccaaagcaactgcccaggacaaccctaaatccgctaccgagcagtctggtactggtatccgctccgaaagtgagacagagagtgaggcatctgaaattaccattccgccctccacccccgccgtcccccaggcacccgtccagggggaggactatggcaaaggtgttatcttctatttaagggataaagtagtcgttggcatcgtgctttggaatatatttaacaggatgcctattgctcgtaaaatcatcaaagatggagaacagcacgaggacctgaatgaggtcgcaaagttattcaacatccacgaagac

SEQ ID NO: 48626 - DNA, 783 bp, Artificial Sequence
  derived and/or modified sequence
atggagaaggttcggagagagggcgtgaaagttatgccaaatgccatcgttcagagcgtcggggtgagctcggggaaactcctcataaagctgaaggacggtcgaaaggtagagacggaccatatcgtcgctgcggtaggcctcgaaccgaatgtcgagctcgctaagaccggaggcttggaaattgactcagacttcggcggcttcagagtcaatgcggagctgcaggcccgttctaacatctgggtcgccggagacgctgcatgtttttatgacataaagctggggcgcaggagagtggaacaccacgatcatgctgtcgttagtggccggcttgccggtgagaacatgaccggtgcggccaagccatactggcaccaatcaatgttctggagtgacttgggccccgacgtaggctacgaggcaattggattggtggacagtagtttacctactgtaggagttttcgccaaggcaacagcccaggacaatccaaaatctgctaccgaacaatccggcactggcattcgctctgagtcagagaccgagagtgaagcttctgaaataaccattccgccttccacccccgccgtaccccaggcacccgttcagggggaggactacggcaaaggagttattttttaccttcgagacaaggttgtagtgggcatcgtactatggaacatatttaaccggatgcccattgcaaggaagattatcaaagatggagaacagcacgaagacctcaacgaggtggccaagttgttcaatatccacgaagac

SEQ ID NO: 48627 - DNA, 783 bp, Artificial Sequence
  derived and/or modified sequence
atggaaaaagtcaggcgcgagggagtgaaggtgatgcccaacgcgatagtgcaaagcgtgggggtgtcatccggaaagctgcttatcaagctgaaagatggcagaaaggtagaaaccgaccatattgtggcggccgtgggcctggaaccaaatgtggaactggcaaagactggaggactggaaatcgatagcgatttcggcggtttcagggtcaacgcggaactgcaggcacgttctaacatctgggtggcgggagacgcagcatgtttctatgacattaagctggggcgccggcgcgtcgagcatcacgatcacgcagtggtgtccggccgcctcgccggagaaaacatgactggagcggcgaaaccatattggcaccagtcaatgttctggtccgacttggggccggacgtgggctacgaggcaatcggattggtggattcgtccctcccaacggtcggtgtgttcgccaaggcgactgctcaggacaaccctaaatcggcaacggagcaatccggaaccgggatccggagcgaatcagagactgaatcggaggcctcagaaatcaccattccaccaagcaccccggcagtgccgcaggcacctgtgcagggggaggactacggaaaaggcgttatcttctacttgagagacaaggtggtcgtcggaatcgtgctctggaacattttcaacagaatgccgatcgcccgaaagattatcaaggacggagaacagcatgaagatctgaacgaggtggccaagctcttcaacatccacgaagat

SEQ ID NO: 48628 - DNA, 783 bp, Artificial Sequence
  derived and/or modified sequence
atggaaaaagtacggcgcgagggtgtaaaggtgatgcctaacgctatcgtgcagtccgtaggagtgtcatcgggtaagcttttgataaagctgaaggacggtcgcaaggttgagaccgatcatatcgtggccgctgtgggtttggagcctaacgttgaacttgctaagaccgggggccttgagatcgattcagacttcggcggcttccgagtgaacgctgagttgcaggcacgatctaacatttgggtagctggcgatgctgcttgtttctatgacataaaattagggcggcgcagagtcgagcatcacgaccacgcggttgtttccggccggctggcgggagagaatatgaccggcgctgccaagccttactggcatcagagcatgttttggagtgatctcggaccggacgtggggtatgaggcgattggcctcgtggactcttccctgccaactgtgggggtgttcgccaaagccactgcccaagacaatccgaagagtgccactgaacaatcaggcaccgggatccgtagcgagtccgaaacagaatccgaagcaagtgagatcaccatccctccatccacacccgctgtgcctcaagcacctgtgcagggtgaggactacggaaagggcgtcatcttctatctccgggataaggtggtggtgggcatcgtgctgtggaatatctttaacaggatgccaatcgccaggaagatcatcaaggacggggagcagcatgaggatctaaatgaggtggcaaaactgtttaatatacacgaggac

SEQ ID NO: 48629 - DNA, 783 bp, Artificial Sequence
  derived and/or modified sequence
atggaaaaggtgcgcagagagggcgtgaaagtcatgccgaacgctatagtgcagtcagtcggcgtgtcctcagggaagctgctcatcaagctgaaagacgggcgcaaggtcgaaaccgaccatatagtcgcggccgtgggactggaaccaaacgtggaattggctaaaacgggaggtttggaaatcgattccgatttcggaggattccgcgtcaacgctgaactgcaagcccgatcaaacatctgggtggcgggagatgcggcctgcttttatgacattaagctgggacgtaggcgcgtggagcaccatgatcacgccgttgtgagcggaaggctggctggggaaaacatgactggtgcagccaagccgtactggcaccaatccatgttttggtcggatctcggaccggacgtgggatacgaggcaatcggccttgtcgattcctctctgccaaccgtgggtgtattcgcaaaggccaccgcgcaagacaaccctaagtcagccaccgagcagtcggggactgggatccgcagcgaaagcgagactgaatccgaagcgtcggagattactattccgccgagcacccccgccgtgccacaggctcctgttcagggagaggactacggtaagggggtgatcttctaccttcgcgacaaggtggtcgtcggcatcgtgctctggaatatcttcaaccggatgcccatcgctagaaaaatcatcaaggacggagaacagcacgaggacctgaatgaggtagcaaagctcttcaatatccacgaggac

SEQ ID NO: 48630 - DNA, 783 bp, Artificial Sequence
  derived and/or modified sequence
atggagaaagtgcggcgagaaggagtgaaggtgatgcccaacgccatcgtacagtctgtgggggtcagtagcgggaaacttttgatcaaacttaaggatggaagaaaggtcgaaactgaccatatagtggcagcagtgggtctggaacctaacgtcgaactcgctaagaccggaggtcttgaaatcgattccgacttcggggggttccgggtgaatgccgaactgcaggcacgctcaaacatttgggtcgcaggcgatgctgcatgtttttacgacataaagctgggaaggcgtagagtcgaacatcacgatcacgcagttgtgtcgggcagactggcaggtgagaacatgactggagcggccaaaccatattggcatcagtccatgttttggtcggacctcggccctgacgtgggatacgaagcaatcggactcgtggattcctcgcttccgacggtcggtgtgtttgccaaagcaaccgcccaagacaacccaaaatctgctactgaacaatcaggtaccgggattaggtcggagagtgaaaccgagtccgaggcatccgagattactattcctccgtcaaccccagcagtgccacaagccccagtgcagggagaggattacggcaaaggggtgattttctaccttagagataaggtcgttgtcggaattgtgctttggaacatctttaacagaatgcctatcgcacggaagatcataaaggacggagaacaacacgaagatctgaatgaagtggcaaagctcttcaacattcacgaggat

SEQ ID NO: 48631 - DNA, 783 bp, Artificial Sequence
  derived and/or modified sequence
atggaaaaagtgcgcagagagggagtgaaggtgatgcctaacgcgattgttcagtcagtgggagtgtctagcggaaagctcctgattaaactgaaggacggacgtaaagtggagactgaccacatcgttgccgcggtgggcttggaaccgaatgtggagctggccaagaccggcgggttggagatcgactccgactttgggggattcagggtcaatgctgaactgcaagctcggtcaaatatctgggtggccggagacgctgcatgcttttacgacatcaagctgggccggcgccgcgtggagcaccatgaccatgccgtcgtctccggacgccttgcgggtgagaacatgaccggtgctgcaaagccgtactggcaccagtcaatgttctggtccgatctgggtccggacgtgggatacgaagcgatcggactcgtcgattccagcctcccaactgtgggtgtttttgcgaaggctacggcacaggataaccccaaaagcgccactgaacaaagcggcactggaattcggagcgagtcagaaaccgagtccgaagcgagcgaaatcaccatccctccctcaaccccagcagtcccacaagcgccggtgcagggggaggattacggaaaaggagttatcttctatctccgcgataaggtggtcgtcgggatcgtgttgtggaacattttcaatagaatgccaatagcccggaagatcatcaaggatggcgaacagcacgaagatcttaacgaagtcgctaagttgttcaacatccatgaggac

SEQ ID NO: 48632 - DNA, 783 bp, Artificial Sequence
  derived and/or modified sequence
atggagaaggtgcgtcgcgaaggcgttaaggtgatgccaaatgcaattgtccaatctgtgggagtgtcatcaggaaagctgctcatcaagctgaaagacggaagaaaagtggagactgaccacattgtggcggcagtggggctcgaacctaacgtggaactggcaaagacgggaggacttgaaatcgattctgatttcggcggttttcgggtcaacgcagaactccaggcgcgaagcaacatttgggtcgcaggcgacgcggcctgcttttacgacatcaagctcggacgtaggagagtcgagcaccatgaccacgctgtcgtgtccggacggcttgcaggtgagaacatgactggcgcagccaaaccttactggcatcagtcaatgttttggtctgatcttggacctgatgtgggttacgaagcaatcggacttgtggattcgtcccttccaaccgtcggagtgttcgccaaagcaacggcgcaagataaccctaagtcggcaactgaacagtccggcaccgggattcggtcagaatccgaaactgaaagtgaggcctcggaaataaccattccaccttccactcctgcagtgcctcaagcacccgtgcaaggcgaagattatgggaagggagtgattttctatctgcgagataaggtggtggtcgggattgtcctttggaacatctttaacaggatgccgattgcaagaaagattatcaaggacggtgagcaacacgaagatttgaacgaagtggcaaagttgttcaatatccatgaagat

SEQ ID NO: 48633 - DNA, 783 bp, Artificial Sequence
  derived and/or modified sequence
atggaaaaggtgagacgggagggtgtgaaggtgatgcctaacgcaatcgtgcagtccgtcggcgtttcatccggtaaactcctcatcaagctcaaagatgggagaaaggtggaaaccgaccatatcgtcgctgctgtgggactggaaccgaatgtggaattggccaaaactggaggactggaaatcgattcggatttcggtggcttccgcgtgaacgcagaactccaggcgaggtcaaacatctgggtggccggagatgcagcctgcttctacgacatcaaactgggacgccggagagtcgaacatcacgaccacgccgtggtgtccggacggttggctggcgaaaacatgaccggagccgccaagccctactggcaccagtcaatgttctggagcgatctgggaccggacgtcggttacgaggccatcggactggtggactcgtcgctgccaaccgtgggagtgtttgcgaaggccactgcccaagacaatccgaaatcggccaccgaacagagcggcacgggaatccgctctgagtcggaaaccgaatcagaagcctcggaaatcaccatcccaccgtccactccagccgttccgcaagccccggtgcagggggaggattacggcaagggagtgatcttctatttgcgagataaggtcgtcgtgggcattgtgctgtggaacatattcaaccggatgcccatagcgcgcaagatcatcaaagacggggagcaacacgaggacctgaatgaggtggcgaagttgtttaacatccatgaggac

SEQ ID NO: 48634 - DNA, 783 bp, Artificial Sequence
  derived and/or modified sequence
atggaaaaagttcgtcgtgaaggtgtaaaagttatgccgaatgcgatagtacaatcggtaggtgtatcgtcgggtaaactactaataaaattaaaagatggtcgtaaagtagaaacggatcatatagtagcggcggttggtttagaaccgaatgtagaattagcgaaaacgggtggtttagaaatagattcggattttggtggttttcgtgtaaatgcggaattacaagcgcgatcgaatatatgggtagcgggtgatgcggcgtgtttttatgatataaaattaggtcgtcgacgtgtagaacatcatgatcatgcggttgtatcgggtcgtttagcgggtgaaaatatgacgggtgcggcgaaaccgtattggcatcaatcgatgttttggtcggatctaggtccggatgttggttatgaagcgataggtctagtagattcgtcgttaccgacggtaggtgtatttgcgaaagcgacggcgcaagataatccgaaatcggcgacggaacaatcgggtacgggtatacgatcggaatcggaaacggaatcggaagcgtcggaaataacgataccgccgtcgacgccggcggtaccgcaagcgccggtacaaggtgaagattatggtaaaggtgttatattttatctacgtgataaagtagtagtaggtatagtattatggaatatatttaatcgtatgccgatagcgcgaaaaataataaaagatggtgaacaacatgaagatctaaatgaagtagcgaaattatttaatatacatgaagat

SEQ ID NO: 48635 - DNA, 783 bp, Artificial Sequence
  derived and/or modified sequence
atggaaaaagtccggcgcgagggcgtgaaggttatgccgaacgcgatcgtgcagtccgttggagtttccagcggaaagttgctgatcaaactcaaggatgggcggaaggtcgaaaccgatcacatcgtcgccgctgtgggactggaaccaaacgttgaacttgccaagaccggaggtctcgagattgatagcgatttcggaggattcagggtgaacgcggagctccaggcgcgaagcaacatctgggtagcgggagatgccgcttgtttttacgacatcaaactaggcaggcgccgggtggagcaccacgatcatgccgtcgtctccgggcgccttgcgggggagaatatgaccggcgccgcgaaaccctactggcatcaatcgatgttctggagtgacctgggcccagatgtcggatacgaagccatcggtctcgttgatagcagcctgccaaccgtgggagttttcgcaaaggcaaccgctcaggataaccctaaatccgccactgagcagagcggaactgggatccgctcggaatctgagaccgagtccgaggcctcagaaattacaattccacctagtacccccgctgtcccacaggctcctgtgcagggggaggactatgggaagggggtcatattctatctgcgagacaaagttgtcgttggcatcgtgctctggaacatattcaaccggatgcccattgccaggaagattatcaaagatggcgagcagcatgaggacctcaacgaggtggctaagttgttcaacatccacgaggat

SEQ ID NO: 48636 - DNA, 783 bp, Artificial Sequence
  derived and/or modified sequence
atggagaaggtgagacgcgaaggggtcaaggtcatgcctaacgctatcgtgcagtccgtcggggtatcatccgggaaactcctgataaagttaaaggacggccgcaaagtagaaactgaccacattgtggccgcagtcggcctggagccaaacgtggagctggcaaagactggcggtctagagatagattcggacttcggaggcttcagagtaaatgccgaactgcaagcgcgatcgaacatctgggtggccggagacgccgcttgcttctatgatatcaaacttggccgccgacgagttgagcaccacgaccacgccgtggtttcaggaagactagctggggaaaatatgactggcgccgctaagccttactggcaccagagtatgttttggagcgacctggggcctgatgtaggctacgaggcgattggtctagtcgacagctctctgcccacagttggagtgttcgcaaaagctactgcccaggacaatccaaagtccgctaccgagcagtcaggcaccgggatacgatctgaaagcgaaaccgaatccgaggcatccgaaattactatacctcctagcaccccagcggtgccccaggcaccagttcagggcgaggattatggaaaaggtgttatattctatctccgagataaagtggtggtgggaatcgtcctgtggaacatattcaaccgaatgccgatcgccaggaaaattataaaggatggagagcagcacgaagatttaaacgaggttgcgaagctctttaacatacatgaggat

SEQ ID NO: 48637 - DNA, 783 bp, Artificial Sequence
  derived and/or modified sequence
atggagaaggtgagacgtgagggagtgaaggtcatgccaaacgctatcgtacagagcgtcggcgtgtcctctgggaaactcctgattaaattaaaagatggacgcaaagttgaaacggaccacatagtggccgccgtgggcctggaaccgaacgtcgaactcgccaaaaccggtggccttgagatcgacagcgacttcgggggctttcgcgtaaacgcagaattgcaagcacgaagcaacatctgggtggccggagacgcagcttgcttttacgacatcaagctgggccggaggcgagtggagcatcacgaccatgctgtggtctctggcaggctggctggagagaacatgactggcgccgctaaaccctactggcaccagtccatgttttggtcagaccttgggccagacgtaggctatgaggctatcggcttagttgactccagcctacccaccgtgggtgtgtttgctaaggccacagctcaggacaaccctaaatcagccaccgagcagagcggcactgggatccggagtgagagcgaaaccgagtcggaagcgtccgaaatcaccatccccccatccaccccagcagtcccccaggctcctgtgcagggcgaggattatggtaaaggcgtcatcttttacctcagggataaggttgttgtggggatagtactgtggaatatcttcaaccggatgcccatcgctaggaagattatcaaggatggggagcagcatgaagacttaaacgaggtagcaaagctctttaatattcatgaagat

SEQ ID NO: 48638 - DNA, 783 bp, Artificial Sequence
  derived and/or modified sequence
atggaaaaggtgcgccgcgagggagtcaaggtgatgcctaacgccatcgtgcaatcagtgggagtgtcgtcaggaaagttgctgattaaacttaaggacggtcggaaggttgaaaccgatcatatcgtggcagcggtgggcctggaaccgaacgtcgaactggctaagactggaggtctggagatcgacagcgatttcggaggattccgggtgaacgcagaattgcaggcccggtccaatatctgggtggccggcgatgccgcgtgcttttacgacatcaagctcgggagacgccgggtcgaacaccatgaccacgcagtggtgtccggcaggctcgcgggagaaaatatgactggcgccgcaaagccgtactggcaccaatcgatgttctggtctgacctgggaccggacgtggggtacgaagcaatcggactggtggattcgtccctcccaaccgtcggcgtgttcgccaaagccaccgctcaggacaacccaaaaagcgctactgagcagtcagggactggtatcaggtccgagtccgaaaccgaatcggaggcgagcgagatcaccatcccgcccagcacgccggccgtcccacaggcccccgtgcagggagaggactacggaaaaggcgtgatcttctatctgcgcgacaaggtcgtggttggaatcgtcctttggaacatatttaatcgaatgcctatcgctagaaagattatcaaggacggggagcaacatgaagatctcaatgaagtcgcgaaactgttcaacattcacgaggat

SEQ ID NO: 48639 - DNA, 783 bp, Artificial Sequence
  derived and/or modified sequence
atggaaaaagtccgtcgagagggggtcaaagtaatgcctaatgccatcgtgcagtcagtcggcgtgagttccggaaagctcctcatcaagttgaaggacggacggaaggtggaaaccgatcacatagttgcagcagttggcctcgagcctaatgttgaactggcaaagaccgggggccttgagatcgactcagatttcgggggcttccgcgtaaacgccgagctgcaggccagaagcaacatttgggttgcgggcgatgcagcctgcttttatgacattaaactggggcggcggagagttgaacaccacgaccatgctgtggttagtggcaggttggcaggagagaacatgaccggcgcagcaaaaccgtattggcaccagagcatgttctggagcgatttgggccctgacgtcggttacgaggcgatcgggcttgttgacagctctttgccaaccgtaggggtgtttgcaaaagcgaccgctcaggacaaccccaagtccgcaacggagcagagtgggaccggcattagaagtgagtccgagaccgaaagtgaggccagcgaaattacgatccctcccagtactccagctgtgccacaggcacccgtccaaggagaagactatggcaaaggagttatcttctatttacgggacaaggtcgttgtgggcattgtactctggaacattttcaatagaatgcctatagcccgtaaaattattaaagatggagagcagcatgaagacctcaatgaggtggcgaagttgttcaacatccacgaggat

SEQ ID NO: 48640 - DNA, 783 bp, Artificial Sequence
  derived and/or modified sequence
atggagaaagtcagacgggaaggcgttaaggtgatgccaaacgcaatcgttcaatctgtgggtgtctccagtgggaagttgctcatcaagcttaaagacggcaggaaagtggagacagatcatattgttgccgcggtcggtctggaacctaacgtggagcttgctaagacaggggggctcgagatagattcagatttcggcggttttagggtgaacgctgaattgcaagctaggtctaatatctgggttgcgggcgatgccgcctgcttctacgacattaagctgggaaggcgtcgcgtggagcatcacgatcatgccgtggtaagtggacggctggcaggcgaaaacatgacaggagctgctaaaccatattggcaccagtccatgttctggtctgatctgggccctgacgtgggttacgaagccatcggcttggtggatagcagcctgcccaccgtgggcgtgttcgctaaggccacagcacaggacaacccgaagagcgccaccgagcaatctggcaccggaattagatcggagtcggagacagagtccgaggcttcagaaatcacaatcccaccgagcaccccggctgtaccacaggcaccagtgcagggcgaagactatggtaaaggggtgatattttacctgcgggacaaagtggtggtgggtatcgtcctgtggaacattttcaacaggatgcccatcgcaagaaaaattataaaagacggagagcagcacgaagacctcaacgaagtagcgaagctgttcaacattcacgaagat

SEQ ID NO: 48641 - DNA, 783 bp, Artificial Sequence
  derived and/or modified sequence
atggaaaaagtgaggcgggaaggagtcaaagtgatgccaaatgcaatcgtgcagagcgtgggggtgtcgagcggcaagctcctgatcaagctgaaagatggacgcaaagtggagacggatcacatcgtggcggccgtcgggctggagccgaacgtggaacttgccaagactgggggtctggaaatcgactcggatttcgggggcttcagagtcaacgcagaactccaggcacggtcgaatatctgggtggctggagacgccgcctgtttttacgatatcaaactgggacgacgccgggtggaacatcacgatcacgcggtggtgagcggaagattggctggagaaaatatgaccggggcagcgaaaccatactggcatcagagcatgttctggtcagacctgggcccggacgttgggtacgaggccatcggcctcgtcgactcttccttgccgactgtgggagtgttcgccaaggcaactgctcaggacaacccaaagtcagccacggaacaaagcgggaccggaatccggtcagaaagcgaaactgaaagcgaagctagcgaaatcaccattcctccgtcaacccctgcggtcccgcaggccccggttcaaggagaagactacggaaagggcgtcatcttctacttgagggataaggtggtggtcggcatcgtgctttggaacatcttcaatcggatgccaatcgcacgcaagatcatcaaggacggtgaacagcacgaagacctgaatgaggtcgccaaactgttcaatatccacgaggat

SEQ ID NO: 48642 - DNA, 786 bp, Artificial Sequence
  derived and/or modified sequence
atggagaaggtgagaagagagggcgtgaaggtgatgcccaacgccatcgtgcagagcgtgggcgtgagcagcggcaagctgctgatcaagctgaaggacggcagaaaggtggagaccgaccacatcgtggccgccgtgggcctggagcccaacgtggagctggccaagaccggcggcctggagatcgacagcgacttcggcggcttcagagtgaacgccgagctgcaggccagaagcaacatctgggtggccggcgacgccgcctgcttctacgacatcaagctgggcagaagaagagtggagcaccacgaccacgccgtggtgagcggcagactggccggcgagaacatgaccggcgccgccaagccctactggcaccagagcatgttctggagcgacctgggccccgacgtgggctacgaggccatcggcctggtggacagcagcctgcccaccgtgggcgtgttcgccaaggccaccgcccaggacaaccccaagagcgccaccgagcagagcggcaccggcatcagaagcgagagcgagaccgagagcgaggccagcgagatcaccatcccccccagcacccccgccgtgccccaggcccccgtgcagggcgaggactacggcaagggcgtgatcttctacctgagagacaaggtggtggtgggcatcgtgctgtggaacatcttcaacagaatgcccatcgccagaaagatcatcaaggacggcgagcagcacgaggacctgaacgaggtggccaagctgttcaacatccacgaggactag

SEQ ID NO: 48643 - DNA, 825 bp, Artificial Sequence
  derived and/or modified sequence
atgggcaagatcctgcccgagtacctgagcaactggaccatggagaaggtgagaagagagggcgtgaaggtgatgcccaacgccatcgtgcagagcgtgggcgtgagcagcggcaagctgctgatcaagctgaaggacggcagaaaggtggagaccgaccacatcgtggccgccgtgggcctggagcccaacgtggagctggccaagaccggcggcctggagatcgacagcgacttcggcggcttcagagtgaacgccgagctgcaggccagaagcaacatctgggtggccggcgacgccgcctgcttctacgacatcaagctgggcagaagaagagtggagcaccacgaccacgccgtggtgagcggcagactggccggcgagaacatgaccggcgccgccaagccctactggcaccagagcatgttctggagcgacctgggccccgacgtgggctacgaggccatcggcctggtggacagcagcctgcccaccgtgggcgtgttcgccaaggccaccgcccaggacaaccccaagagcgccaccgagcagagcggcaccggcatcagaagcgagagcgagaccgagagcgaggccagcgagatcaccatcccccccagcacccccgccgtgccccaggcccccgtgcagggcgaggactacggcaagggcgtgatcttctacctgagagacaaggtggtggtgggcatcgtgctgtggaacatcttcaacagaatgcccatcgccagaaagatcatcaaggacggcgagcagcacgaggacctgaacgaggtggccaagctgttcaacatccacgaggactag

SEQ ID NO: 48644 - DNA, 949 bp, Artificial Sequence
  derived and/or modified sequence
gggaaataagagagaaaagaagagtaagaagaaatataagagccaccatggaaaaagtcagacgagagggggttaaggtgatgcccaatgctattgtgcaatccgttggagtcagcagtggcaagttacttatcaagctgaaagacggcaggaaggtagaaactgaccacatagtggcagctgtgggcctggagcccaatgttgagttggccaagactggtggcctggaaatagactcagattttggtggcttccgggtaaatgcagagctacaagcacgctctaacatctgggtggcaggagatgctgcatgcttctacgatataaagttgggaaggaggcgggtagagcaccatgatcacgctgttgtgagtggaagattggctggagaaaatatgactggagctgctaagccgtactggcatcagtcaatgttctggagtgatttgggccccgatgttggctatgaagctattggtcttgtggacagtagtttgcccacagttggtgtttttgcaaaagcaactgcacaagacaaccccaaatctgccacagagcagtcaggaactggtatccgatcagagagtgagacagagtccgaggcctcagaaattactattcctcccagcaccccggcagttccacaggctcccgtccagggggaggactacggcaaaggtgtcatcttctacctcagggacaaagtggtcgtggggattgtgctatggaacatctttaaccgaatgccaatagcaaggaagatcattaaggacggtgagcagcatgaagatctcaatgaagtagccaaactattcaacattcatgaagactgataataggctggagcctcggtggccatgcttcttgccccttgggcctccccccagcccctcctccccttcctgcacccgtacccccgtggtctttgaataaagtctgagtgggcggc

SEQ ID NO: 48645 - DNA, 972 bp, Artificial Sequence
  derived and/or modified sequence
taatacgactcactatagggaaataagagagaaaagaagagtaagaagaaatataagagccaccatggaaaaagtcagacgagagggggttaaggtgatgcccaatgctattgtgcaatccgttggagtcagcagtggcaagttacttatcaagctgaaagacggcaggaaggtagaaactgaccacatagtggcagctgtgggcctggagcccaatgttgagttggccaagactggtggcctggaaatagactcagattttggtggcttccgggtaaatgcagagctacaagcacgctctaacatctgggtggcaggagatgctgcatgcttctacgatataaagttgggaaggaggcgggtagagcaccatgatcacgctgttgtgagtggaagattggctggagaaaatatgactggagctgctaagccgtactggcatcagtcaatgttctggagtgatttgggccccgatgttggctatgaagctattggtcttgtggacagtagtttgcccacagttggtgtttttgcaaaagcaactgcacaagacaaccccaaatctgccacagagcagtcaggaactggtatccgatcagagagtgagacagagtccgaggcctcagaaattactattcctcccagcaccccggcagttccacaggctcccgtccagggggaggactacggcaaaggtgtcatcttctacctcagggacaaagtggtcgtggggattgtgctatggaacatctttaaccgaatgccaatagcaaggaagatcattaaggacggtgagcagcatgaagatctcaatgaagtagccaaactattcaacattcatgaagactgataataggctggagcctcggtggccatgcttcttgccccttgggcctccccccagcccctcctccccttcctgcacccgtacccccgtggtctttgaataaagtctgagtgggcggctctaga

SEQ ID NO: 48646 - RNA, 949 nt, Artificial Sequence
  derived and/or modified sequence
gggaaauaagagagaaaagaagaguaagaagaaauauaagagccaccauggaaaaagucagacgagaggggguuaaggugaugcccaaugcuauugugcaauccguuggagucagcaguggcaaguuacuuaucaagcugaaagacggcaggaagguagaaacugaccacauaguggcagcugugggccuggagcccaauguugaguuggccaagacugguggccuggaaauagacucagauuuugguggcuuccggguaaaugcagagcuacaagcacgcucuaacaucuggguggcaggagaugcugcaugcuucuacgauauaaaguugggaaggaggcggguagagcaccaugaucacgcuguugugaguggaagauuggcuggagaaaauaugacuggagcugcuaagccguacuggcaucagucaauguucuggagugauuugggccccgauguuggcuaugaagcuauuggucuuguggacaguaguuugcccacaguugguguuuuugcaaaagcaacugcacaagacaaccccaaaucugccacagagcagucaggaacugguauccgaucagagagugagacagaguccgaggccucagaaauuacuauuccucccagcaccccggcaguuccacaggcucccguccagggggaggacuacggcaaaggugucaucuucuaccucagggacaaaguggucguggggauugugcuauggaacaucuuuaaccgaaugccaauagcaaggaagaucauuaaggacggugagcagcaugaagaucucaaugaaguagccaaacuauucaacauucaugaagacugauaauaggcuggagccucgguggccaugcuucuugccccuugggccuccccccagccccuccuccccuuccugcacccguacccccguggucuuugaauaaagucugagugggcggc

SEQ ID NO: 48647 - protein, 324 aa, Artificial Sequence
  derived and/or modified sequence
MFRCGGLAAGALKQKLVPLVRTVCVRSPRQRNRLPGNLFQRWHVPLELQMTRQMASSGASGGKIDNSVLVLIVGLSTVGAGAYAYKTMKEDEKRYNERISGLGLTPEQKQKKAALSASEGEEVPQDKAPSHVPFLLIGGGTAAFAAARSIRARDPGARVLIVSEDPELPYMRPPLSKELWFSDDPNVTKTLRFKQWNGKERSIYFQPPSFYVSAQDLPHIENGGVAVLTGKKVVQLDVRDNMVKLNDGSQITYEKCLIATGGTPRSLSAIDRAGAEVKSRTTLFRKIGDFRSLEKISREVKSITIIGGGFLGSELACALGRKDI

SEQ ID NO: 48648 - protein, 237 aa, Artificial Sequence
  derived and/or modified sequence
MKEDEKRYNERISGLGLTPEQKQKKAALSASEGEEVPQDKAPSHVPFLLIGGGTAAFAAARSIRARDPGARVLIVSEDPELPYMRPPLSKELWFSDDPNVTKTLRFKQWNGKERSIYFQPPSFYVSAQDLPHIENGGVAVLTGKKVVQLDVRDNMVKLNDGSQITYEKCLIATGGTPRSLSAIDRAGAEVKSRTTLFRKIGDFRSLEKISREVKSITIIGGGFLGSELACALGRKDI

SEQ ID NO: 48649 - DNA, 975 bp, Artificial Sequence
  derived and/or modified sequence
atgtttcgctgtgggggacttgccgccggggccttgaaacagaagttggtgccactggtaaggaccgtgtgtgtgagatccccgcggcagcgcaatagactgcccggtaacctgtttcagaggtggcacgtgcccctggagttacagatgacccggcagatggccagttctggagcttccggaggaaaaatagataattccgtgctggtcctaatcgtcgggctgtcaaccgtgggcgcaggggcttacgcctacaagacgatgaaggaggatgaaaagaggtataatgaacgaatctctggcttaggacttactcctgaacagaaacaaaagaaagctgccctaagtgcctccgagggagaggaagtgcctcaggataaggcaccttcacacgtcccgtttctcctcataggcggaggaaccgctgcgttcgcggccgcccgctccatccgggcaagagatccgggcgctagggttcttatcgtgagcgaagacccggagttgccctacatgcggccaccactttccaaagagctttggttctcggacgaccccaacgtgactaaaactctgcgcttcaagcagtggaatggaaaagaaaggtctatctatttccagcccccttccttttatgtgtctgcccaggatctgccccacatcgagaacggtggcgtagccgtgttgacgggaaaaaaagtcgtccaactggatgttagggacaacatggtgaaactcaacgacgggtcccagattacctatgagaaatgtctaattgccacaggtggcaccccacgttctctctccgccattgaccgggccggggccgaagtgaagtcccgcacaacgttattccggaaaataggggacttccggtccctggaaaaaatttcccgcgaagttaagagtattaccatcattggcggaggattcctcgggagcgaactcgcttgtgcactcggaaggaaagatatctag

SEQ ID NO: 48650 - DNA, 714 bp, Artificial Sequence
  derived and/or modified sequence
atgaaggaggatgaaaagcgatataatgaacgcattagcggcctcggactaacccccgaacaaaagcaaaagaaggctgcactgtccgcttcagagggagaggaagtgccccaggataaggctcctagccatgtgccgtttctcctcattggtgggggtactgcggctttcgccgcagcccgcagcataagggcccgggaccccggggctcgcgtcctgattgtgtcggaggaccccgagctgccatacatgagaccgcctttgtccaaagaactctggttctccgacgacccaaatgtcacaaagaccctcaggtttaaacagtggaatggaaaagaaaggtccatttactttcaacctccaagtttctatgtgtctgcacaggacctcccccatattgagaacgggggggtggcagtcctcacagggaagaaagtggtccagctggacgtacgggataatatggtcaagctgaatgatggcagccaaatcacttatgaaaaatgcctcatagccacaggagggactccacgctctctttccgcaatcgatcgtgcaggcgctgaggtgaaatcaagaaccacgttatttcgtaaaatcggggattttcgaagtttggagaaaattagcagagaggtgaagtccatcactatcattggcggagggtttctggggtccgaactcgcgtgtgctcttgggcgcaaggatatctag

SEQ ID NO: 48651 - DNA, 975 bp, Artificial Sequence
  derived and/or modified sequence
atgttccgctgtggcggcctggccgccggggccctgaagcagaagctggtgcccctggtgaggacagtgtgtgtgcgcagcccccggcagaggaaccggctgcccggcaacctcttccagcgctggcacgtgcccctggagctgcagatgacccggcagatggccagcagcggggccagcggcggcaagattgacaacagcgtgctggtgctgattgtgggcctgagcacagtgggcgctggggcctatgcctacaagaccatgaaggaggatgagaagcgctacaatgaaagaatcagcggcctgggcctgaccccagagcagaagcagaagaaggccgccctgagcgccagcgagggggaggaggtgccccaggacaaggcccccagccacgtgcccttcctgctgattggaggcggcacagctgcctttgctgctgcccggagcatccgggcccgggaccccggggcccgggtgctgattgtgtctgaggaccctgagctgccctacatgaggcctcccctgagcaaggagctgtggttcagtgatgaccccaacgtgaccaagaccctgcgcttcaagcagtggaatggcaaggagaggagcatctacttccagcccccatccttctacgtgtctgcccaggacctgccccacattgaaaatggaggagtggccgtgctgaccgggaagaaggtggtgcagctggatgtgcgggacaacatggtgaagctgaatgatggcagccagatcacctatgaaaaatgtctcatcgccaccggcggcacccccaggagcctgagcgccatcgacagagctggagctgaggtgaagagcaggaccaccctcttcaggaagattggagacttccgcagcctggagaagatcagccgggaggtgaagagcatcaccatcatcggcggcggcttcctgggcagcgagctggcctgtgccctgggcaggaaggacatctag

SEQ ID NO: 48652 - DNA, 714 bp, Artificial Sequence
  derived and/or modified sequence
atgaaggaggatgagaagcgctacaatgaaagaatttctggcctgggcctgaccccagagcagaagcagaagaaggccgccctgagcgccagcgagggggaggaggtgccccaggacaaggcccccagccacgtgcccttcctgctgattggaggcggcacagctgcctttgctgctgcccggagcatccgggcccgggaccccggggcccgggtgctgattgtgtctgaagatcctgagctgccctacatgaggcctcccctgagcaaggagctgtggttcagtgatgaccccaacgtgaccaagaccctgcgcttcaagcagtggaatggcaaggagaggagcatctacttccagccccccagcttctacgtgtctgcccaggacctgccccacattgaaaatggaggagtggccgtgctgaccgggaagaaggtggtgcagctggatgtgcgggacaacatggtgaagctgaatgatggcagccagatcacctatgagaagtgcctgattgccactggaggcacccccaggagcctgagcgccatcgaccgggccggggctgaggtgaagagcaggaccaccctcttcaggaagatcggggacttccgcagcctggagaagatcagccgggaggtgaagagcatcaccatcattggaggcggcttcctgggcagcgagctggcctgtgccctgggcaggaaggacatctag

SEQ ID NO: 48653 - DNA, 975 bp, Artificial Sequence
  derived and/or modified sequence
atgttccggtgcggcggcctggccgccggcgccctgaagcagaagctggtccctcttgtgcgcaccgtatgcgtgaggagcccaaggcagcgcaatcggctccctgggaacttatttcaacggtggcatgttccgctagaactgcaaatgacccgacagatggcttcttccggggcaagtggtggcaaaatagataactctgtgttggtcctgatcgtcggactgagcaccgttggcgccggggcctacgcatacaagaccatgaaggaggatgagaagagatataacgaaaggatcagcggtctgggactgacacccgagcaaaaacagaagaaggccgccctgtccgcctctgaaggggaagaggtaccccaagacaaagctccatcccatgtaccctttctgctcatcggagggggaacagccgcctttgcagccgcaagaagcattcgtgctagagaccccggtgctagagtgctcatagtctctgaggaccccgagctgccctacatgcgcccccccctctccaaagagttgtggtttagcgacgaccccaatgtcacgaagaccctgcggttcaagcagtggaatgggaaggaaaggtctatttattttcagccaccgagcttctacgtttccgctcaagatcttccacatattgagaacggcggggttgctgttctgaccggaaaaaaggtcgttcagctggatgtgagagataatatggttaagcttaatgatggttcccagatcacctatgaaaagtgcctgattgcaacaggcggtacccccaggtcattaagcgccatcgatagagcaggcgccgaggttaaatctaggactactctgtttcgcaagattggtgacttcagaagtctggaaaaaatcagcagggaggtgaagtcaatcactatcatcgggggagggttcctggggtctgaactcgcatgtgcactggggagaaaagacatttag

SEQ ID NO: 48654 - DNA, 714 bp, Artificial Sequence
  derived and/or modified sequence
atgaaggaggacgagaagcggtacaacgagcggatcagcggcctggggctgacaccagagcagaaacaaaagaaggccgccctgagtgcatccgagggagaggaggtgccccaggacaaggctcccagccacgtcccttttctgctgattgggggcgggacagctgccttcgcagccgccagaagcattcgagctagggaccctggcgcacgagttctgatcgtgagcgaggatcccgagctaccttacatgagaccgccgttgtccaaggaactatggttcagtgacgaccccaacgtgaccaagactctgcgctttaaacaatggaacggaaaagagcgtagcatctatttccagccacccagtttttacgtgtccgctcaagaccttccgcatattgaaaacggcggcgtagctgtgctcaccgggaaaaaggttgtgcaacttgatgtgcgcgataacatggtgaagctgaacgacggatcgcagattacctacgaaaaatgcttgattgccacgggtggaactcctaggagcctgagtgcaatcgaccgcgccggagccgaggtgaagtcccgaaccaccctatttcgcaaaataggggacttccggagcctcgaaaaaatctcccgcgaggtaaagtcaatcaccataataggcgggggattcttaggcagcgaattggcatgtgctctggggcggaaagatatttag

SEQ ID NO: 48655 - DNA, 975 bp, Artificial Sequence
  derived and/or modified sequence
atgttccgatgcggtgggctcgcagctggcgctctgaagcagaagctggtcccgctcgtgcgtacagtttgcgtgcggagccctagacagagaaataggcttcccggtaacctattccagcggtggcatgtgccccttgaacttcagatgacaaggcagatggcaagcagcggggcatccggaggcaagatagataacagcgttctggtgctgattgtcggactgtcaactgtaggggcaggcgcatacgcatataagacaatgaaggaggatgagaaacgctacaatgagcggattagcggactgggtttgacgccagaacagaaacaaaagaaagccgcactgtcggcgtccgaaggagaagaggtaccccaggataaggcgcctagtcatgtcccatttttactcatcggcggtggaaccgcagcgtttgcagcggctcggagtataagagcacgtgatcctggagcaagggtgctcattgtgagcgaggacccagagctgccctacatgaggccacctctctccaaggagctctggttctccgatgaccccaatgtgaccaagacccttaggttcaaacagtggaacgggaaggagcgttcaatctattttcagccgccttccttctatgtgagcgcccaggatctgccgcacatcgagaacggcggagttgctgtcttgactggcaaaaaggttgtccagctcgacgtgcgcgataacatggtaaaactcaacgatggtagtcagatcacctatgagaagtgtctcatcgctactggcggaacccctcgatctctgtctgccatagatcgggctggcgctgaagtgaagagccgcacaacactgtttaggaagattggagacttccgctcattagaaaagatttccagagaggtgaaatccataactatcatcgggggaggatttttgggcagcgaattggcttgcgcgcttggccgaaaagacatttag

SEQ ID NO: 48656 - DNA, 714 bp, Artificial Sequence
  derived and/or modified sequence
atgaaggaggatgaaaagcgttataatgaaagaatctccggcttaggtctgacacctgagcagaagcaaaagaaggccgcactcagtgccagtgagggtgaggaggttccacaagacaaggcgcctagccacgttccatttcttctgatcggtggcggaactgcggcatttgcggcagctcgtagcatccgggcacgagaccctggtgccagagtgttgatcgtgtcagaagatcctgagctcccgtacatgagacctcctctatccaaggagctgtggttcagtgatgaccccaacgtgacaaaaaccctgagattcaagcagtggaatggaaaggaacgttctatctactttcagcctccctcattttacgtgtccgctcaagatcttcctcacattgagaatggaggtgtagcagtgttgaccgggaagaaagtggtccagctggacgtcagggataatatggtcaaacttaatgacggatcgcagataacctatgagaagtgtttgatagctacggggggtactcccagatccctcagtgccatcgatcgcgctggagccgaagttaagtccagaactaccctattccggaagattggagatttccgttctctcgaaaaaattagtcgggaagttaagtccatcaccatcatcggagggggatttcttggatccgagctggcatgcgcccttggacgcaaggatatttag

SEQ ID NO: 48657 - DNA, 2248 bp, Artificial Sequence
  derived and/or modified sequence
tcgccgaaatgttccggtgtggaggcctggcggcgggtgctttgaagcagaagctggtgcccttggtgcggaccgtgtgcgtccgaagcccgaggcagaggaaccggctcccaggcaacttgttccagcgatggcatgttcctctagaactccagatgacaagacaaatggctagctctggtgcatcagggggcaaaatcgataattctgtgttagtccttattgtgggcttatcaacagtaggagctggtgcctatgcctacaagactatgaaagaggatgaaaaaagatacaatgaaagaatttcagggttagggctgacaccagaacagaaacagaaaaaggccgcgttatctgcttcagaaggagaggaagttcctcaagacaaggcgccaagtcatgttcctttcctgctaattggtggaggcacagctgcttttgctgcagccagatccatccgggctcgggatcctggggccagggtactgattgtatctgaagatcctgagctgccgtacatgcgacctcctctttcaaaagaactgtggttttcagatgacccaaatgtcacaaagacactgcgattcaaacagtggaatggaaaagagagaagcatatatttccagccaccttctttctatgtctctgctcaggacctgcctcatattgagaatggtggtgtggctgtcctcactgggaagaaggtagtacagctggatgtgagagacaacatggtgaaacttaatgatggctctcaaataacctatgaaaagtgcttgattgcaacaggaggtactccaagaagtctgtctgccattgatagggctggagcagaggtgaagagtagaacaacgcttttcagaaagattggagactttagaagcttggagaagatttcacgggaagtcaaatcaattacgattatcggtgggggcttccttggtagcgaactggcctgtgctcttggcagaaaggatatatgaaatcagggcatcttttcaggaggatgcttcctattcagaggttgcaaagcacttatgtaagccttaggtgactgcatgggtggaagtgcacagagttcaccatctgaagcttaatctggggccagcagttctgatacctgttgtatttgcgttacaaatgaacttgagcaccgaggccctcatgcccactgtcctctcgagccttgggcacagaagtgattcaactcttccccgagaaaggaaatatgggaaagatcctccccgaatacctcagcaactggaccatggaaaaagtcagacgagagggggttaaggtgatgcccaatgctattgtgcaatccgttggagtcagcagtggcaagttacttatcaagctgaaagacggcaggaaggtagaaactgaccacatagtggcagctgtgggcctggagcccaatgttgagttggccaagactggtggcctggaaatagactcagattttggtggcttccgggtaaatgcagagctacaagcacgctctaacatctgggtggcaggagatgctgcatgcttctacgatataaagttgggaaggaggcgggtagagcaccatgatcacgctgttgtgagtggaagattggctggagaaaatatgactggagctgctaagccgtactggcatcagtcaatgttctggagtgatttgggccccgatgttggctatgaagctattggtcttgtggacagtagtttgcccacagttggtgtttttgcaaaagcaactgcacaagacaaccccaaatctgccacagagcagtcaggaactggtatccgatcagagagtgagacagagtccgaggcctcagaaattactattcctcccagcaccccggcagttccacaggctcccgtccagggggaggactacggcaaaggtgtcatcttctacctcagggacaaagtggtcgtggggattgtgctatggaacatctttaaccgaatgccaatagcaaggaagatcattaaggacggtgagcagcatgaagatctcaatgaagtagccaaactattcaacattcatgaagactgaagccccacagtggaattggcaaacccactgcagcccctgagaggaggtcgaatgggtaaaggagcatttttttattcagcagactttctctgtgtatgagtgtgaatgatcaagtcctttgtgaatattttcaactatgtaggtaaattcttaatgttcacatagtgaaataaattctgattcttctaaattaaa

SEQ ID NO: 48658 - DNA, 975 bp, Artificial Sequence
  derived and/or modified sequence
atgttcagatgcggcggcctggccgccggcgccctgaagcagaagctggtgcccctggtgagaaccgtgtgcgtgagaagccccagacagagaaacagactgcccggcaacctgttccagagatggcacgtgcccctggagctgcagatgaccagacagatggccagcagcggcgccagcggcggcaagatcgacaacagcgtgctggtgctgatcgtgggcctgagcaccgtgggcgccggcgcctacgcctacaagaccatgaaggaggacgagaagagatacaacgagagaatcagcggcctgggcctgacccccgagcagaagcagaagaaggccgccctgagcgccagcgagggcgaggaggtgccccaggacaaggcccccagccacgtgcccttcctgctgatcggcggcggcaccgccgccttcgccgccgccagaagcatcagagccagagaccccggcgccagagtgctgatcgtgagcgaggaccccgagctgccctacatgagaccccccctgagcaaggagctgtggttcagcgacgaccccaacgtgaccaagaccctgagattcaagcagtggaacggcaaggagagaagcatctacttccagccccccagcttctacgtgagcgcccaggacctgccccacatcgagaacggcggcgtggccgtgctgaccggcaagaaggtggtgcagctggacgtgagagacaacatggtgaagctgaacgacggcagccagatcacctacgagaagtgcctgatcgccaccggcggcacccccagaagcctgagcgccatcgacagagccggcgccgaggtgaagagcagaaccaccctgttcagaaagatcggcgacttcagaagcctggagaagatcagcagagaggtgaagagcatcaccatcatcggcggcggcttcctgggcagcgagctggcctgcgccctgggcagaaaggacatctag

SEQ ID NO: 48659 - DNA, 714 bp, Artificial Sequence
  derived and/or modified sequence
atgaaggaggacgagaagagatacaacgagagaatcagcggcctgggcctgacccccgagcagaagcagaagaaggccgccctgagcgccagcgagggcgaggaggtgccccaggacaaggcccccagccacgtgcccttcctgctgatcggcggcggcaccgccgccttcgccgccgccagaagcatcagagccagagaccccggcgccagagtgctgatcgtgagcgaggaccccgagctgccctacatgagaccccccctgagcaaggagctgtggttcagcgacgaccccaacgtgaccaagaccctgagattcaagcagtggaacggcaaggagagaagcatctacttccagccccccagcttctacgtgagcgcccaggacctgccccacatcgagaacggcggcgtggccgtgctgaccggcaagaaggtggtgcagctggacgtgagagacaacatggtgaagctgaacgacggcagccagatcacctacgagaagtgcctgatcgccaccggcggcacccccagaagcctgagcgccatcgacagagccggcgccgaggtgaagagcagaaccaccctgttcagaaagatcggcgacttcagaagcctggagaagatcagcagagaggtgaagagcatcaccatcatcggcggcggcttcctgggcagcgagctggcctgcgccctgggcagaaaggacatctag

SEQ ID NO: 48660 - protein, 1243 aa, Artificial Sequence
  derived and/or modified sequence
MLIKEYHILLPMSLDEYQVAQLYMIQKKSREESSGEGSGVEILANRPYTDGPGGSGQYTHKVYHVGSHIPGWFRALLPKAALQVEEESWNAYPYTRTRYTCPFVEKFSIEIETYYLPDGGQQPNVFNLSGAERRQRILDTIDIVRDAVAPGEYKAEEDPRLYHSVKTGRGPLSDDWARTAAQTGPLMCAYKLCKVEFRYWGMQAKIEQFIHDVGLRRVMLRAHRQAWCWQDEWTELSMADIRALEEETARMLAQRMAKCNTGSEGSEAQPPGKPSTEARSAASNTGTPDGPEAPPGPDASPDASFGKQWSSSSRSSYSSQHGGAVSPQSLSEWRMQNIARDSENSSEEEFFDAHEGFSDSEEVFPKEMTKWNSNDFIDAFASPVEAEGTPEPGAEAAKGIEDGAQAPRDSEGLDGAGELGAEACAVHALFLILHSGNILDSGPGDANSKQADVQTLSSAFEAVTRIHFPEALGHVALRLVPCPPICAAAYALVSNLSPYSHDGDSLSRSQDHIPLAALPLLATSSSRYQGAVATVIARTNQAYSAFLRSPEGAGFCGQVALIGDGVGGILGFDALCHSANAGTGSRGSSRRGSMNNELLSPEFGPVRDPLADGVEGLGRGSPEPSALPPQRIPSDMASPEPEGSQNSLQAAPATTSSWEPRRASTAFCPPAASSEAPDGPSSTARLDFKVSGFFLFGSPLGLVLALRKTVMPALEAQMRPACEQIYNLFHAADPCASRLEPLLAPKFQAIAPLTVPRYQKFPLGDGSSLLLADTLQTHSSLFLEELEMLVPSTPTSTSGAFWKGSELATDPPAQPAAPSTTSEVVKILERWWGTKRIDYSLYCPEALTAFPTVTLPHLFHASYWESADVVAFILRQVIEKERPQLAECEEPSIYSPAFPREKWQRKRTQVKIRNVTSNHRASDTVVCEGRPQVLSGRFMYGPLDVVTLTGEKVDVYIMTQPLSGKWIHFGTEVTNSSGRLTFPVPPERALGIGVYPVRMVVRGDHTYAECCLTVVARGTEAVVFSIDGSFTASVSIMGSDPKVRAGAVDVVRHWQDSGYLIVYVTGRPDMQKHRVVAWLSQHNFPHGVVSFCDGLTHDPLRQKAMFLQSLVQEVELNIVAGYGSPKDVAVYAALGLSPSQTYIVGRAVRKLQAQCQFLSDGYVAHLGQLEAGSHSHASSGPPRAALGKSSYGVAAPVDFLRKQSQLLRSRGPSQAEREGPGTPPTTLARGKARSISLKLDSEE

SEQ ID NO: 48661 - DNA, 3732 bp, Artificial Sequence
  derived and/or modified sequence
atgctgatcaaggagtaccacatcctgctgcccatgagcctggacgagtaccaggtggcccagctgtacatgatccagaagaagagcagagaggagagcagcggcgagggcagcggcgtggagatcctggccaacagaccctacaccgacggccccggcggcagcggccagtacacccacaaggtgtaccacgtgggcagccacatccccggctggttcagagccctgctgcccaaggccgccctgcaggtggaggaggagagctggaacgcctacccctacaccagaaccagatacacctgccccttcgtggagaagttcagcatcgagatcgagacctactacctgcccgacggcggccagcagcccaacgtgttcaacctgagcggcgccgagagaagacagagaatcctggacaccatcgacatcgtgagagacgccgtggcccccggcgagtacaaggccgaggaggaccccagactgtaccacagcgtgaagaccggcagaggccccctgagcgacgactgggccagaaccgccgcccagaccggccccctgatgtgcgcctacaagctgtgcaaggtggagttcagatactggggcatgcaggccaagatcgagcagttcatccacgacgtgggcctgagaagagtgatgctgagagcccacagacaggcctggtgctggcaggacgagtggaccgagctgagcatggccgacatcagagccctggaggaggagaccgccagaatgctggcccagagaatggccaagtgcaacaccggcagcgagggcagcgaggcccagccccccggcaagcccagcaccgaggccagaagcgccgccagcaacaccggcacccccgacggccccgaggccccccccggccccgacgccagccccgacgccagcttcggcaagcagtggagcagcagcagcagaagcagctacagcagccagcacggcggcgccgtgagcccccagagcctgagcgagtggagaatgcagaacatcgccagagacagcgagaacagcagcgaggaggagttcttcgacgcccacgagggcttcagcgacagcgaggaggtgttccccaaggagatgaccaagtggaacagcaacgacttcatcgacgccttcgccagccccgtggaggccgagggcacccccgagcccggcgccgaggccgccaagggcatcgaggacggcgcccaggcccccagagacagcgagggcctggacggcgccggcgagctgggcgccgaggcctgcgccgtgcacgccctgttcctgatcctgcacagcggcaacatcctggacagcggccccggcgacgccaacagcaagcaggccgacgtgcagaccctgagcagcgccttcgaggccgtgaccagaatccacttccccgaggccctgggccacgtggccctgagactggtgccctgcccccccatctgcgccgccgcctacgccctggtgagcaacctgagcccctacagccacgacggcgacagcctgagcagaagccaggaccacatccccctggccgccctgcccctgctggccaccagcagcagcagataccagggcgccgtggccaccgtgatcgccagaaccaaccaggcctacagcgccttcctgagaagccccgagggcgccggcttctgcggccaggtggccctgatcggcgacggcgtgggcggcatcctgggcttcgacgccctgtgccacagcgccaacgccggcaccggcagcagaggcagcagcagaagaggcagcatgaacaacgagctgctgagccccgagttcggccccgtgagagaccccctggccgacggcgtggagggcctgggcagaggcagccccgagcccagcgccctgcccccccagagaatccccagcgacatggccagccccgagcccgagggcagccagaacagcctgcaggccgcccccgccaccaccagcagctgggagcccagaagagccagcaccgccttctgcccccccgccgccagcagcgaggcccccgacggccccagcagcaccgccagactggacttcaaggtgagcggcttcttcctgttcggcagccccctgggcctggtgctggccctgagaaagaccgtgatgcccgccctggaggcccagatgagacccgcctgcgagcagatctacaacctgttccacgccgccgacccctgcgccagcagactggagcccctgctggcccccaagttccaggccatcgcccccctgaccgtgcccagataccagaagttccccctgggcgacggcagcagcctgctgctggccgacaccctgcagacccacagcagcctgttcctggaggagctggagatgctggtgcccagcacccccaccagcaccagcggcgccttctggaagggcagcgagctggccaccgacccccccgcccagcccgccgcccccagcaccaccagcgaggtggtgaagatcctggagagatggtggggcaccaagagaatcgactacagcctgtactgccccgaggccctgaccgccttccccaccgtgaccctgccccacctgttccacgccagctactgggagagcgccgacgtggtggccttcatcctgagacaggtgatcgagaaggagagaccccagctggccgagtgcgaggagcccagcatctacagccccgccttccccagagagaagtggcagagaaagagaacccaggtgaagatcagaaacgtgaccagcaaccacagagccagcgacaccgtggtgtgcgagggcagaccccaggtgctgagcggcagattcatgtacggccccctggacgtggtgaccctgaccggcgagaaggtggacgtgtacatcatgacccagcccctgagcggcaagtggatccacttcggcaccgaggtgaccaacagcagcggcagactgaccttccccgtgccccccgagagagccctgggcatcggcgtgtaccccgtgagaatggtggtgagaggcgaccacacctacgccgagtgctgcctgaccgtggtggccagaggcaccgaggccgtggtgttcagcatcgacggcagcttcaccgccagcgtgagcatcatgggcagcgaccccaaggtgagagccggcgccgtggacgtggtgagacactggcaggacagcggctacctgatcgtgtacgtgaccggcagacccgacatgcagaagcacagagtggtggcctggctgagccagcacaacttcccccacggcgtggtgagcttctgcgacggcctgacccacgaccccctgagacagaaggccatgttcctgcagagcctggtgcaggaggtggagctgaacatcgtggccggctacggcagccccaaggacgtggccgtgtacgccgccctgggcctgagccccagccagacctacatcgtgggcagagccgtgagaaagctgcaggcccagtgccagttcctgagcgacggctacgtggcccacctgggccagctggaggccggcagccacagccacgccagcagcggcccccccagagccgccctgggcaagagcagctacggcgtggccgcccccgtggacttcctgagaaagcagagccagctgctgagaagcagaggccccagccaggccgagagagagggccccggcaccccccccaccaccctggccagaggcaaggccagaagcatcagcctgaagctggacagcgaggagtag

SEQ ID NO: 48662 - DNA, 3732 bp, Artificial Sequence
  derived and/or modified sequence
atgctgataaaagagtaccacatcttactaccaatgtccctggacgagtaccaggttgcccagctgtatatgatccagaaaaagtctagagaggagtcctccggagaaggtagcggcgtggaaatcctggccaaccgtccgtacacagacggacctggagggtctgggcagtatactcacaaggtgtatcacgtcggttctcacatccccggctggtttagggctctgctgcctaaagctgcacttcaggtggaagaggagagctggaacgcctatccttatacccgcactcgttacacctgtccgtttgtagaaaaattcagcatagagattgaaacgtactacctgccagacggcggtcagcagccaaacgtgttcaatctgtccggcgccgaacgcaggcagagaatacttgacaccatcgacatcgtacgcgatgcagttgctcctggcgagtacaaagccgaggaggacccgagactgtaccactccgtgaaaacagggaggggccccctgtcagatgactgggcccggaccgccgcccaaacgggccccctcatgtgtgcttacaagctttgcaaagtggagtttcgttattggggaatgcaggcaaaaatagagcagtttatacatgacgtcgggctgcgccgtgtgatgctgcgggctcaccgccaagcctggtgctggcaggatgaatggacggaactgtctatggctgacatccgggccctagaggaggaaactgctcgtatgctcgcccagcggatggcaaagtgcaatacaggcagcgaggggtccgaagctcaaccacctggaaagccctcaaccgaggcgagatcggcagctagtaatactgggactcctgatgggccagaggcacccccgggcccggacgcttcccctgacgcgtcttttgggaagcaatggtcttccagcagcaggtcgagctactcatcccagcacggcggcgcagtaagcccccagtctttaagtgaatggcgcatgcagaatatcgctcgtgactctgaaaactccagcgaggaggagttctttgatgcccatgagggattctccgattccgaggaggtgtttccaaaggagatgacaaaatggaactcaaacgacttcatcgacgccttcgccagccccgtggaagccgagggcactccagagcccggcgctgaagctgccaagggcatcgaggacggcgcccaagcccctagagacagtgaaggcctcgacggcgcaggcgagctcggcgcagaagcttgtgctgtccatgctctgtttctcatcttgcactctggcaatattctggactccggccctggtgacgctaacagtaaacaggcagacgtccaaacactaagctctgctttcgaggccgtaaccaggatccattttcccgaggctctgggccacgtagccctgagactggtgccatgccctcctatatgcgcagccgcttatgccctagtctccaacctgagtccttatagccacgacggtgactctctgagccggagccaagaccatattccactggctgcccttcccctcctggccacctccagctcacgatatcagggtgcagttgcgactgtaatagcgcgaaccaatcaagcctactcagccttcttgcggagccccgagggagcaggtttctgcgggcaggttgccttaataggcgacggagttggtggaattcttggttttgatgccttgtgccatagtgcgaacgctgggacaggatctaggggcagctcgcggagaggctccatgaataatgaattgctgtcgcctgaatttggccccgtgagagatccgctagccgatggggttgaagggctaggccgggggagtcctgaaccgtctgcattgccaccccaacgcattccatccgatatggctagtcccgaaccagaaggatcccaaaacagcctccaggcagcaccggcaaccacaagcagctgggagccacggcgcgccagtacagctttctgccccccagccgcttcctccgaagctcccgacggtccctcaagcaccgctagactcgattttaaggtatctgggttcttcctcttcggtagtccgcttggcctggtcctcgctctgcggaagaccgtcatgcccgccctcgaggcccagatgaggccagcatgcgagcagatctacaatttgttccacgctgccgacccatgcgcgtcgcggctcgaacccctgctggcccccaaatttcaggcaattgcaccactcacggtgccccgataccagaagtttcccctcggcgatggatcatcgctcctgttagcagatactctacagacccactctagtctcttcctggaggagctagagatgctggtgccaagcacaccaacaagcacgtccggcgccttttggaagggctctgagctggccaccgatccaccggctcagcctgccgccccaagcaccacctctgaggttgtgaagattctggagcgctggtggggtacaaaaaggatcgactactcactgtactgtcctgaggccctgacagcctttccgaccgtaacccttcctcacctcttccatgcctcgtattgggaaagcgctgatgtcgtcgctttcatcttgagacaggttattgaaaaggagcggccccagcttgccgagtgcgaggagccatcgatctactccccggcatttccacgtgagaaatggcagcggaagaggacacaggtcaagatacgaaacgtcacctcaaatcacagggcatctgatactgtagtgtgcgagggccgcccgcaggtgctaagtggcaggtttatgtatggccccttagatgtggtgacactcacaggggagaaggtggacgtctacattatgacgcagcccctctcagggaagtggattcactttggaactgaagtgactaatagctccggaaggctcaccttcccagtccctcccgagagagctctgggcataggtgtatatcccgtccggatggtggtgagaggcgatcatacttatgcagagtgttgtcttactgtagtggcacggggaaccgaggctgtggtttttagtatcgacggtagcttcacggcttctgtaagtatcatggggtctgatcccaaggttcgggcgggtgctgtcgatgtcgtgcggcattggcaggactctggctacctgatcgtctacgttaccggaaggcccgacatgcagaagcaccgagtagtcgcgtggctgtctcagcataacttcccgcacggggtggtctcattctgtgacggcctcacccacgaccctctcagacaaaaagcaatgtttttgcagtccctggtccaagaagtcgagttgaacattgtagcaggctacggctctccaaaagatgtggcggtttacgccgctctgggtctctccccaagtcagacatatattgtaggaagagcggtccggaagctgcaggcacaatgtcagtttctgtccgacgggtatgtggcccacctgggtcaactcgaagctggaagccactctcacgcatcttcaggtccacctcgggccgcgctcggtaaatcaagctatggggtcgcagcccctgtcgatttcctgcgcaaacaaagccagctcctgcggtccagaggcccgagccaggctgagcgggagggacctggaacacccccaacaactctggcacggggcaaggctaggagcatatccttgaaattggattccgaggaatag

SEQ ID NO: 48663 - DNA, 3732 bp, Artificial Sequence
  derived and/or modified sequence
atgctgatcaaggagtaccacatcctgctgcccatgagcctggatgagtaccaggtggcccagctgtacatgatccagaagaagagccgggaggagagcagcggggagggcagcggcgtggagatcctggccaaccggccctacacagatggccctgggggcagcggccagtacacccacaaggtgtaccacgtgggcagccacatccctggctggttccgggccctgctgcccaaggccgccctgcaggtggaggaggagagctggaatgcctacccctacaccaggacccgctacacctgcccctttgtggagaagttcagcattgaaattgagacctactacctgcctgatggcggccagcagcccaacgtgttcaacctgtctggagctgagcggcggcagaggatcctggacaccattgatattgtgagagatgctgtggcccctggagagtacaaggccgaggaggacccccggctgtaccacagcgtgaagacaggccggggccccctgagtgatgactgggccaggacagctgcccagacaggccccctgatgtgtgcctacaagctgtgcaaggtggagttccgctactggggcatgcaggccaagattgagcagttcatccatgatgtgggcctgcggcgggtgatgctgcgggcccaccggcaggcctggtgctggcaggatgagtggacagagctgtccatggctgacatccgggccctggaggaggagacagccaggatgctggcccagaggatggccaagtgcaacacaggcagcgagggcagcgaggcccagcccccaggcaagcccagcacagaggcccggtctgctgccagcaacacaggcaccccagatggccctgaggcccctcctggcccagatgccagcccagatgccagctttgggaagcagtggagcagcagcagccgcagcagctacagcagccagcacggcggcgctgtgagcccccagagcctgtctgagtggaggatgcagaacatcgcccgggacagcgagaacagcagcgaggaggagttctttgatgcccacgagggcttcagtgacagcgaggaggtgttccccaaggagatgaccaagtggaacagcaatgacttcattgatgcctttgccagccctgtggaggccgagggcaccccagagcccggggctgaggccgccaagggcattgaagatggagcccaggccccccgggacagcgagggcctggatggagctggggagctgggcgctgaggcctgtgctgtgcacgccctcttcctgatcctgcacagcggcaacatcctggacagcggccctggagatgccaacagcaagcaggctgatgtgcagaccctgagcagcgcctttgaggccgtgacccgcatccacttccctgaggccctgggccacgtggccctgcggctggtgccctgcccccccatctgtgccgccgcctatgccctggtgagcaacctgagcccctacagccatgatggagacagcctgagccgcagccaggaccacatccccctggccgccctgcccctgctggccaccagcagcagccgctaccagggcgctgtggccaccgtcatcgcccggaccaaccaggcctacagcgccttcctgcggagccctgagggcgccggcttctgtggccaggtggccctgattggagatggagtgggcggcatcctgggctttgatgccctgtgccacagcgccaatgccggcaccggcagccggggcagcagccggcggggctccatgaacaatgagctgctgagccctgagtttggacctgtgcgggaccccctggctgatggagtggagggcctgggccggggcagccctgagcccagcgccctgcccccccagaggatccccagcgacatggccagccctgagcctgagggcagccagaacagcctgcaggccgccccagccaccaccagctcctgggagccccggcgggccagcacagccttctgccccccagctgccagcagcgaggccccagatggccccagcagcacagcccggctggacttcaaggtgtctggcttcttcctgtttggcagccccctgggcctggtgctggccctgaggaagacagtgatgcctgccctggaggcccagatgaggcctgcctgtgagcagatctacaacctcttccacgccgctgacccctgtgccagccggctggagcccctgctggcccccaagttccaggccatcgcccccctgactgtgccccgctaccagaagttccccctgggagatggcagcagcctgctgctggccgacaccctgcagacccacagcagcctcttcctggaggagctggagatgctggtgcccagcacccccaccagcaccagcggggccttctggaagggcagcgagctggccacagatcctccagcccagcctgctgcccccagcaccaccagcgaggtggtgaagatcctggagcgctggtggggcaccaagagaattgactacagcctgtactgcccagaggccctgacagccttccccaccgtgaccctgccccacctgttccacgccagctactgggagagcgcagatgtggtggccttcatcctgcggcaggtgattgagaaggagcggccccagctggctgaatgtgaggagcccagcatctacagccctgccttcccccgggagaagtggcagaggaagaggacccaggtgaagatcagaaatgtgaccagcaaccaccgggccagtgacacagtggtgtgtgagggccggccccaggtgctgagcggccgcttcatgtatggccccctggatgtggtgaccctgactggagagaaggtggatgtgtacatcatgacccagcccctgagcggcaagtggatccactttggaacagaggtgaccaacagcagcggccgcctgaccttccctgtgcccccagagcgggccctgggcatcggcgtgtaccctgtgaggatggtggtgcggggggaccacacctatgcagagtgctgcctgactgtggtggcccggggcacagaagctgtggtgttcagcattgatggcagcttcaccgcctctgtgtccatcatgggcagtgaccccaaggtgcgggccggggctgtggatgtggtgcgccactggcaggacagcggctacctgattgtgtatgtgacaggccgcccagacatgcagaagcaccgggtggtggcctggctgagccagcacaacttcccccacggcgtggtgtccttctgtgatggcctgacccatgaccccctgcggcagaaggccatgttcctgcagagcctggtgcaggaggtggagctgaacatcgtggccggctacggcagccccaaggatgtggccgtgtatgctgccctgggcctgagccccagccagacctacatcgtgggccgggctgtgaggaagctgcaggcccagtgccagttcctgagtgatggctacgtggcccacctgggccagctggaggccggcagccacagccacgccagcagcggccccccccgggccgccctgggcaagagcagctatggagtggccgcccctgtggacttcctgaggaagcagagccagctgctgcggagccggggccccagccaggccgagcgggagggccctggcaccccacccaccaccctggcccggggcaaggcccggagcatcagcctgaagctggacagcgaggagtag

SEQ ID NO: 48664 - DNA, 3732 bp, Artificial Sequence
  derived and/or modified sequence
atgctgatcaaggagtaccacatcctgctgcccatgagcctggacgagtaccaggtggcacagctgtatatgattcagaaaaaatcgcgcgaggagtcctctggtgagggaagtggggtggagatcctcgccaaccgcccctataccgatgggccaggcggtagcggtcagtacacacataaagtgtaccatgtagggagccacatacctggatggtttagggcactgctgcccaaagcggcgttgcaggttgaagaagaaagttggaacgcatatccatatactaggactaggtatacctgtccctttgtggagaagtttagcatagaaattgagacttactatctgccagacggggggcagcaacccaacgtctttaatctcagcggggctgaacggcgccagcgtatcctggataccatcgacattgtaagagatgcagtcgctcccggcgaatataaggctgaagaagatccacggctgtaccattccgtgaagacgggtaggggccctctcagcgacgactgggcgaggacagctgctcagaccggtccccttatgtgcgcgtacaagctatgcaaggtcgagttccgctattgggggatgcaggccaaaattgagcaatttatacatgatgtgggtctccgaagagtaatgctgagggcccatcgacaggcgtggtgctggcaggacgagtggacggaactctccatggccgacataagggccctggaggaagagactgctcggatgttagcgcagagaatggccaaatgcaataccggatcagaaggaagtgaagcccagccccctggcaaacctagcacggaagcacgcagtgcagcatcgaacacagggactcctgacggccccgaggcccccccaggccccgacgcttcgcctgacgcatcctttggaaagcaatggtccagttcatcaaggtcgtcttattctagccagcacggaggtgctgtctcaccacagagtttgagcgagtggcgcatgcaaaacattgcaagggacagcgaaaatagcagtgaggaagaattctttgatgctcacgaagggtttagtgactccgaggaagtgtttcccaaggagatgaccaagtggaattcgaatgactttatcgacgctttcgcgagtccggtggaggctgagggaacacctgaaccgggcgctgaggcggccaaagggatcgaagacggcgctcaggcgcctcgcgactctgaggggttagatggagctggagagttgggagccgaagcctgcgccgtccatgcactcttccttatcttacactctgggaatatcctagattctgggccgggagatgctaactcaaagcaggctgacgttcaaacactctcctcagccttcgaagcagtgacaagaattcatttccctgaagcactcggccacgtcgcactcagactggtaccctgccccccgatctgcgcagctgcctatgctttggtgagcaacctgagcccgtactcacatgatggggatagcttgtctcgttcccaggaccacattccactggctgctcttccgctgctggcgacatcaagctcaagataccagggggcagtcgcaaccgtaatagcgaggacaaaccaggcatacagtgcattccttcgcagtcccgagggggccggattttgcgggcaggttgccctgataggcgatggggtgggcgggatcctagggtttgatgccctatgtcattcagccaatgccggaacagggtctcgaggttcatcccgcagagggtccatgaataatgagctgttgtcaccagaatttggacccgtgcgggacccccttgccgatggggtggagggcctgggtagggggtctccagagccaagtgctctcccaccccagcgcattccatctgatatggcctcacccgagcccgagggcagccagaattccctacaggccgccccggcaacaacatctagctgggagcctaggcgggcaagcacagcattctgccctcccgccgcttcctcggaggcgcctgatggcccctctagtaccgccagactggatttcaaggtctcaggattcttcttgttcgggtcacctctgggactggtcttggctctccggaagaccgttatgcccgctctggaagctcagatgcgccccgcatgtgaacagatttacaacctctttcacgctgctgatccatgcgccagccgtcttgagcctctgctggccccgaaattccaggccattgccccattgaccgtcccacgctaccagaagtttccgcttggtgatggttcttcgcttcttctggcagatacacttcagacgcattcatcgctctttctcgaggagctggagatgctggtcccgtctacgccgacatctacctcaggtgctttctggaagggtagcgagctcgctactgaccctccagctcaaccggctgctccgtctaccacgtctgaagtcgtgaaaattttagagagatggtggggcactaagcggattgactattcactgtattgcccagaagctttgaccgccttccctaccgttactcttccacacctgtttcacgcttcatattgggaatcggccgacgtcgtagcatttatactgcgacaggtgatcgagaaggaacggcctcagttggccgagtgtgaggagcccagcatatatagccctgcattccctagggaaaagtggcaacgcaagcggactcaggtgaaaatccggaacgtaacttctaatcaccgagcgtccgacacggtcgtctgtgaagggcgacctcaagtgttgtccggacggttcatgtatggacctctggacgttgttaccctgaccggcgagaaggtagatgtctatataatgactcagcctttgtctggaaaatggatccacttcggaaccgaggtcacaaattctagcggaaggttaacattccccgttccaccagagcgcgctctcggcatcggggtttatcctgtcaggatggtcgttcgaggcgaccatacctatgctgagtgctgccttactgtcgtggccaggggaacagaagctgtggtgtttagcatagatggatcatttaccgcgtctgtgagcatcatggggtctgatcctaaggtaagggccggggcggtggatgtcgtgcggcactggcaagacagcgggtaccttattgtgtacgttaccggacgcccggacatgcaaaagcatcgagttgttgcatggctctctcagcacaacttcccacatggggtagtctcattttgcgacggcttaacccacgatccgctgcggcagaaagccatgtttttacagagcttagtccaagaggtggaactcaacatcgtagccggatatggctcccctaaggacgttgcggtttacgccgctctggggctgtccccctctcagacctatattgtgggacgcgccgtccgcaaactgcaggcacagtgccaattcctgagcgatggatatgttgcccacctggggcagctcgaggcaggaagtcattcacacgcaagttcaggcccaccgagagccgcgctggggaagtcctcctacggcgttgctgccccagtggacttcctccgaaagcagtcccagttgctgagatcacggggtcccagccaggcggagcgggagggacccggcacgccaccaaccaccctagctcggggaaaagcaagatctattagcctgaagctcgattccgaggaatag

SEQ ID NO: 48665 - DNA, 3732 bp, Artificial Sequence
  derived and/or modified sequence
atgctaattaaggagtatcacattttgttgcctatgagtcttgatgaataccaggtcgcccagctgtacatgatccagaaaaaaagccgagaggagagcagtggcgaaggatcgggcgtagagatcctggcgaatcggccatatacagatggtcctgggggaagtggccagtatacccataaggtctaccatgtcggaagccacattcctggctggttccgggcactgcttcccaaggcagccttacaggtggaggaggagagttggaatgcatatccctacactcggactcgctatacatgcccttttgtcgaaaaattctctatcgaaatcgagacttactaccttcctgatggcggtcagcagccaaacgtttttaaccttagcggagccgagcggaggcagagaattttggacaccattgacatagtcagagacgcggtcgccccaggcgagtacaaggctgaggaagatccacgcctctaccacagtgtgaagacaggtcgcggaccactgtcggacgattgggcaagaacagccgctcagaccgggcctttaatgtgtgcttacaaactgtgcaaagtagaatttcggtattggggcatgcaggcgaaaatcgagcaattcatccacgatgtaggtctccgacgggtaatgttgcgggcacatcgccaggcttggtgctggcaggatgagtggaccgagttatcaatggcagatatcagggccttggaagaagagaccgcccgtatgctggcgcaacggatggccaaatgtaataccgggtcagagggcagcgaggcccagcccccaggtaagccttctactgaagctagaagtgccgcttctaacactggaacaccagatgggccagaagcacctcctgggcctgacgcttcccctgatgctagtttcggtaaacagtggtccagctcttccaggagctcctacagctcccagcacggcggtgctgtgagcccccagagcttgagcgagtggcgtatgcaaaacatcgccagggattcggagaattcctcagaggaagagttcttcgacgcacacgaggggttttctgattctgaggaagtgtttcctaaagagatgactaagtggaacagcaatgacttcatagacgcctttgcatccccggtagaagccgagggcacaccagagcctggggctgaggccgctaaaggcatcgaagacggcgcacaggcccctcgagactcagagggattggacggtgccggagaactgggtgccgaggcttgtgcagttcacgccttattccttatactccactccgggaatatcctggactcgggcccaggagatgccaatagcaagcaggccgacgtccagacactgtcgtctgcatttgaggcagtcacgcggatccattttcccgaggccctgggccatgtggctttaagattagtgccgtgcccacccatctgcgccgcagcttacgctctggtgagcaacctgtctccttattcccacgatggtgattctctgtctaggtcacaagaccatatacctctcgccgcactccctctgttggccactagtagctccagataccagggagcggtagctaccgttatcgcgcgtactaaccaagcctattctgcctttcttaggtcacctgaaggcgcagggttctgcgggcaagtggccctgataggggacggcgtgggcggtattctgggctttgatgcattatgtcactctgccaacgccggtactggctcccggggttcatcaagacgcggatcgatgaacaacgagttgttgtctcccgaattcggccctgtcagagatcctctcgccgacggagtcgaaggactgggcaggggatctcccgagccctcggccctgccaccccagcggataccctccgatatggcctccccggagcctgaaggcagtcagaacagccttcaggctgctcccgcaactaccagctcttgggaaccaaggcgtgccagcacagcgttttgcccccctgctgccagttccgaagctcctgacgggcctagttcaacggctagactagacttcaaagtgtcagggttttttctgttcggctcccctctgggcctcgttctggccctcaggaaaacagttatgcctgccctggaggcccagatgagacccgcttgcgagcagatatataaccttttccatgccgcagacccatgcgcctcacggctggagcccctgctggcccctaagttccaggccattgctccccttacagtgccacgataccagaagtttccacttggggatggaagcagcctgttgttagcggacacactgcagactcatagctctctttttttggaagagctggagatgctggttccaagtaccccaaccagcacctccggggcattctggaaaggctccgagctggctaccgatcctcctgctcagcctgcagccccatctacaacatccgaggtggtaaagatcctggaaaggtggtggggtactaaacgcatagattactctctctattgccccgaggccctgactgccttcccgaccgttactctgccccatctattccacgcatcatactgggaaagtgctgatgtcgttgctttcattctgagacaagtgattgagaaagaacggcctcagctagccgagtgcgaagagccctcgatctatagccccgctttccccagggagaagtggcaaaggaagcggactcaggtgaaaatccggaatgtgacaagcaaccatcgcgcatccgatactgttgtgtgtgaaggtcgccctcaggtgttaagcggaaggtttatgtacggacctctagacgtagtgacgctgactggcgagaaggttgacgtgtatattatgacccagcctttaagcgggaagtggatccattttggcactgaagtgacgaacagcagtggccgtctcacatttcccgttcctcccgaacgcgctcttggaattggagtgtatcccgttcggatggtggtcaggggcgatcatacatacgccgagtgttgtctgactgtggtggcccgaggcacagaagccgtcgtcttctccatagacggcagttttacggcttcagtctccattatgggaagcgacccgaaggtcagagcgggtgcggtcgacgtagttcgccactggcaggacagcggctatctgatcgtttatgtgactggaaggccggacatgcagaagcatagagtggtagcgtggcttagccagcacaatttccctcacggagtggtctctttttgcgatgggctcacccacgatcctcttaggcaaaaagctatgttcctgcagtctctcgtccaggaggtcgagttgaatatagtggccggatatgggtctccgaaggacgtcgctgtttacgctgctttgggtctgtcgccctcacagacgtacatcgttggacgcgctgtaagaaagttgcaggcacagtgccagttcctttcggacgggtacgtggcccacttgggccagctagaggccggttcccatagtcatgcaagttccggacccccaagagctgcccttggtaaatcaagctatggagttgccgcacctgtcgatttcctccgcaagcagtcccagttactccgttccaggggcccaagtcaggccgagcgagaaggtcccggaacccctcccacgaccctcgctcggggaaaggctagaagtatttccctgaagctagactccgaggagtag

SEQ ID NO: 48666 - DNA, 4216 bp, Artificial Sequence
  derived and/or modified sequence
gcaggggcgccggcgggcggatcgagaggaaggtcggggccatgggccggcactgcgcctcgggagggtccggccaccgctggaacccgaggccggggctgggggcgctccgggctccgacccacgggccggccggccctgcccgggctgggtgaggggcgcccgcctcaagctagaggaggagcggaggccgcgcgcggcccgccgagcgccttcaggatgctcatcaaggaataccacattctgctgcccatgagcctggacgagtaccaggtggcccagctctacatgatccagaaaaagagccgggaggagtctagtggtgagggcagcggcgtggagatcctggccaaccggccctacacggatgggcccgggggcagcgggcaatacacacacaaggtgtaccacgtgggctcccacatcccaggctggttccgggcactgctgcccaaggctgccctgcaggtagaagaggaatcctggaatgcctacccctacacccgaacccggtacacctgccctttcgtggagaaattctccattgaaattgagacctattacctgcctgatggggggcagcagccaaacgtcttcaacctgagcggggccgagaggagacagcgcatcctggacaccatcgacatcgtgcgggatgcagtggccccaggcgagtacaaagcagaagaggacccccggctttatcactcggtcaagacgggccgagggccactgtctgatgactgggcacggacggcggcacagacggggccccttatgtgtgcctataagctgtgcaaggttgagttccgctactggggcatgcaagccaagatcgagcagttcatccatgatgtaggtctgcgtcgggtgatgctgcgggcccaccgccaggcctggtgctggcaggatgagtggacagagctgagcatggctgacatccgggcactggaagaggagactgctcgcatgctggcccagcgcatggccaagtgcaacacaggcagtgaggggtccgaggcccagccccccgggaaaccgagcaccgaggcccggtctgcggccagcaacactggcacccccgatgggcctgaggcccccccaggcccagatgcctcccccgatgccagctttgggaagcagtggtcctcatcctcccgttcctcctactcatcccaacatggaggggctgtgtctccccagagcttgtctgagtggcgcatgcagaacattgcccgagactctgagaacagctccgaggaagagttctttgatgcccacgaaggcttctcggacagtgaggaggtcttccccaaggagatgaccaagtggaactccaatgacttcattgatgcctttgcctccccagtggaggcagagggaacgccagagcctggagccgaggcagctaaaggcattgaggatggggcccaagcacccagggactcagagggcctggatggagccggggagctgggggctgaggcatgcgcagtccacgccctcttccttatcctgcacagcggcaacatcctggactcaggccctggagacgccaactccaagcaggcggatgtgcagacgctgagctccgccttcgaggccgtcacccgcatccacttccctgaggccttgggccacgtggcgctgcgactggtgccctgtccacccatctgcgccgccgcctatgcccttgtctccaacctgagcccttacagccacgatggggacagcctgtctcgctcccaagaccacattccactggctgccctgccactgctggccacctcatcctcccgctaccagggcgccgtggccaccgtcattgcccgcaccaaccaggcctactcagccttcctgcgctcacctgagggtgccggcttctgtgggcaggtcgcactgattggagatggtgttggtggcatcctgggctttgatgcactctgccacagtgctaacgcgggcaccgggagtcggggcagcagccgccgtgggagcatgaacaatgagctgctctctccggagtttggcccagtgcgggaccccctggcagatggtgtggaaggcctgggtcggggcagcccagaaccctcggccttgcctccccagcgcatccccagcgacatggccagtcctgagcccgagggctctcagaacagccttcaggcagcccccgcaaccacctcctcctgggagccccggcgggcaagcacggccttctgcccacccgctgccagttccgaggcacctgacggccccagcagcactgcccgccttgacttcaaggtctctggcttcttcctcttcggctccccactgggcctggtgctggctctgcgcaaaactgtgatgcccgccctggaggcccagatgcgcccagcctgtgaacagatctacaacctcttccacgcggctgacccctgcgcctcacgcctcgagcccctgctggccccgaagttccaggccatcgccccactgaccgtgccccgctaccagaagttccccctgggagatggctcatccctgctgctggccgacactctgcagacgcactccagcctctttctggaggagctggagatgctggtgccctcaacacccacctctactagcggtgccttctggaagggcagtgagttggccactgaccccccggcccagccagccgcccccagcaccaccagtgaggtggttaagatcctggagcgctggtgggggaccaagcggatcgactactcgctgtactgccccgaggcgctcaccgcctttcccaccgtcacgctgccccacctcttccacgccagctactgggagtccgccgacgtggtggcgttcatcctgcgccaggtgatcgagaaggagcggccacagctggcggaatgcgaggagccgtccatctacagcccggccttccccagggagaagtggcagcgaaaacgcacgcaggtcaagatccggaacgtcacttccaaccaccgggcgagcgacacggtggtgtgcgagggccgcccccaggtgctaagcgggcgcttcatgtacgggcccctggacgtcgtcacgctcactggagagaaggtggatgtctacatcatgacgcagccgctgtcgggcaagtggatccactttggcaccgaagtcaccaatagctcgggccgcctcaccttcccagttcccccagaacgcgcgctgggcattggtgtctaccccgtgcgcatggtggtcaggggcgaccacacctatgccgaatgctgcctgactgtggtggcccgcggcacggaggctgtggtcttcagcatcgacggctccttcaccgccagcgtctccatcatgggcagcgaccccaaggtgcgagctggcgccgtggacgtggtcaggcactggcaggactccggctacctgatcgtgtatgtcacaggccggccggatatgcagaagcaccgcgtggtggcatggctgtcgcagcacaacttcccccacggcgtcgtctccttctgcgacggcctcacccacgacccactacgccagaaggcaatgtttctgcagagcctggtgcaggaggtagaactgaacatcgtggccggttatgggtctcccaaagatgtggctgtatacgcggcgctggggctgtccccgagccagacctacatcgtgggccgtgccgtgcggaagctacaggcgcagtgccagttcctgtcagacggctatgtggcccacctgggccagctggaagcgggctcgcactcgcatgcctcctcgggacccccgagagctgccttgggcaagagcagctatggtgtggctgcccccgtggacttcctgcgcaaacagagccagctgcttcgctcgaggggccccagccaggcggagcgtgagggcccgggaacaccacccaccaccctggcacggggcaaagcacggagcatcagcctgaagctggacagcgaggagtgaggcccacaccagcctggacctgggttatttattgacacacccaaggggcccgaggggctgcgtgtgggaggctggggacccagacttttggccccagcgctggcccccccagccccacaccctatatctccgtgtgctcctcggtgttacttccctttcatatgaggggacccagcgccggggggagggaggagggcgtgggcatgggcgcagaggcttttccagtgtgtataaatccatgaaaataaacgccacctgcacccca

SEQ ID NO: 48667 - protein, 341 aa, Artificial Sequence
  derived and/or modified sequence
MPFPFGKSHKSPADIVKNLKESMAVLEKQDISDKKAEKATEEVSKNLVAMKEILYGTNEKEPQTEAVAQLAQELYNSGLLSTLVADLQLIDFEGKKDVAQIFNNILRRQIGTRTPTVEYICTQQNILFMLLKGYESPEIALNCGIMLRECIRHEPLAKIILWSEQFYDFFRYVEMSTFDIASDAFATFKDLLTRHKLLSAEFLEQHYDRFFSEYEKLLHSENYVTKRQSLKLLGELLLDRHNFTIMTKYISKPENLKLMMNLLRDKSRNIQFEAFHVFKVFVANPNKTQPILDILLKNQAKLIEFLSKFQNDRTEDEQFNDEKTYLVKQIRDLKRPAQQEA

SEQ ID NO: 48668 - DNA, 1026 bp, Artificial Sequence
  derived and/or modified sequence
atgccctttccattcggcaagtcccacaagagtcccgcggacattgtgaagaatctgaaggagagcatggctgtgctggaaaagcaggacatttcggataaaaaggccgaaaaggcaaccgaggaggtatccaaaaacctggtcgcgatgaaagagatcttgtatggaacgaatgagaaggaacctcaaacggaggccgtggcccagcttgcgcaagagctgtacaacagtggcctattgagcactctggtggcagatttacagttgattgattttgaaggcaagaaagacgtagcacaaatctttaataatatcctgagacgccaaatcgggactaggactcccacagtagaatatatctgcacccagcaaaatattctcttcatgttgcttaagggctatgagagcccggagatcgcattaaattgcggcatcatgctgcgggagtgtatccgccacgagcctcttgcaaagatcatcctatggtccgagcagttttatgacttcttccggtacgtggagatgagcaccttcgatattgcctctgatgccttcgctaccttcaaggacctcctcacacgtcacaaactgctgtctgccgagtttctcgagcaacactacgaccgttttttttcggagtatgaaaagctgttgcactcggagaactatgtgacaaaaaggcagtccctgaagttgcttggtgagttattgttggatcgtcacaattttaccataatgacgaagtatatttctaaacctgaaaatctgaaactgatgatgaacctcctgcgtgacaagagcagaaacatacagttcgaagcctttcacgttttcaaggtgttcgtcgccaacccgaataagacacagccaatcctggacatacttctaaaaaaccaggccaaactgatcgagtttcttagtaaattccagaatgataggacggaggatgagcagttcaatgatgaaaaaacctaccttgtgaagcagatccgggatctaaagaggccagcacagcaggaagcttag

SEQ ID NO: 48669 - DNA, 1026 bp, Artificial Sequence
  derived and/or modified sequence
atgcctttcccatttgggaagagccacaaaagtcccgctgacattgtgaagaacctgaaagagtccatggccgtactggagaagcaggatatttcagacaagaaggctgaaaaagcaacagaggaggtctcaaaaaatctggtggctatgaaggaaatactctatggaaccaatgagaaggagccccagacagaggcagtggcgcagcttgcccaggaactgtataacagcggactactgtctactctagtggccgacctgcagttgatcgacttcgaggggaagaaagatgtggcccaaatctttaacaacattcttcgaagacagatcggaacccgtacccctactgtggagtatatctgcacgcagcaaaatattttattcatgctgctgaaagggtacgagtccccagaaattgcgttgaattgtggtattatgctccgcgaatgtatacggcatgagcctctcgccaagataattctgtggagtgaacagttttatgatttttttcgatacgttgaaatgtccacatttgacatagcctctgacgcatttgcaaccttcaaagacctcctgactcgacacaagcttttgagtgcagagtttttggagcaacactacgacagattcttttccgaatacgaaaaactgctccatagtgagaactacgtgaccaagagacagagtttgaaacttctaggtgaactactcctggacagacacaattttacaatcatgactaaatacatctctaagccggagaacttgaagctgatgatgaatctgctgcgtgacaagtctaggaatatacagttcgaggcattccacgtgttcaaagtgtttgtcgcaaatccaaacaagactcaaccgatcctcgacatactgctgaaaaaccaggccaaactgattgagtttctgagtaaattccagaatgacagaactgaggacgaacagttcaatgatgaaaaaacatatttggtgaagcaaatccgagatctcaagcggcctgcacagcaggaggcatag

SEQ ID NO: 48670 - DNA, 1026 bp, Artificial Sequence
  derived and/or modified sequence
atgcctttcccctttggcaagtcccacaagagtccggccgatatagtcaaaaatctgaaggaatctatggctgtgctcgagaagcaggacatctctgacaaaaaagccgaaaaggccactgaggaagtgagtaaaaacctggtggctatgaaggagatactctatggtactaacgaaaaggaaccacagactgaagctgtcgcgcagctggcgcaagaactgtacaatagtgggctcctcagtacacttgtggccgacttgcagttgatcgatttcgagggcaagaaggatgttgcgcaaatcttcaacaatatacttcgacgccagatcgggacccggacacccactgtggagtacatctgcactcaacaaaatatcctcttcatgctgcttaaaggctatgagagtccagaaatcgcacttaactgtggaatcatgctgagggaatgcattaggcatgagccactggccaaaataatattgtggagtgagcagttttatgattttttccgatacgtggagatgtcaacattcgatatagctagtgatgctttcgctacatttaaggatttacttacccggcacaaactgctgtcagcagaatttctggaacaacattatgaccgattctttagcgagtacgaaaaactgctgcattccgaaaactacgttaccaaacgccagtctttaaagctcctgggcgagcttttgctagatcgccacaacttcacgatcatgacaaaatacatctcgaaacccgagaacttgaagctgatgatgaacctcttgagagacaagtctcggaacattcagtttgaagctttccacgtattcaaggtgtttgtggctaatcctaacaaaactcaacccattttagacattctgctgaagaatcaagccaagctgattgagtttctctcaaaatttcagaacgatagaacagaagatgaacagttcaacgacgagaaaacgtacctggtgaaacagattcgtgatctcaaacggcccgcccagcaggaggcctag

SEQ ID NO: 48671 - DNA, 1026 bp, Artificial Sequence
  derived and/or modified sequence
atgcccttcccctttgggaagagccacaagagccctgctgacatcgtgaagaacctgaaggagagcatggctgtgctggagaagcaggacatcagtgacaagaaggccgagaaggccacagaggaggtgtccaagaacctggtggccatgaaggagatcctgtatggcaccaatgagaaggagccccagacagaggccgtggcccagctggcccaggagctgtacaacagcggcctgctgagcaccctggtggccgacctgcagctgattgactttgagggcaagaaggatgtggcccagatcttcaacaacatcctgcggcggcagatcggcaccaggacccccaccgtggagtacatctgcacccagcagaacatcctcttcatgctgctgaagggctatgagagccctgagatcgccctgaactgtggcatcatgctgcgggagtgcatcagacatgagcccctggccaagatcatcctgtggagcgagcagttctatgacttcttccgctacgtggagatgagcacctttgacatcgccagtgatgcctttgccaccttcaaggacctgctgaccaggcacaagctgctgtctgctgagttcctggagcagcactatgaccgcttcttctctgaatatgagaagctgctgcacagtgaaaattatgtgaccaagaggcagagcctgaagctgctgggggagctgctgctggacagacacaacttcaccatcatgaccaagtacatcagcaagccagagaacctgaagctgatgatgaacctgctgcgggacaagagcaggaacatccagtttgaggccttccacgtgttcaaggtgtttgtggccaaccccaacaagacccagcccatcctggacatcctgctgaagaaccaggccaagctgattgagttcctgagcaagttccagaatgacagaacagaagatgagcagttcaatgatgagaagacctacctggtgaagcagatccgggacctgaagaggcctgcccagcaggaggcctag

SEQ ID NO: 48672 - DNA, 1026 bp, Artificial Sequence
  derived and/or modified sequence
atgcccttccccttcggcaagagccacaagagccccgccgacatcgtcaagaacctaaaggagagtatggccgtgctcgagaagcaggacatcagcgacaagaaagcagagaaggccaccgaggaagtgtccaagaacctagttgccatgaaagagatcctgtatgggacgaacgaaaaggaaccacaaacggaggccgtcgcccagttggcccaggaactatacaactcaggtctgctgagcaccctggtggctgatctgcagctgatcgatttcgagggaaagaaagacgttgcacagattttcaacaatatcctccgtagacagattggaaccaggacaccaacagtggagtacatctgcacacagcaaaacatcttatttatgttgctgaagggctacgaatcacccgagatagcactcaattgtggcatcatgctgcgcgagtgcatacgacacgaacccctggcgaaaatcattctctggagtgagcaattctacgacttttttcggtatgtggagatgagcaccttcgatatcgccagcgacgcttttgctaccttcaaggatttactgacgaggcataaactcctgtcagccgagtttctggaacagcattatgaccggttcttttctgaatacgagaagctgctgcatagcgagaattacgttacgaaaaggcagagcctaaaactcctgggggaactcctgctggatcgacataatttcacaatcatgactaagtacattagcaaacctgaaaacctgaagttaatgatgaacttactacgggacaagtcacgcaatatccagttcgaagccttccacgtctttaaagtgtttgtggctaatccaaataagacgcagcctattctcgacatcctgctgaagaatcaggcaaagctgattgagtttctgagcaaattccaaaatgacagaacggaagacgaacagttcaacgatgaaaagacatatctggtgaaacaaatcagggacctcaaacggcccgctcagcaggaagcatag

SEQ ID NO: 48673 - DNA, 1026 bp, Artificial Sequence
  derived and/or modified sequence
atgcccttccccttcggcaagagccacaagagccccgccgacatcgtcaagaatttaaaagaatctatggccgtgcttgaaaaacaggatataagcgacaaaaaggctgaaaaggccaccgaagaagtgtctaagaatcttgttgcgatgaaagaaattttatatggaaccaatgaaaaagagccacagaccgaagcagtcgcccaattagcccaggaactgtataatagcggtctgctatcaacactggtcgccgatctccagcttattgactttgaaggcaaaaaggacgtagcgcaaatctttaacaatatcctgcggagacagatcggcacacggacgcccacagtcgagtacatctgtacccaacagaatattctatttatgctgttgaagggctacgagagcccggagatcgcactgaactgtgggattatgctgcgtgaatgtatcaggcatgaaccacttgcaaagattattctttggagcgagcagttctatgacttctttcgatacgtcgaaatgagtacattcgatatagcgtctgatgcattcgcaacgtttaaggacctccttactcgacacaagctgctctccgctgaatttctcgagcagcattacgacagattcttttctgaatatgagaagctgcttcattcggagaactatgtaactaaacgccaatccctaaagctgctgggggagttacttctggacaggcacaattttaccatcatgacaaagtacattagtaagcccgagaatctgaagcttatgatgaacctgctgagagacaagtcccggaacattcagtttgaagccttccatgtcttcaaggtgtttgtggccaacccaaataaaacacagcccatccttgacattctcttaaagaatcaggcaaaactaatagaattcctgtctaaatttcagaatgacagaaccgaagacgaacaattcaatgatgagaagacctatcttgtgaaacagattcgtgacctaaaacgccctgcccagcaggaagcctag

SEQ ID NO: 48674 - DNA, 1026 bp, Artificial Sequence
  derived and/or modified sequence
atgcccttccccttcggcaagagccacaagagccccgccgacatcgtgaaaaatctcaaggaatccatggctgtgctcgagaaacaggacatctccgacaagaaggctgaaaaggccacagaggaggtgtcgaaaaacttagtcgctatgaaagagatcctgtatgggacgaacgaaaaagagccacagacggaggctgtcgctcaactagcccaggagctctacaatagcggtctattatctaccttagtggccgatctgcagctcattgactttgagggaaagaaggatgtggctcagatttttaataatatcctccggcggcaaattggaacccggactcccactgtggaatatatctgtacccagcagaacatactgtttatgcttctcaaaggatacgagtcacctgagatcgcactcaattgcggaatcatgctgagagaatgtatacgtcacgagcctctggctaagatcatcctttggtccgaacaattctatgatttcttcagatacgtcgaaatgtcaacttttgacatcgccagtgatgcttttgccacattcaaggacctactgacaaggcataagctgctttcagcagaatttctggagcagcattatgataggttcttttccgagtacgaaaagctgctccattcagagaattatgtcacgaaacgccagagcctgaagctgctgggtgagctcctgctggataggcacaatttcacaattatgaccaagtacattagtaaaccagagaatctaaagttgatgatgaatctgcttagagataagagcagaaacatccagttcgaggcatttcatgttttcaaggtttttgtggctaaccctaataaaacacaacccatcctcgatattctcttaaaaaaccaggctaaactaattgagttcttgtccaagttccagaacgatagaactgaagatgagcagttcaatgatgagaagacctacttggtcaagcagatccgcgacctaaaacggcctgcgcagcaggaagcctag

SEQ ID NO: 48675 - DNA, 1026 bp, Artificial Sequence
  derived and/or modified sequence
atgcctttcccattcggtaaaagccacaagtcgcccgcagacatcgtgaaaaacctgaaggaaagtatggccgttcttgaaaagcaggacatctccgacaaaaaagctgagaaggccacagaggaagtatccaaaaatctagttgcaatgaaagagatcctgtacggaacaaacgagaaggaaccccagaccgaagccgtggctcagctcgcccaggaactttataatagcggcctgctcagcaccttggtcgccgacttgcagctaattgattttgaaggtaaaaaagacgtggcccagatcttcaacaacatcctgcggagacagattggcacacgaaccccgacagtggaatatatctgcactcagcagaacattttgtttatgttgctgaaaggctacgaatccccagagatagccttgaattgtggcatcatgcttcgggaatgtatccggcacgaaccactggctaagattatcctgtggtcagagcagttttatgactttttcaggtacgtcgagatgtcaacttttgatatcgcctccgacgcatttgcaacctttaaggacctgctgacccgacacaagttactgtcagccgagttcttggaacagcactatgaccgattcttctcagaatatgagaaacttctacacagtgagaattacgtgaccaagaggcagagtctcaagctgctgggcgaacttttgctagatcgccacaacttcaccatcatgaccaagtatatatccaagccagaaaacctgaagctcatgatgaacctgttgcgtgataagtctagaaacatccagttcgaagctttccacgtgttcaaggtcttcgtggccaacccaaataaaacccaaccaatcctggacatattactgaagaaccaagccaaactaatcgaattcctgtccaaattccaaaacgacaggactgaagacgaacagttcaatgacgagaagacctacctcgtgaagcagattagggacttaaagcgccctgcacagcaggaagcctag

SEQ ID NO: 48676 - DNA, 1026 bp, Artificial Sequence
  derived and/or modified sequence
atgcctttcccatttgggaaatctcacaaatcccctgccgacattgtcaaaaacctaaaagaaagcatggccgtgctagagaaacaggatatctcggacaaaaaggcagaaaaagccacagaagaggtgagtaagaacctggttgctatgaaggagatcctgtacgggactaatgagaaagaaccacagaccgaagcggtggcccagctagcccaggaattatataattcgggattactctcaactcttgtggctgatctccagttgattgattttgaaggcaagaaggatgtagcgcagatcttcaataacatcttgaggagacaaatcggtacaaggacgcccacggtggaatacatctgtactcagcagaacattctctttatgttgttaaaaggttacgagtcccctgagattgccttgaactgtgggattatgctgagggaatgcatccgccacgaacctctcgccaaaataattttgtggtctgaacagttttacgacttctttaggtatgtggaaatgtcaacttttgatatagcctctgatgctttcgcaactttcaaagacctgctgactcgccacaagctgttgagtgcggaattcctggagcagcactacgacaggttttttagtgagtatgaaaagctactccacagtgaaaactacgttacaaagcgacagagcctcaagctcttgggggagctcctgttagacagacacaattttacaatcatgaccaagtacatctcgaagccagagaatctgaagttgatgatgaatctgctgcgagataaatcgcggaacatccaatttgaagctttccatgtttttaaggtttttgtcgctaacccaaacaagactcaacctatcctcgacatacttctgaagaatcaggctaagcttatcgagtttctgtccaaattccagaatgataggacagaggatgagcagttcaatgacgaaaagacctaccttgtgaaacagattagggacctgaagaggcccgcacagcaggaggcttag

SEQ ID NO: 48677 - DNA, 1026 bp, Artificial Sequence
  derived and/or modified sequence
atgcccttcccttttggaaaatcccacaaatcccccgctgacatcgtaaaaaaccttaaagaatccatggcggttctggaaaagcaggatatttccgataaaaaagcagaaaaggctacggaagaggtgagcaagaatcttgtggccatgaaggagatcctgtacgggaccaatgaaaaagaaccccagaccgaggctgtcgctcagctcgcccaagaactgtacaatagcggccttctgtccacattggtggcagatttacaactgatcgactttgaaggcaagaaggatgtggctcaaattttcaacaatattcttaggcgtcaaattgggacccgcacgcccaccgtagagtacatctgcactcagcagaacattttgtttatgctccttaaggggtacgagtcaccagaaatcgcgctcaactgtggcattatgctgcgagaatgtataaggcacgagccactggcaaaaattatcctctggtcggagcagttttatgacttctttcgctatgtggagatgagtacttttgacattgcgtccgacgccttcgctacattcaaggatctgttaacaaggcacaaacttttgtcagccgagttcttggaacagcactacgataggttctttagtgagtatgagaagctgctgcattcagagaattacgttaccaagagacagtccctgaaactgttgggtgaactgttgttggaccgccataattttactatcatgactaaatacatcagcaaacctgagaatctcaagctgatgatgaacctcttgagggataagagcaggaacattcagttcgaggcgttccacgtattcaaggtattcgtggccaacccaaacaaaacgcagcctatcctagatatccttttgaaaaaccaggccaagctgattgaatttctaagcaaatttcagaacgaccggacagaggacgaacagtttaacgatgagaaaacataccttgtcaaacaaatccgcgaccttaagagacctgctcaacaggaggcctag

SEQ ID NO: 48678 - DNA, 3826 bp, Artificial Sequence
  derived and/or modified sequence
gtgcgcacgtcaaagccgggctcgggccgcaagcggggcgaggggttcggggagcggcgcggcctgggagacacagagccttcaggcgccggggcgggggcacaggcgaagactaaggcggcgccgggccccacagcagcagccgcagcccaagcgagcgcagcagcgcggcggcagccgcgggagcccctgggcagccgtccgcccgcgcagccgccgccgccgcgggagcccgtcgccgggagcaggagcgggcggaagacaacggaggggccgagcgtccgagccactccgcggggaccgaacgagcagcccgaagcggcggcggccgaggacggggacagcgacgacgcggaggcagagaagggaacgcccggcccagccccgtagcacaggcggagtgcagcggaggcccctgccgctgccgtcatgccgttcccgtttgggaagtctcacaaatctccagcagacattgtgaagaatctgaaggagagcatggctgttctggaaaagcaagacatttctgataaaaaagcagaaaaggctacagaagaagtttccaaaaatctggttgccatgaaagaaattctgtatggcacaaatgaaaaagagcctcagacagaagcagtagctcaacttgctcaagaactctataatagtgggctccttagcaccctggtagctgatttacagctcattgactttgagggcaaaaaagacgtggctcaaattttcaacaatattctcagaagacaaattggtacgagaactcctactgttgaatacatctgcacccaacagaatattttgttcatgttattgaaagggtatgaatctccagaaatagctctaaattgtggaataatgttaagagaatgcatcagacatgaaccacttgcaaaaatcattttgtggtcggaacagttttatgatttcttcagatatgtcgaaatgtcaacatttgacatagcttcagatgcatttgccacattcaaggatttacttacaagacataaattgctcagtgcagaatttttggaacagcattatgatagatttttcagtgaatatgagaagttacttcattcagaaaattatgtgacaaaaagacagtcactgaagcttctcggtgaactactactagatagacacaacttcacaattatgacaaaatacatcagtaaacctgagaacctcaaattaatgatgaacctgctgcgagacaaaagtcgcaacatccagtttgaggcctttcacgtttttaaggtgtttgtagccaatcctaacaagacgcagcccatcctagacatcctcctcaagaaccaggccaaactcatagagttcctcagcaagtttcagaacgacaggacggaggatgagcagtttaacgacgagaagacctatttagttaaacagatcagggatttgaagagaccagctcagcaagaagcttaatctccaataaacatctatgttaaatccaaattcagcatttgctgttagctattcagcatcaggcactcttattgattcatgaggaacattactgctaatctgctgttaagtgaacggtttttcattttacccttttgtttttcagtccaggttggagatcgtagctgctgctgcttgcacactagggcacatgtgggctttctcttgatctttgtgtcatttcagaattcaaagactgtgctacgggagttctgaacatggctgggttcatgaaggcaaatgtatggatgagagtgtggtttaggaaagagggcactgatatcagattagacctatgtgtttgcacccatctttgttggcgatctgagtgcagtgtggcaagtgcacacctggcatccctgcgtcagatcgcgcaccttcaggtcgcgcaccttcgctgaaggaagatgacgcagagctttatctgaaatcagaggggagctatccaaaatgggagtttgggggcagctaaagttgacatgcgaataaattgatactgaaacttagcaacttcttaaaagtgtaaagaagcctcataagatcataaggaaaatgtatatatgcttttcacagctttctagaattttttgacatttgattttcttgagacttgtaaacctggatatgttgaagggtatttgttaattttacttttcaaagatactttaaaacagtagagctagcaatgacaccttgcatttcatttcaacactgcttcaaggtttcttttgtatataattcttagaatgctcatttcttttaaatggtttaatttgtacagcagaggaatgttattgtagtagtatgtaactattacctaatactgagtttttgcaaaaaacaatgaatgctcatatgtaattgaaatacttcagatcacatgaaaatgctgatttaacatttaagtatcacagcattaaaagaaaaagaaagtaaaccagtcctttgtattcagttacctaatggggtgccatcaataagctgcgatacagccctggagctcagtcagccacaccttcctgcatcctattggccttattcattttaaatgagttaatgaatctgccagatctgtgaatgatagagattatgctaaattaatgctgattctttgtgtgtgtgggaaatctctgtagagcaccttttctttcttagactaagtaacccagtacaatagttgtgaactgaataattaaaactttggcttctcttaggaaaagacgacttcctagtcataggtgtcctatggggaaatttattttttttaatgtcctgttccttaatgctgcaaattatcagtatttataaagtaactgattttgcaccacttttttgttactgtgaccacggcagaacaatgtcttctagactatatctatgtaaagttattagaatggtatctgttcattttagtgatatgaagatcacaactaacaactgacaaatcagagtttgccagttcaaattcagcatggctgcagctgattaagaaattgatatgattattctttgctagcctctcttactaatggaattatatactggccagtaaaatgggcctcccaattgctgtttcagcaggttttaaaccttcaggaacaccagttaggaaaatagctccagaaaatatagatatattttatttttattaaaatggcagtctacatcataattggcatttctcaagactgtctttaccagaatctgtgtgaaataaggcaatctagtctccttgaaaaaaaaatctcttggatgtttaggaaggaagacttggccgtgatgtggtgtcctggctttgtggtgtagtgctgtgtgtatggagttagtgtaaaaacatggattacaccaagtggaagaaacgtcttcttgccaagctcattcttagaacttacacatctagaacagcttccactttggcagtgaggtcgtagccttttaggtggaagaagtgagggtgcagcgtgtcagacacaacattcatgttactcttacattggaatctgaaggtagttcagacttcgtgggttttgtttttaagcaaaacaatgtgaaaacatttaagtttgaaatgttgcatttgaagttatgatcatttaatatattcatattaccaagactattatactggaagtggtttttgtgttataaaggtttaattttacataaggcagttacttaatgtgatttttaacccttaaaaaagtggagatgtatacatttgttaacaatgccatgaaagcattttctttctcctaaggaaaagtgaatttcttatcagaatatctggctggccctgtaatttaaattaaaataaaattttggagaaacagca

SEQ ID NO: 48679 - DNA, 1626 bp, Artificial Sequence
  derived and/or modified sequence
agtcgggcgggcggggaagtgcgggccgggtcaactgtcaccggctgcacccgggcttcagcgcctcgctcccgcccctggtaaacttcctgttgtcgggaggcagataccagctttgtgaccaattcaggaaaatgcctaactgatttctggttaggaattgggcggtcggagcgttctggagttcaatggaaccaccccaagcgcagactgcgtgcaggcgccgtagtcggcccgcaccggagggattcaaaggtgaagcgggccccggtcccctcccccgaggagcttaggctctggtgtgagagataagacgagaacacaaataactgcgataccgggaaggaggtgataagtcctgtgaaagaacgacggagtgctagaacggcacccggaaaaaccgaaccgatcacttctgcctcgcagaaacctggaaggcttcctgggcgggggatgctgagcagagtcttgaaggcctgatgggatttaggagaggaggattgcagaagaggtagcacaggcggagtgcagcggaggcccctgccgctgccgtcatgccgttcccgtttgggaagtctcacaaatctccagcagacattgtgaagaatctgaaggagagcatggctgttctggaaaagcaagacatttctgataaaaaagcagaaaaggctacagaagaagtttccaaaaatctggttgccatgaaagaaattctgtatggcacaaatgaaaaagagcctcagacagaagcagtagctcaacttgctcaagaactctataatagtgggctccttagcaccctggtagctgatttacagctcattgactttgagggcaaaaaagacgtggctcaaattttcaacaatattctcagaagacaaattggtacgagaactcctactgttgaatacatctgcacccaacagaatattttgttcatgttattgaaagggtatgaatctccagaaatagctctaaattgtggaataatgttaagagaatgcatcagacatgaaccacttgcaaaaatcattttgtggtcggaacagttttatgatttcttcagatatgtcgaaatgtcaacatttgacatagcttcagatgcatttgccacattcaaggatttacttacaagacataaattgctcagtgcagaatttttggaacagcattatgatagatttttcagtgaatatgagaagttacttcattcagaaaattatgtgacaaaaagacagtcactgaagcttctcggtgaactactactagatagacacaacttcacaattatgacaaaatacatcagtaaacctgagaacctcaaattaatgatgaacctgctgcgagacaaaagtcgcaacatccagtttgaggcctttcacgtttttaaggtgtttgtagccaatcctaacaagacgcagcccatcctagacatcctcctcaagaaccaggccaaactcatagagttcctcagcaagtttcagaacgacaggacggaggatgagcagtttaacgacgagaagacctatttagttaaacagatcagggatttgaagagaccagctcagcaagaagcttaatctccaataaacatctatgttaaatccaaattcagcatttgctgtt

SEQ ID NO: 48680 - DNA, 1324 bp, Artificial Sequence
  derived and/or modified sequence
agtcgggcgggcggggaagtgcgggccgggtcaactgtcaccggctgcacccgggcttcagcgcctcgctcccgcccctggtaaacttcctgttgtcgggaggcagataccagctttgtgaccaattcaggaaaatgcctaactgatttctggttaggaattgggcggtcggagcgttctggagttcaatggaaccaccccaagcgcagactgcgtgcaggcgccgtagtcggcccgcaccggagggattcaaaggtagcacaggcggagtgcagcggaggcccctgccgctgccgtcatgccgttcccgtttgggaagtctcacaaatctccagcagacattgtgaagaatctgaaggagagcatggctgttctggaaaagcaagacatttctgataaaaaagcagaaaaggctacagaagaagtttccaaaaatctggttgccatgaaagaaattctgtatggcacaaatgaaaaagagcctcagacagaagcagtagctcaacttgctcaagaactctataatagtgggctccttagcaccctggtagctgatttacagctcattgactttgagggcaaaaaagacgtggctcaaattttcaacaatattctcagaagacaaattggtacgagaactcctactgttgaatacatctgcacccaacagaatattttgttcatgttattgaaagggtatgaatctccagaaatagctctaaattgtggaataatgttaagagaatgcatcagacatgaaccacttgcaaaaatcattttgtggtcggaacagttttatgatttcttcagatatgtcgaaatgtcaacatttgacatagcttcagatgcatttgccacattcaaggatttacttacaagacataaattgctcagtgcagaatttttggaacagcattatgatagatttttcagtgaatatgagaagttacttcattcagaaaattatgtgacaaaaagacagtcactgaagcttctcggtgaactactactagatagacacaacttcacaattatgacaaaatacatcagtaaacctgagaacctcaaattaatgatgaacctgctgcgagacaaaagtcgcaacatccagtttgaggcctttcacgtttttaaggtgtttgtagccaatcctaacaagacgcagcccatcctagacatcctcctcaagaaccaggccaaactcatagagttcctcagcaagtttcagaacgacaggacggaggatgagcagtttaacgacgagaagacctatttagttaaacagatcagggatttgaagagaccagctcagcaagaagcttaa

SEQ ID NO: 48681 - DNA, 1026 bp, Artificial Sequence
  derived and/or modified sequence
atgcccttccccttcggcaagagccacaagagccccgccgacatcgtgaagaacctgaaggagagcatggccgtgctggagaagcaggacatcagcgacaagaaggccgagaaggccaccgaggaggtgagcaagaacctggtggccatgaaggagatcctgtacggcaccaacgagaaggagccccagaccgaggccgtggcccagctggcccaggagctgtacaacagcggcctgctgagcaccctggtggccgacctgcagctgatcgacttcgagggcaagaaggacgtggcccagatcttcaacaacatcctgagaagacagatcggcaccagaacccccaccgtggagtacatctgcacccagcagaacatcctgttcatgctgctgaagggctacgagagccccgagatcgccctgaactgcggcatcatgctgagagagtgcatcagacacgagcccctggccaagatcatcctgtggagcgagcagttctacgacttcttcagatacgtggagatgagcaccttcgacatcgccagcgacgccttcgccaccttcaaggacctgctgaccagacacaagctgctgagcgccgagttcctggagcagcactacgacagattcttcagcgagtacgagaagctgctgcacagcgagaactacgtgaccaagagacagagcctgaagctgctgggcgagctgctgctggacagacacaacttcaccatcatgaccaagtacatcagcaagcccgagaacctgaagctgatgatgaacctgctgagagacaagagcagaaacatccagttcgaggccttccacgtgttcaaggtgttcgtggccaaccccaacaagacccagcccatcctggacatcctgctgaagaaccaggccaagctgatcgagttcctgagcaagttccagaacgacagaaccgaggacgagcagttcaacgacgagaagacctacctggtgaagcagatcagagacctgaagagacccgcccagcaggaggcctag

SEQ ID NO: 48682 - protein, 172 aa, Artificial Sequence
  derived and/or modified sequence
MKPPSSIQTSCKFKDVRRNVQKDTEELKSCGIQDIFVFCTRGELSKYRVPNLLDLYQQCGIITHHHPIADGGTPDIASCCEIMEELTTCLKNYRKTLIHCYGGLGRSCLVAACLLLYLSDTISPEQAIDSLRDLRGSGAIQTIKQYNYLHEFRDKLAAHLSSRDSQSRSVSR

SEQ ID NO: 48683 - DNA, 519 bp, Artificial Sequence
  derived and/or modified sequence
atgaagccccccagcagcatccagaccagctgcaagttcaaggacgtgagaagaaacgtgcagaaggacaccgaggagctgaagagctgcggcatccaggacatcttcgtgttctgcaccagaggcgagctgagcaagtacagagtgcccaacctgctggacctgtaccagcagtgcggcatcatcacccaccaccaccccatcgccgacggcggcacccccgacatcgccagctgctgcgagatcatggaggagctgaccacctgcctgaagaactacagaaagaccctgatccactgctacggcggcctgggcagaagctgcctggtggccgcctgcctgctgctgtacctgagcgacaccatcagccccgagcaggccatcgacagcctgagagacctgagaggcagcggcgccatccagaccatcaagcagtacaactacctgcacgagttcagagacaagctggccgcccacctgagcagcagagacagccagagcagaagcgtgagcagatag

SEQ ID NO: 48684 - DNA, 727 bp, Artificial Sequence
  derived and/or modified sequence
ctcggccggggcaccggtgagtcgccggcgctgcagagggaggcggcactggtctcgacgtggggcggccagcgatgaagccgcccagttcaatacaaacaagttgtaaatttaaagatgttagaagaaatgtccaaaaagatacagaagaactaaagagctgtggtatacaagacatatttgttttctgcaccagaggggaactgtcaaaatatagagtcccaaaccttctggatctctaccagcaatgtggaattatcacccatcatcatccaatcgcagatggagggactcctgacatagccagctgctgtgaaataatggaagagcttacaacctgccttaaaaattaccgaaaaaccttaatacactgctatggaggacttgggagatcttgtcttgtagctgcttgtctcctactatacctgtctgacacaatatcaccagagcaagccatagacagcctgcgagacctaagaggatccggggcaatacagaccatcaagcaatacaattatcttcatgagtttcgggacaaattagctgcacatctatcatcaagagattcacaatcaagatctgtatcaagataaaggaattcaaatagcatatatatgaccatgtctgaaatgtcagttctctagcataatttgtattgaaatgaaaccaccagtgttatcaacttgaatgtaaatgtacatgtgcagatattcctaaagttttattg

SEQ ID NO: 48685 - DNA, 519 bp, Artificial Sequence
  derived and/or modified sequence
atgaagcccccatctagtattcagacaagctgcaagttcaaggacgttcggcggaacgtacaaaaggataccgaggagttgaagtcctgtggaatccaggacatctttgtgttctgtactcgaggcgagctgtctaaataccgggtcccgaacctgctggatctctaccagcagtgcggcataattactcaccaccatccaatagccgatggcggaaccccggacatcgccagctgctgcgaaattatggaggaactgaccacatgcctcaagaactacaggaagactcttattcactgttacgggggcctcggacggagctgcttggttgctgcatgtctgctgctatacttgtctgataccatcagtccagagcaagccatcgactctctgagagaccttaggggcagtggggccatccagaccataaagcagtacaactacctccacgagttcagggataaactagctgcccatctgtctagcagggatagccagtcgaggagtgtctctagatag

SEQ ID NO: 48686 - DNA, 519 bp, Artificial Sequence
  derived and/or modified sequence
atgaagccacccagcagcatccagaccagctgcaagttcaaggatgtgagaagaaatgtgcagaaggacacagaggagctgaagagctgtggcatccaggacatctttgtgttctgcaccagaggagagctgagcaagtacagagtgcccaacctgctggacctgtaccagcagtgtggcatcatcacccaccaccaccccatcgcagatggcggcaccccagacatcgccagctgctgtgagatcatggaggagctgaccacctgcctgaagaactacaggaagaccctcatccactgctatggaggcctgggccgcagctgcctggtggccgcctgcctgctgctgtacctgagtgacaccatcagccctgagcaggccatcgacagcctgcgggacctgcggggcagcggggccatccagaccatcaagcagtacaactacctgcacgagttccgggacaagctggccgcccacctgagcagccgggacagccagagccgctctgtgtccaggtag

SEQ ID NO: 48687 - DNA, 519 bp, Artificial Sequence
  derived and/or modified sequence
atgaagccccccagcagcatccagaccagctgcaagttcaaggacgtgagacgcaacgtccagaaagatacagaggagctgaagtcatgcggtattcaagatatatttgtgttctgcactagaggcgagctatccaaataccgggttcccaaccttttggacctgtaccaacagtgtggcataatcacacaccatcatccaattgcagacgggggaacccctgatatagcgtcctgctgcgaaatcatggaggaactgaccacatgtctgaaaaattataggaagactctgatccattgctatgggggacttggccgttcctgtctggtggctgcctgcctccttctgtacctaagcgacactatttccccagaacaggccattgactcactccgggatctgcgggggtcgggagccattcagacaatcaaacagtataattaccttcacgaatttcgggacaagttggccgcacatctctctagcagagattctcagtcgcggtctgtctctaggtag

SEQ ID NO: 48688 - DNA, 519 bp, Artificial Sequence
  derived and/or modified sequence
atgaaacctccttcaagcatacagacgtcatgtaaatttaaggatgtccgaagaaatgttcagaaggacactgaagaacttaaaagctgcggcatccaggacatctttgttttctgcacccggggagagttgtcaaagtaccgggtgcccaacttgttagatttgtaccagcaatgcggtattataacccaccaccaccccattgctgatggaggtaccccagacattgcgagttgttgcgagatcatggaagagctgacaacttgtctgaagaattaccggaagaccctcatccattgctatggtggccttgggaggagttgtctggtcgccgcttgtctcctgctctatctcagcgacaccatttcgcccgagcaggccattgattcgctgagggaccttagaggttccggtgcgattcagaccattaagcagtataattacttgcacgaatttagagataaactggccgcacatctgagctcccgggacagtcagtcacgttccgtctccaggtag

SEQ ID NO: 48689 - protein, 1433 aa, Artificial Sequence
  derived and/or modified sequence
MWSLTASEGESTTAHFFLGAGDEGLGTRGIGMRPEESDSELLEDEEDEVPPEPQIIVGICAMTKKSKSKPMTQILERLCRFDYLTVVILGEDVILNEPVENWPSCHCLISFHSKGFPLDKAVAYSKLRNPFLINDLAMQYYIQDRREVYRILQEEGIDLPRYAVLNRDPARPEECNLIEGEDQVEVNGAVFPKPFVEKPVSAEDHNVYIYYPSSAGGGSQRLFRKIGSRSSVYSPESSVRKTGSYIYEEFMPTDGTDVKVYTVGPDYAHAEARKSPALDGKVERDSEGKEIRYPVMLTAMEKLVARKVCVAFKQTVCGFDLLRANGHSFVCDVNGFSFVKNSMKYYDDCAKILGNTIMRELAPQFQIPWSIPTEAEDIPIVPTTSGTMMELRCVIAIIRHGDRTPKQKMKMEVKHPRFFALFEKHGGYKTGKLKLKRPEQLQEVLDITRLLLAELEKEPGGEIEEKTGKLEQLKSVLEMYGHFSGINRKVQLTYYPHGVKASNEGQDPQRETLAPSLLLVLKWGGELTPAGRVQAEELGRAFRCMYPGGQGDYAGFPGCGLLRLHSTFRHDLKIYASDEGRVQMTAAAFAKGLLALEGELTPILVQMVKSANMNGLLDSDGDSLSSCQHRVKARLHHILQQDAPFGPEDYDQLAPTRSTSLLNSMTIIQNPVKVCDQVFALIENLTHQIRERMQDPRSVDLQLYHSETLELMLQRWSKLERDFRQKSGRYDISKIPDIYDCVKYDVQHNGSLGLQGTAELLRLSKALADVVIPQEYGISREEKLEIAVGFCLPLLRKILLDLQRTHEDESVNKLHPLCYLRYSRGVLSPGRHVRTRLYFTSESHVHSLLSVFRYGGLLDETQDAQWQRALDYLSAISELNYMTQIVIMLYEDNTQDPLSEERFHVELHFSPGVKGVEEEGSAPAGCGFRPASSENEEMKTNQGSMENLCPGKASDEPDRALQTSPQPPEGPGLPRRSPLIRNRKAGSMEVLSETSSSRPGGYRLFSSSRPPTEMKQSGLGSQCTGLFSTTVLGGSSSAPNLQDYARSHGKKLPPASLKHRDELLFVPAVKRFSVSFAKHPTNGFEGCSMVPTIYPLETLHNALSLRQVSEFLSRVCQRHTDAQAQASAALFDSMHSSQASDNPFSPPRTLHSPPLQLQQRSEKPPWYSSGPSSTVSSAGPSSPTTVDGNSQFGFSDQPSLNSHVAEEHQGLGLLQETPGSGAQELSIEGEQELFEPNQSPQVPPMETSQPYEEVSQPCQEVPDISQPCQDISEALSQPCQKVPDISQQCQENHDNGNHTCQEVPHISQPCQKSSQLCQKVSEEVCQLCLENSEEVSQPCQGVSVEVGKLVHKFHVGVGSLVQETLVEVGSPAEEIPEEVIQPYQEFSVEVGRLAQETSAINLLSQGIPEIDKPSQEFPEEIDLQAQEVPEEIN

SEQ ID NO: 48690 - DNA, 4302 bp, Artificial Sequence
  derived and/or modified sequence
atgtggagtttaaccgcctcagaaggcgagtccaccacagcccattttttcctgggcgcaggcgacgagggactgggcacccgcggcatcggcatgcgtccagaggagagcgatagtgaactgctcgaagatgaggaggacgaggtgcccccagagcctcagattatcgtcggaatctgcgcgatgacaaaaaaaagcaagtctaagcctatgacacagatcctagaacgcttgtgccgtttcgattatctcacagtggttatattaggtgaggatgtgatactcaatgaaccagttgagaactggccaagctgtcactgtttgatttctttccacagcaaaggctttccacttgataaagcagtggcctattctaagctgcggaacccattcctaattaatgatcttgcaatgcagtattatatccaagaccgacgtgaagtctaccgcatccttcaagaggagggaatagacttaccccgctatgcagtccttaatcgggaccccgccagacccgaggagtgtaatttgatcgagggggaagaccaggtagaggttaacggggcagtgtttcctaaaccttttgtggaaaaacctgtgtccgcggaggatcataacgtgtatatttactatccttcctcagctggcggcgggtcccagcgcctcttcagaaaaatcggatccagatcctcagtgtactcccccgaatctagcgtgagaaagacgggctcttacatttatgaagagttcatgcccacagacggcactgacgtgaaggtatacactgtgggcccggattatgcgcacgccgaagcccggaagtctcctgcattggacgggaaagttgagagggactctgaaggcaaggagatccgctatcccgtgatgctaaccgcgatggaaaaactggtggccagaaaagtgtgcgtagccttcaagcagaccgtgtgtggatttgacctcctgcgcgctaatgggcactctttcgtgtgcgatgtgaacggtttttcattcgtgaaaaactctatgaaatattacgacgattgtgccaagattctgggtaacacaatcatgcgcgaactggcaccacagtttcagataccatggagcatacctactgaggccgaggatattccaattgttccaaccactagtggaactatgatggagctccggtgcgtaatcgctatcattcgacacggagaccggaccccgaaacaaaaaatgaaaatggaggtgaaacatcctcggttcttcgccctgttcgagaaacacggcggctataagaccgggaagttgaaactgaagcggcccgaacagctgcaggaagtgctggatattacaaggttactcctggccgaactggaaaaagagcctggaggtgagatcgaggagaagactggcaagttggaacagctaaaatccgtcctggagatgtacgggcatttctctgggattaaccggaaggtacagctcacttattatccccatggagtcaaggctagcaacgagggccaggatccacagagggagaccctagcccccagcctgctcctggtgttgaagtgggggggagaactgaccccggcgggacgtgttcaggccgaagagctcggacgggcttttcgctgcatgtatccaggagggcagggcgattatgccgggttccctggatgtggcctgctcaggctgcatagcactttcaggcacgatcttaaaatctatgccagcgatgagggacgcgtgcagatgactgccgcagctttcgcgaaaggtttgctagctttggaaggagagttgactcccatccttgtgcagatggtgaagagtgcgaacatgaacgggttgttagactccgatggtgactcactaagctcatgccaacacagagtgaaagctcggctccaccacattctgcagcaggacgccccctttgggcctgaggactacgaccagttggcccccacaaggagcaccagtttgttgaactctatgacgatcattcagaacccggtcaaagtttgtgaccaggtttttgcgctcattgagaacctgactcatcagattcgggaacgtatgcaggaccctcgtagcgttgatctgcagttgtatcactccgaaactctggaactgatgctccagcgctggagcaagctggaacgcgacttcaggcagaaaagcggaagatacgatatctcaaagatccccgacatctatgactgtgtgaaatacgacgttcaacacaatggttcactgggactgcagggtaccgccgagctcttaagactttccaaggcactggcagacgtagtcatcccccaagagtatggcatttcacgggaggagaaacttgagatcgcggtcggcttttgcctcccactgttacggaaaattctgctcgatctccaaaggacacacgaagatgagagcgtcaataagctgcaccccttatgctacttaagatattcgaggggcgtactgagccctgggaggcacgtgcggacacgcctgtactttacaagcgaatcacatgtgcactcgctcttatccgtcttcaggtatgggggactcctggacgaaacacaggacgcccaatggcaaagggcactggactacctctcagcgatctctgagctcaattacatgacccagatcgtaatcatgctgtacgaagataacacacaggatccactgtccgaagagcgctttcacgtcgagctccacttttcacccggggtgaagggtgtcgaggaagagggatccgcccccgccggttgcggatttcggcccgcctcttcggagaatgaagaaatgaagactaatcaaggaagtatggaaaatttgtgtcctggaaaggcttcagacgagccagaccgggcactgcagactagccctcagccgcctgaaggccccggcctaccccgccgctctccactgatacggaacagaaaagccgggagtatggaagttttaagtgagacttcatcctccaggccaggaggatatcgactattttcttcctcaaggcccccgactgaaatgaaacagagcggactggggtcccagtgcaccggcctgttcagcacaaccgtcctgggcgggtctagttccgcaccgaatcttcaggattacgcccggtctcatggaaaaaagctcccacctgcatcgctcaaacatcgtgacgagctccttttcgtccccgccgttaagcggttttctgtgtcttttgctaagcaccctactaacgggttcgaggggtgttctatggtcccaacaatctatcccctggagacgcttcataatgcgctgtccctcaggcaagtgtcggaattcctgagcagggtgtgtcagcgccacaccgacgcccaagcccaagctagcgctgcactctttgattctatgcacagctcccaggcatcagacaatcccttttctccaccccgtacacttcacagtcccccgcttcagttgcaacaacggtccgaaaagcccccgtggtacagctcagggccatctagcaccgtatctagtgccggtccgtcatcccctacaactgtggacggaaactcacagtttggtttctctgaccagccttcccttaacagtcacgtggccgaggagcatcagggtttagggttgctacaagagacaccaggctctggcgcacaggagttgagtattgaaggggagcaagaattgttcgagcctaatcagtcaccacaggttccgccaatggaaacatcacagccgtacgaggaggtctcccagccttgtcaggaagtcccagatatctcgcagccctgccaggacatcagcgaggcactctcacagccatgccaaaaggtacccgatatcagccagcagtgccaggaaaaccacgacaacggtaaccatacatgtcaggaggtgccacacatctcccaaccatgtcagaagtctagtcagttatgccaaaaagttagcgaggaggtgtgtcagctgtgtctcgagaattctgaggaagtatcacagccctgccagggagtctctgtcgaggtgggaaagcttgttcacaagttccatgttggagtaggctctcttgtgcaggagacactggtggaggtcgggtcacccgccgaggaaatcccagaagaagtcattcagccctaccaggagttctcagttgaggtcggaagactcgcccaggaaacatctgctattaatctgttgtctcagggaatccccgagatcgacaagccatcgcaggagtttcccgaagaaatcgatttgcaggcgcaagaagtcccagaggaaattaattag

SEQ ID NO: 48691 - DNA, 4302 bp, Artificial Sequence
  derived and/or modified sequence
atgtggagcctgacggcttcggagggagagagcactaccgcccatttcttccttggagccggtgatgaagggttgggaacaaggggcatcggtatgcggcccgaggagtctgatagcgaacttcttgaagacgaggaggacgaagtgcctccagaaccgcaaatcatcgtgggcatttgtgcgatgacaaaaaaaagcaagagtaagcctatgactcagatactggagcgcctctgcagattcgattatcttacagtggtgatcctaggagaggatgtgatccttaatgaacccgtcgaaaattggccttcatgtcattgcctcatctcctttcacagtaagggcttccccctcgacaaagccgtggcatactccaagttacgcaacccttttttgatcaacgatttagccatgcagtattatatccaggacaggagggaggtctatcgcatacttcaggaggagggcatcgatctccccaggtacgcagttttgaaccgagacccagccaggcctgaggaatgcaatttaatcgagggtgaagatcaggtagaagtcaacggagctgtgttcccgaaaccattcgtggagaagccagtctcagccgaggatcacaacgtttacatatattacccctcaagcgctggaggagggtcacaacgactctttcgcaagattggttctaggagctcagtctatagtcccgagagcagtgtcaggaagacagggagctacatttatgaggagtttatgcctacggatggaaccgatgtgaaggtttacaccgtgggtcccgactacgcacacgccgaggccaggaaatcccccgcgctggatggaaaggtcgaacgcgattccgagggcaaggaaatcagatacccagtgatgttgacagctatggaaaaacttgtcgcaagaaaagtgtgtgtggccttcaaacagactgtgtgtggatttgacctgttgagagccaacggacattcatttgtgtgcgacgtgaatggtttctctttcgtcaagaactcaatgaagtactatgatgattgtgccaaaatacttggaaacacgatcatgcgagagctcgctccccagtttcagatcccctggtccatacccactgaggctgaagacattcctatcgtcccgaccacgtccggcacaatgatggagctccggtgtgtgatcgccatcatacggcacggagatcgaacccctaagcagaagatgaagatggaggtgaaacacccacggttcttcgcccttttcgaaaagcacgggggatataaaaccggtaagctgaaactgaaacggccagaacagcttcaggaggtcctggatattacacggcttcttctcgctgaactcgagaaggagccggggggtgaaattgaagagaagaccggaaaactagagcagctgaaaagcgtgctggaaatgtatggacacttttccggaatcaataggaaggttcagctgacgtattacccccatggcgtgaaggcctccaacgagggtcaggatccacagagggagaccctggcaccaagtctcctcctggtgcttaagtgggggggggagctcactccagccggcagagtgcaggcggaggaactcgggagggcatttcgctgcatgtatcctgggggtcagggtgactatgcaggcttcccaggctgtggcttgttaaggctgcactcaactttccgccacgatctgaagatctacgcatcagacgagggaagagtgcaaatgactgccgccgccttcgcgaagggactcctggccctcgagggcgagctgacgcccatcctcgtccagatggtgaaaagcgccaatatgaacggactgctggattccgacggagactctcttagttcatgccagcatcgggtgaaagcccggctgcaccacattctacagcaagacgccccatttggccctgaggactacgatcagctggcccctactcgaagcacatccctgttgaactctatgactattatccaaaaccccgtcaaggtgtgtgatcaggtctttgctttgattgagaatctgacccaccagattcgtgagcgcatgcaagatcccaggtcagtggacctgcagctttaccactccgaaactctggaattgatgttacagcgctggtcaaagctcgaacgcgatttcaggcaaaagtctgggcgatacgacatttcaaaaattccagatatttatgattgcgtaaaatatgacgttcagcacaatggtagtctgggcctccagggaacagctgagttgctcagactgtccaaggccctcgcggatgtagtgattccacaagagtacggtatctcacgggaggagaagttggagatcgctgtgggcttctgtctgcctctgctgaggaaaatcctcctcgatctgcaacggacccatgaagacgaatctgtgaataagttgcacccattatgttacctgcgatacagtcggggggtgctgagtcccggaagacacgtgcgtaccaggctgtattttactagcgaatcccatgtgcatagccttctttccgtgtttcgctacgggggactactggacgaaactcaggacgctcagtggcagagggcgttggactatctgagcgcaatcagtgagctgaattacatgacccaaattgttattatgctgtatgaagataacactcaggatcccctcagcgaagagcggttccacgtggagctgcattttagccccggggtgaagggcgttgaagaggagggttctgctcctgctgggtgcggttttcgacctgctagctccgaaaatgaagagatgaaaactaaccaggggtcaatggagaatttatgcccaggcaaggcctccgatgagcccgacagggctctgcagaccagtcctcagcctcccgaaggacccggtctgcctcggcgaagcccactaattaggaaccgcaaagccggttctatggaagtcttgagcgaaacttccagttctagacctggcggttatcggctgttttcttcctccagaccccctacagagatgaagcaatctggtttagggagtcagtgtacaggccttttcagcacgaccgtgttaggtggatcaagctcggctcctaacttacaggattatgcacgttctcatggaaaaaagttaccccccgcatcactgaaacacagagatgagctactgttcgtacctgccgtgaagcggttttctgtcagcttcgcaaaacatccaaccaacgggtttgagggttgcagcatggtcccaaccatctatcctcttgaaactctgcacaacgccctgagtctcaggcaagtgagcgagtttctgagcagggtttgccagagacacacagatgcccaagctcaggctagtgccgctctattcgattcaatgcatagcagtcaggcctcagataaccccttcagcccacctcggaccctgcactcacctcctttacagcttcagcagcggtcagaaaagcctccttggtacagttctggtccgtccagcaccgtgagttcagcaggacctagctcccctactactgtggatgggaactctcagttcgggttcagcgaccagccatctctaaactctcacgtcgccgaggagcaccagggactcgggttactgcaagagaccccaggttctggagctcaagagctgtctatcgagggcgagcaggaacttttcgagccaaaccagagccctcaggtgcccccaatggagacctcacagccctacgaggaagtctcccagccttgccaggaagttccggatatttctcagccttgtcaggacatcagcgaagcactaagccagccttgccaaaaggtgcccgacatttcacaacagtgtcaggagaaccacgacaacgggaaccacacttgccaggaggtgccccacatctctcaaccttgccagaagtcatcccaactttgtcaaaaggtgtctgaggaagtgtgtcagctttgcttggagaatagtgaagaggtgtcacagccctgtcagggcgtgtctgtggaggtaggtaagcttgttcacaaatttcacgtcggcgtgggttctctggtgcaggagactctggtggaagtgggctctccggctgaagaaattccagaggaggtgattcagccttatcaagaattcagcgtggaggtgggaagactggcgcaggagacctccgccataaatctgctttcccagggaattccagaaatcgacaaaccttctcaagagtttcctgaggagatagatctgcaggcacaggaagtccccgaggaaattaactag

SEQ ID NO: 48692 - DNA, 4302 bp, Artificial Sequence
  derived and/or modified sequence
atgtggagcctaaccgcaagcgaaggagagagcactaccgcccattttttcctgggcgccggtgacgagggtttggggacaagaggcatcgggatgcgcccagaagaaagtgactccgagctgcttgaagatgaggaggacgaggtgccgccagagcctcagatcatcgtggggatctgcgcaatgacaaaaaaatccaaatcaaagcctatgacccagatactcgaaagactatgccgtttcgactatcttactgtggtaatcttgggggaggacgtcattctgaatgaacccgtggagaactggcccagctgtcactgcctgatcagttttcactccaagggctttccactcgataaggccgtcgcctattcaaagttgcgaaacccctttttgatcaacgacttggctatgcagtactatatccaggaccgccgggaggtttacagaatccttcaggaggagggtattgacctgcctaggtatgctgttctgaatcgcgatcccgctcggccagaggagtgcaacctgatcgagggtgaagaccaggttgaggtcaatggagctgttttcccaaagcctttcgtagagaaacctgtatcagccgaagaccacaacgtgtacatctattacccgagcagcgccggaggtggatcccagcgactgtttcgcaaaattggtagcagatctagtgtttattcgcccgagtcatccgtgcggaaaacagggtcctacatctacgaagaatttatgcccacagacggcaccgatgtgaaggtgtacactgtgggacccgattacgcacacgcagaggcacggaaatctccagccctggacgggaaggtggaacgtgactcagaaggcaaagagattagatacccagtgatgctaaccgccatggagaagttggttgctagaaaggtctgtgtggctttcaagcagactgtgtgtgggtttgacctgctgcgcgcaaacgggcactctttcgtgtgcgacgttaatggtttttccttcgtcaaaaacagtatgaagtattacgatgattgcgccaagatcctagggaatacaattatgagagagctcgctccacagttccagataccctggtcaatcccaacggaggctgaggatataccaattgtccctacaactagcggcactatgatggagctcagatgtgtaatcgcgattatccggcatggtgataggacccctaaacaaaagatgaagatggaagtgaaacacccccgattcttcgctctcttcgagaagcacgggggatataagaccggcaagctaaagctgaaacggcctgagcagctacaggaggtgctggatattactagactcctcctggccgaattagaaaaagagcccggcggagagattgaggagaagactggaaaattagagcaactgaagtctgtgcttgaaatgtacggtcacttctcagggataaaccgcaaggttcagctgacctactacccacatggggtgaaggcgagcaacgagggccaggacccacagcgggaaacgctggcccccagcctgctgttggttctgaagtgggggggcgaacttacccccgccggacgcgtgcaggccgaggaactcgggcgcgctttccgctgcatgtatccgggaggccagggggactacgccggctttccagggtgcggccttttacgtttacactccacgttccgccacgatctgaaaatctatgccagtgatgaagggcgagttcagatgactgccgcagctttcgcgaagggcttgttggccctggagggtgagttgaccccaatacttgtgcaaatggttaagagcgccaatatgaatggcctgctggacagtgatggcgacagtctgtcctcctgtcagcatagggtgaaagccaggttacaccacatcttgcagcaagacgcccccttcggccctgaggactatgaccaactcgcccctacccggtccacgtctttactcaactcaatgacaattatccagaacccagtaaaggtttgcgatcaggtgttcgccctcattgagaacctgacccaccagataagagagcggatgcaagaccctagatccgttgatctgcaattgtaccattctgagacactggaactcatgctgcaaaggtggtccaagcttgagcgggattttagacagaagtccggtagatacgatatttccaagatacccgatatctacgactgtgttaaatacgacgtgcagcacaacggttctctcggcctgcaaggaaccgctgagctcctcagactttcaaaggccttagcagatgtcgtcatcccccaagagtatggcattagccgggaggagaagttagaaattgctgttggtttctgcctgccactgctgcggaaaatattgctagacctacagcgtacccatgaagacgagtccgtgaataagctgcatccactgtgttaccttcgctactcccgcggtgtattgtcacccggtcgccatgtgaggacacgactgtatttcaccagcgaaagccacgtgcatagtttgttatctgtgttcagatatgggggacttctcgacgaaactcaagatgcccagtggcagagagcccttgattacctatccgccattagtgagttaaactacatgacacagattgtcatcatgctatacgaggacaacacacaggaccctctgagtgaggagcgtttccacgtagagctacatttctcacccggggtgaagggcgtagaagaagaaggcagtgcgcctgcaggatgtggcttccgccctgcgtcttccgagaacgaagagatgaagaccaaccagggctcaatggagaacctttgtccgggaaaagcatcggacgagccagacagggctctgcagacctcgcctcagccgccagagggtccaggcctgccccgacggagccctctgattcgcaacaggaaagctggctcaatggaggtcttgtccgagacttcttctagcaggcccggtggctatcggctgttctcctcttcaagacccccaactgagatgaagcagagtgggcttggttctcagtgcaccggactgttctctaccactgtgctcggaggctcatcctctgccccaaacttgcaggattacgccagatcccatggcaaaaagctgcctccagcctcgctgaaacatcgggatgagctcctattcgtgccggctgtaaagcgattctctgtgtcctttgccaaacatcccactaacggtttcgagggatgtagtatggtccccaccatttacccccttgaaacccttcacaacgcactctcactgagacaggtaagcgaatttctgtctcgggtgtgtcagaggcatactgatgcgcaggcccaagcctctgcggctctcttcgactctatgcactcttcacaagcatcagacaatccgttctccccaccacgtacattacacagtcctcctctgcaactgcaacagagaagcgagaagcctccctggtactcttcggggccgtcctctaccgtcagctccgcagggccatcaagcccaacaacagtcgacggcaattcacagtttgggttttctgaccagccatctctcaattcacacgtggccgaggagcaccagggcctaggtctccttcaggaaacccccgggtccggggcgcaggagctcagtatagagggcgagcaggagctgtttgagcccaaccagtctccccaggtgcccccaatggaaacttctcagccttacgaggaagttagccagccctgtcaagaagttccagatattagtcagccctgccaggatatttctgaagctctgtcacagccctgccaaaaggtgcccgacatctcccagcaatgccaggaaaaccacgacaatggaaatcacacatgccaggaagtcccccacatttctcagccttgccagaagtcgtcacagctgtgtcaaaaggtgtcggaagaggtgtgccagctttgcctcgagaactctgaagaggttagtcagccatgccagggagtatcagtagaggtcggcaagctggtacacaaatttcacgtcggtgtcggcagcctcgtgcaggaaactttagtcgaagtcggcagtcctgcagaggagatccccgaggaagtgatacagccatatcaggagttctccgtagaagtcggcagattggcccaggaaacttctgcgattaacctcctgtcccaggggattcctgagatcgacaaaccatctcaagaatttcctgaggagatcgatttacaggctcaggaagtgccggaggagatcaactag

SEQ ID NO: 48693 - DNA, 4302 bp, Artificial Sequence
  derived and/or modified sequence
atgtggagcctgacagccagcgagggggagagcaccacagcccacttcttcctgggcgctggagatgagggcctgggcacccggggcatcggcatgaggcctgaggagagtgacagcgagctgctggaggatgaggaggatgaggtgcccccagagccccagatcatcgtgggcatctgtgccatgaccaagaagagcaagagcaagcccatgacccagatcctggagcggctgtgccgctttgactacctgactgtggtgatcctgggagaagatgtgatcctgaatgaacctgtggagaactggcccagctgccactgcctgatctccttccacagcaagggcttccccctggacaaggctgtggcctacagcaagctgaggaaccccttcctgatcaatgacctggccatgcagtactacatccaggacagaagagaggtgtaccgcatcctgcaggaggagggcatcgacctgcccaggtatgctgtgctgaacagagatcctgcccggcctgaggagtgcaacctgattgaaggagaggaccaggtggaggtgaatggagctgtgttccccaagccctttgtggagaagcctgtgtctgctgaggaccacaacgtgtacatctactaccccagcagcgctgggggcggcagccagaggctcttcaggaagattggcagccgcagctctgtgtacagccctgagagctctgtgaggaagacaggcagctacatctatgaggagttcatgcccacagatggaacagatgtgaaggtgtacacagtgggccctgactatgcccacgccgaggccaggaagagccctgccctggatggcaaggtggagcgggacagcgagggcaaggagatccgctaccctgtgatgctgacagccatggagaagctggtggccaggaaggtgtgtgtggccttcaagcagacagtgtgtggctttgacctgctgcgggccaacggccacagctttgtgtgtgatgtgaatggcttctcctttgtgaagaacagcatgaagtactatgatgactgtgccaagatcctgggcaacaccatcatgagggagctggccccccagttccagatcccctggagcatccccacagaagctgaggacatccccatcgtgcccaccaccagcggcaccatgatggagctgcgctgtgtgattgccatcatccgccacggggacaggacccccaagcagaagatgaagatggaggtgaagcacccccgcttctttgccctgtttgagaagcatggaggctacaagacaggcaagctgaagctgaagaggcctgagcagctgcaggaggtgctggacatcacccggctgctgctggccgagctggagaaggagcctggaggagaaattgaggagaagacaggcaagctggagcagctgaagtctgtgctggagatgtatggccacttcagcggcatcaacaggaaggtgcagctgacctactacccccatggagtgaaggccagcaatgaaggccaggacccccagcgggagaccctggcccccagcctgctgctggtgctgaagtggggcggggagctgaccccagctggccgggtgcaggccgaggagctgggccgggccttccgctgcatgtacccaggcggccagggcgactatgccggcttccctggctgcggcctgctgcggctgcacagcaccttcagacatgacctgaagatctatgccagtgatgagggccgggtgcagatgacagctgctgcctttgccaagggcctgctggccctggagggggagctgacccccatcctggtgcagatggtgaagagcgccaacatgaatggcctgctggacagtgatggagacagcctgagcagctgccagcaccgggtgaaggcccggctgcaccacatcctgcagcaggatgccccctttggacctgaggactatgaccagctggcccccaccaggagcaccagcctgctgaacagcatgaccatcatccagaaccctgtgaaggtgtgtgaccaggtgtttgccctgattgagaacctgacccaccagatccgggagaggatgcaggaccccaggtctgtggacctgcagctgtaccacagcgagaccctggagctgatgctgcagcgctggagcaagctggagcgggacttccggcagaagagcggccgctatgacatcagcaagatcccagacatctatgactgtgtgaagtatgatgtgcagcacaacggcagcctgggcctgcagggcacagctgagctgctgcggctgagcaaggccctggctgatgtggtgatcccccaggagtatggcatcagccgggaggagaagctggagattgctgtgggcttctgcctgcccctgctgaggaagatcctgctggacctgcagaggacccatgaagatgagagcgtgaacaagctgcaccccctgtgctacctgcgctacagcagaggagtgctgagccctggccgccacgtgaggacccggctgtacttcaccagcgagagccacgtgcacagcctgctgagcgtcttccgctatggaggcctgctggatgagacccaggatgcccagtggcagagggccctggactacctgagcgccatcagcgagctgaactacatgacccagatcgtcatcatgctgtatgaggacaacacccaggaccccctgtctgaggagcgcttccacgtggagctgcacttcagccctggggtgaagggcgtggaggaggagggcagcgccccagctggctgcggcttccggcctgccagcagtgaaaatgaggagatgaagaccaaccagggctccatggagaacctgtgccctgggaaggccagtgatgagccagaccgggccctgcagaccagcccccagcccccagagggccctggcctgcccaggaggagccccctcatccggaacaggaaggccggctccatggaggtgctgtctgagaccagcagcagcaggcctgggggctaccgcctcttcagcagcagccggcccccaacagagatgaagcagagcggcctgggcagccagtgcaccggcctcttcagcaccaccgtgctgggcggcagcagcagcgcccccaacctgcaggactatgcccggagccacggcaagaagctgcccccagccagcctgaagcacagagatgagctgctgtttgtgcctgctgtgaagcgcttctctgtgtcctttgccaagcaccccaccaacggctttgagggctgcagcatggtgcccaccatctaccccctggagaccctgcacaatgccctgagcctgcggcaggtgtctgagttcctgagccgggtgtgccagaggcacacagatgcccaggcccaggccagcgctgccctgtttgacagcatgcacagcagccaggccagtgacaaccccttcagcccccccaggaccctgcacagcccccccctgcagctgcagcagaggtctgagaagccaccctggtacagcagcggccccagcagcacagtgtcctctgctggccccagcagccccaccaccgtggatggcaacagccagtttggcttcagtgaccagcccagcctgaacagccacgtggccgaggagcaccagggcctgggcctgctgcaggagaccccaggcagcggggcccaggagctgagcattgaaggagagcaggagctgtttgagcccaaccagagcccccaggtgccccccatggagaccagccagccctatgaggaggtgtcccagccctgccaggaggtgcctgacatcagccagccctgccaggacatcagcgaggccctgagccagccctgccagaaggtgcctgacatcagccagcagtgccaggagaaccacgacaatggaaaccacacctgccaggaggtgccccacatcagccagccctgccagaagagcagccagctgtgccagaaggtgtctgaggaggtgtgccagctgtgcctggagaacagcgaggaggtgtcccagccctgccagggcgtgtctgtggaggtgggcaagctggtgcacaagttccacgtgggcgtgggcagcctggtgcaggagaccctggtggaggtgggcagccctgctgaggagatccctgaggaggtgatccagccctaccaggagttctctgtggaggtgggccgcctggcccaggagaccagcgccatcaacctgctgagccagggcatccctgagattgacaagcccagccaggagttccctgaggagattgacctgcaggcccaggaggtgcctgaggagatcaactag

SEQ ID NO: 48694 - DNA, 4302 bp, Artificial Sequence
  derived and/or modified sequence
atgtggagcctgaccgccagcgagggcgagagcaccaccgcccactttttcctcggcgctggtgacgagggcctcggaactcgcggcattggaatgcggcccgaagaatctgacagtgagctcctagaagatgaggaggatgaagtgcccccagagccacagataatcgtgggtatctgtgccatgacgaaaaagagcaagagcaagccaatgacacaaatacttgagcgcttatgccggtttgactacctgaccgtggttattttgggtgaagacgttatcctcaacgagcccgtcgagaactggcctagctgccactgccttatctcgtttcactcaaagggctttccactggacaaggccgtggcatacagtaaactgcgcaatccatttctgataaacgacctggccatgcagtattacattcaagataggcgggaggtgtaccgaatccttcaggaggagggaattgacctgccgaggtatgcggtcctcaacagggacccagccaggcccgaagagtgtaatctgatcgaaggagaagatcaggtcgaagttaacggcgcggtattcccaaagcccttcgtagaaaaaccagttagtgcggaagaccataatgtctatatttattacccaagctcagccggtggcggctctcagagactctttagaaagataggaagtagatcttcagtatacagtccagaatcaagcgtacggaaaacggggtcatacatttacgaggagttcatgccaaccgacggcactgacgtgaaggtatatacagtgggacccgactacgcacatgctgaagctcggaagtctcctgcactcgatggtaaagtagagagagatagcgaaggtaaggagatccgctatccagttatgttgaccgctatggaaaagctggtggcgcggaaggtgtgcgtggcctttaagcagacggtgtgcgggtttgatctgctgcgggcaaatggccattcttttgtgtgcgatgttaacgggttcagcttcgtcaagaatagcatgaaatactacgatgactgcgctaagattctgggcaatacaatcatgagagagctggcaccacagtttcagataccctggagcatccctacggaagctgaggacattccaatcgtgccaacgacttcagggacaatgatggaattgcggtgtgtaatcgcgatcattcgtcacggagatagaaccccaaaacaaaagatgaagatggaggtgaaacaccccaggttctttgccctgtttgagaagcatggtggatataaaaccggaaagctgaagttgaagcggcccgaacagttacaagaggtgttagatatcaccagactgcttctggctgaactcgaaaaagagcctgggggtgagattgaggaaaagactggaaagctggagcagctcaagagtgtcctagaaatgtacggtcactttagtgggatcaacaggaaagtccagctaacctactacccccacggcgtgaaggcaagtaacgaggggcaggaccctcagagggaaacgctcgctccctcgctgttgctcgtgctcaagtggggcggcgagttgaccccagctggcagggtccaagctgaggaacttggtagggcttttaggtgcatgtaccccggcgggcagggcgattacgccggatttcccgggtgcggcttactgcgcttacactccacattccgtcacgacctgaaaatctatgccagcgatgagggaagagtccagatgactgctgccgccttcgcgaaggggctgctggctcttgaaggcgaactaacgccaatcctggttcaaatggttaaaagcgctaacatgaatggcctactggattccgatggtgactccctgtcctcatgtcaacacagagtgaaggcacggttgcatcatatactccaacaagacgctccttttgggccggaggattatgaccagctggcaccaacacggtctacaagtttgctcaacagtatgaccattatccagaatccagttaaagtctgtgatcaggtctttgcactaatagagaaccttacccaccagattagagagagaatgcaggatcccaggtccgttgacctgcagctgtaccactccgagacattggaattgatgctgcagcgttggagcaagctcgaaagagatttcagacagaaaagtgggaggtacgatatttccaagatccccgacatctatgattgtgtgaaatatgacgtgcaacacaacggttcactcggcttgcagggcaccgctgaacttttaaggctcagcaaggctctggcggacgtggtgatccctcaagagtatggtatttcacgggaggagaagctggagatcgccgtcggcttctgtctgcccctgcttagaaagatcctgcttgatctgcagagaacacacgaggacgagagtgtgaataaactgcatcctttatgttacttaagatactcaagaggcgtgctctctcccggacggcacgtacgcactcgcctttatttcaccagcgaaagccacgtgcactccctgctctccgttttccggtatggcggtcttcttgacgaaacccaggacgcacagtggcagagggcactggattacctgagtgccatatccgagctgaattacatgacgcagattgtaatcatgctctacgaagataatacacaggacccgctgagtgaggaaagattccacgtcgagctgcacttcagtcctggtgtgaaaggagttgaagaggaagggtcagctcctgccggctgtggcttccggcctgcttcttccgaaaacgaagagatgaagactaatcaggggtcgatggagaacctctgtcccggaaaggcttcagacgagcccgacagagccctacaaacaagtccacagcctcccgaggggcccgggctgcctaggagatcacctctaatccgtaatcgtaaggctggatctatggaggtgctgtccgagacttccagctcccgacctggtggttaccggctgttttcttcaagtcggcctcctaccgagatgaagcaaagtgggctaggcagtcagtgcaccggcctatttagcaccacggtgctgggcgggtccagctctgcgcccaacttgcaggattacgccaggagccacggaaaaaaattacctcctgcatctctgaagcacagggacgagctcctgttcgttccggccgtgaagcgattctccgtttcattcgcgaaacatccgaccaacgggttcgagggatgtagtatggtgccaacaatataccccctcgagactttacacaatgccctaagcctacggcaagtcagcgaattcctgtctagagtgtgtcagcgccacactgacgcacaggcccaggcttcagcggccctcttcgatagcatgcactcctcccaggcatcagacaacccatttagccctccccggaccttgcacagtcctcccctccaactgcagcagagaagtgagaagcctccctggtattcgtcaggcccatcctcaacggttagctccgctggaccgagcagcccaactactgtcgatggaaacagccagttcggctttagcgaccagccgagtttgaactcacatgtggctgaggagcaccaagggctgggattgctgcaagagacgccaggcagtggggcccaagaactctccatagagggggaacaggaattgttcgagcctaaccagtctcctcaggtccctccgatggaaacctcccagccttatgaggaagtatcccaaccatgtcaagaagtgcctgacatctcccagccatgccaggatattagtgaagccctctcgcaaccctgtcagaaggtgcccgatatttcacagcaatgtcaggagaatcacgataacggcaatcatacctgccaggaggtaccccacattagccagccctgtcagaagagcagccaactttgtcaaaaggtgtctgaagaagtctgtcaactgtgcttggaaaattctgaggaggtgtcccaaccttgtcagggtgtgtctgtggaggttgggaaactggtccacaagtttcatgtcggggtgggaagccttgtgcaggaaactttagtggaagttgggtcacccgctgaagaaataccagaggaggttatccagccatatcaggagttcagcgttgaggtgggccggctcgcgcaagagacctccgccattaacctgctcagccaggggatcccggagattgataagccatcccaggagtttcccgaagaaatagacctgcaagcgcaggaagttcccgaggagattaactag

SEQ ID NO: 48695 - DNA, 5644 bp, Artificial Sequence
  derived and/or modified sequence
tccggcgggactcaagagtagccttcctcgaggacctgcctttcccatttgctgcctgaagttaatgtttcttgctggccaaatcagggacatgccggcattagcgggatgagtgggtgttccggcagggatgtggtcattgacggccagtgagggcgagagtaccacggcccacttcttccttggagctggagatgaggggctgggcacccgtggaataggcatgaggccagaagagagtgacagcgagctccttgaggatgaggaggatgaagtgcctcctgaacctcagatcattgttggcatctgtgccatgaccaagaaatccaagtccaagccaatgactcaaatcctagagcgactctgcagatttgactacctgactgttgtcattctgggagaagatgtaatccttaatgaacctgtggaaaactggccatcctgccactgcctcatctctttccactccaaaggctttcctctggacaaagctgttgcttactccaagcttcgaaacccctttcttatcaatgatctggccatgcagtattacatccaagataggagggaggtgtaccggatcctgcaggaagagggtattgatctgcctcgatatgctgtgctcaaccgtgatcctgcccggcctgaggaatgcaacctgatagaaggtgaagaccaagtagaggtcaatggagctgtctttcccaagccctttgtggagaagccagtgagtgcagaagaccacaatgtttacatctactaccccagctcagctggaggaggaagccagcgtctctttcgtaagattggcagccgaagcagtgtttactctcctgagagcagcgtccgaaagacggggtcgtacatctatgaggagtttatgccaacagatggcacagatgtcaaggtgtatacagtggggccagattatgcccatgctgaagctagaaaatctccagctttggatgggaaggttgaacgagacagtgaggggaaagagattcgatatccagtcatgctgactgccatggaaaagctggtggccaggaaagtctgcgtagctttcaagcaaacagtttgtggatttgaccttcttcgtgccaatggtcattcctttgtgtgtgatgtcaatggctttagttttgtcaagaactcgatgaaatactacgatgactgtgccaagattctggggaacaccataatgcgggagcttgccccacagttccagattccatggtccatccccacggaggctgaggacattcccattgttcccaccacatctggcactatgatggaacttcgttgtgtcattgcaattattcgtcatggggatcgtactcccaagcagaagatgaagatggaagtgaaacacccaaggttttttgctctgtttgaaaaacatggtggctacaagacagggaaattaaaactcaagcgacctgagcagctccaggaggtgctggatatcacaaggctgttgttggctgaactggagaaagaaccaggtggtgagatcgaggagaagactggaaaactagagcagctgaagtctgtactggagatgtatggtcacttctcaggtataaaccggaaggtacaattgacttactaccctcatggagtaaaagcttctaatgaggggcaagatccacagagggaaactctggccccatctctgttgctggtactgaagtggggtggagaactgactcctgctggccgtgttcaggctgaggagctggggcgagcttttcgctgcatgtaccctggaggacagggtgactatgctggcttccctggttgtgggctgcttcgtctccatagcactttccgccacgatctcaagatctatgcctctgatgagggtcgtgttcagatgactgctgctgccttcgccaagggccttctggctctagaaggggagctgacacccattttggtgcaaatggtgaagagtgccaacatgaatgggctactggacagcgatggggattccttgagcagctgccagcaccgggtgaaggctcggctgcaccatattctacagcaggatgcgccctttggccctgaggactacgatcagctggctcccaccagaagtacttccctgctcaactccatgactatcatccagaatcctgtgaaggtctgtgatcaggtatttgccctgatcgaaaacctcacccaccagatccgggaacgaatgcaggaccccaggtctgtagacctgcagctctaccacagtgagacactagagctaatgctacagcgttggagcaagctggagcgtgactttcgacagaagagtgggcgctatgatatcagtaagatccctgacatctatgactgtgtcaagtatgatgtgcagcacaatgggagtctgggacttcaaggcacagcagagttgctccgtctctctaaggcactggctgatgtggtcattccccaggagtacgggatcagtcgggaggagaaactggaaattgctgtgggcttctgtcttccactgttgcggaagatactacttgacctgcagagaacccacgaggatgagtctgtcaacaagctgcatcccctctgttatctcaggtactcccgaggcgtgctctccccaggtcgccacgttcgaacgcgtctctatttcaccagtgagagccatgtccactccctgctcagtgtcttccgttatggaggacttcttgatgagacccaggatgcacaatggcagcgagctttggattatcttagtgccatctcagagcttaactacatgacccagattgtcatcatgctttatgaggacaacacacaggatcccttatcagaggaacggttccatgtggagctacacttcagccccggagtgaaaggtgttgaggaagaaggcagtgccccggctggctgtggattccgtccagcctcttctgagaatgaggagatgaaaaccaaccaaggcagtatggagaacctgtgtccaggaaaggcatcagatgaaccagaccgggcattgcagacttcaccccagcctcctgagggccctggccttccgaggagatcacccctcattcgtaaccgaaaagctggttccatggaggtactttctgagacttcatcctcgaggcctggtggctaccggctcttttcatcttcacggccacccacagaaatgaagcagagtggcctaggctcacagtgcacagggctgttcagcaccacagtgctgggtggctcctccagtgccccgaatcttcaggactacgcccgcagccatggcaaaaagctaccacctgccagtctgaagcaccgagatgagctcttgtttgtcccggccgtaaaacgattttctgtgtcgtttgcaaagcatccgactaacgggtttgaagggtgttccatggtgcctaccatctaccctctggaaacactgcataatgccctttccctacgtcaagtgagtgaattcttgagtagagtctgccagcgccacactgatgcccaggcacaggcatctgcagccctctttgattccatgcacagcagccaggcctcagataacccattttctccaccacgtactcttcattcacctcccctgcaactccagcagcgctctgagaagcccccttggtacagcagtggcccttctagcactgtgtccagtgctggtccttcttcccctactacagtagatggtaactcccaatttggcttcagtgatcaaccctccctaaattcacacgtggctgaagaacatcaaggccttgggctgctccaggagacccctgggagtggagcacaagagctctccatagaaggggagcaagagctttttgaaccaaatcagtccccacaggtgccacctatggaaaccagccagccatacgaggaggtcagccagccatgtcaggaggtccctgacatcagccagccatgccaggacatttctgaggcgctcagccagccatgtcagaaggtccctgacatcagccagcaatgccaggagaaccatgacaatggtaaccacacatgccaggaggtccctcacatcagccagccatgccagaagtccagccaactgtgccagaaagtctctgaggaagtttgccagctatgtctggagaactccgaggaggtcagccagccatgccagggggtctctgtggaggttggcaagctggtccataagttccatgtaggggttggtagcttggtccaggaaacccttgtagaagttggcagcccagctgaagagatccctgaggaggtcatccagccataccaggagttctctgtggaggttggcaggctggcccaggagacttctgcgatcaatctgttatctcagggcatccctgagattgataaaccatcccaagagttccctgaggagattgatctgcaggcccaggaggtccctgaggagataaattagaagtcctgggtggtccctgaagtgattgatcagctgcctggagagggtattcctcaagcccagcatccatctggtgatccaaaccctcagagccagtctctagcccatgaccagcactcaccccttccaccagcaacatgtgattaattttctcattagtggtatcacactataccagccatttgagccagcaaccttttctgttggctaactcactggccagctctcaccagcggtgtctggggaagtagttctctttgtatgaagcatacctgtgccagagctgtggttgaggaggagccagttttaggttcgaagaagccattggctcctcacttagccattagacttgaataggatttccttggggtgggttggtctgtcattacccagccttctctgagcatcctaggaaatcacagattgttaaaggaaatgccgcttcactgctgaagacaccatctggcgacagcaaatgcaaaagaggggactctagggtcttcacttttctggggaaatgttcacgacttctcaaggtacgcttagaccatatgtgcattcaggggactcttgtctttgccagcactcctcaggtgagcccgggatggctatctgaaatgtctggaaaatagagtcccttccccaaacatctgacatggccactaaatctttagacttgccttatagatccttccatatcatccccaagtgccccttctgcctcagtcctgttcctctgggcaatagctctagggaaaagtaggtattagactgctgtgcaaaattcagagcaactacttaaaatgctctagaggattcttagccagtctgtgaaagtgggcctcctctgtggtggggctgtttggcttaggagatgctgtagtagtagagataatcaggttctattttaagcaatcagcagagatcaatattgtacagatacaagcaaaggtttaataaatatatatatatatatttatttctgtagttgtgccagggacagactggccaaagaccaaacactgcagggtccccaagaaatttgtccttatatcattgtgtctgagggccagatatgattatgaagctttttccaaagatccagggatgggaatgggagtgggtaggaggggtaatgcggtcattggagtcgggggctggaacattatgagtgctcaataaatataaactaatgagaatggtggtgatgga

SEQ ID NO: 48696 - DNA, 4302 bp, Artificial Sequence
  derived and/or modified sequence
atgtggagcctgaccgccagcgagggcgagagcaccaccgcccacttctttctcggcgccggggacgagggcttgggaacccggggcattgggatgaggcctgaggaaagcgactccgaactgctggaggatgaggaagacgaagttccacccgaaccacagatcatcgtggggatctgcgccatgactaagaaatccaagtccaagccaatgacgcagattctggagcgcctatgtcgctttgactacctcaccgtggttattctgggagaggacgtgattttgaacgagccggtggagaactggccaagttgccattgcctgattagttttcactccaaagggttccctttggataaggccgttgcctactctaaactgcgcaatccctttctcatcaacgatttggctatgcagtattacattcaggatcggagagaggtgtaccgcattctccaggaggagggaatagatttgcctagatacgcagtcctgaatagggaccccgctagacctgaggagtgcaacctgatcgagggcgaagaccaggtggaagtgaatggagctgtcttcccaaaaccgttcgtcgaaaagcctgtgtccgccgaagaccataacgtatacatctactaccccagctctgcaggaggcggctcgcagcggctgttccgaaagatcggctcgaggagtagcgtgtactctccggagtctagcgtcaggaagaccgggtcctacatttacgaagaattcatgccaaccgatgggacggacgtgaaggtgtacaccgtaggccccgattatgcccacgcagaggctcggaagtctcccgccctcgatggaaaagtggaacgggacagcgaagggaaagagatccgctatcccgtaatgttaacggcgatggaaaaattagttgcaagaaaagtatgcgttgcgttcaagcagactgtctgtgggtttgacttgctcagagctaatgggcattctttcgtgtgtgatgttaacgggttcagttttgttaagaactcaatgaagtattacgacgactgtgccaaaatactagggaatacaatcatgagagaattggccccccagttccagatcccttggtctattcccacagaagccgaagacatcccaatcgtcccaactacctcgggcacaatgatggaactgcgttgcgttatagcgattatcaggcacggtgacaggacccccaaacagaagatgaagatggaggttaagcatccgcgcttttttgcactgtttgagaaacacggcggctacaagactggcaagttgaagttaaaaaggcccgagcagctgcaggaggttttagacataaccagactgctgctcgccgagcttgaaaaggaaccgggaggcgagatcgaagaaaagaccggaaagctggagcagctcaaatcggtcctcgaaatgtatggccatttctccggaattaatcggaaggtacaacttacctactacccccatggagttaaagcttctaacgagggccaggatccccagagagaaaccctagccccctcactgctgttggtgctcaaatgggggggggagctcacgcccgctgggagggtgcaagcggaggagctcgggcgagcgttcagatgtatgtatcccggagggcagggagactacgctggattcccgggttgtgggctgcttcggttgcactctacattccgccacgatctgaagatttatgcttccgatgaggggagggttcagatgacagcagccgctttcgctaagggcttgctggctctggaaggcgagttgacacccatacttgtgcaaatggtgaaatctgccaacatgaatgggcttttagattcagatggcgatagtctcagcagctgtcagcaccgtgtgaaggctcggctccatcatatcttgcagcaagacgctccatttggccccgaggactatgaccagctggcacctactcggtcaactagcctgctgaatagtatgacaattatccagaatcccgtcaaggtatgcgatcaggtgttcgcgctgatcgagaacctgacacatcagatccgcgagaggatgcaggatccgagatctgtggatcttcagttataccattccgagactttggaactaatgctccaaaggtggagtaagctcgagagagactttaggcagaagtccgggaggtatgacatctccaaaattcccgacatttacgattgcgtgaaatacgacgtccagcataacgggtcactgggcctgcagggaaccgcggaattacttaggctatcgaaggccctcgcagacgtggtaatacctcaagagtacgggatttccagagaggagaaattagagattgcagtgggattctgcctgccactgttgcgaaagattcttttagatcttcagaggactcacgaggacgaatccgttaataagctccacccgctttgctatctacgctatagccgaggtgtgctcagtcccggacggcacgtccgcactaggctgtatttcaccagcgagtcgcacgttcattctctgttaagtgtctttaggtatggggggttgctggacgagacccaagatgcccagtggcagagggccttggactatttgtccgctataagtgagctgaattacatgacacaaatagtgattatgctctacgaggataacactcaggaccctttgtctgaggagcgattccacgtcgagctacatttcagccccggtgtaaaaggggtggaggaggaggggagcgctcccgcgggttgcggattcagaccagcctccagtgaaaatgaagagatgaaaactaatcaagggtcaatggagaatctgtgccctggaaaagcctcagatgagccagaccgtgcactacagacatcacctcagccccctgagggacccgggctgccgcgaaggtcccctctcattaggaaccgaaaagcgggttccatggaagtattgtctgagacttccagcagccgccctggaggttataggttgtttagcagctcacgccccccgacagaaatgaaacagtcaggattgggttcccagtgtactgggctgttctctaccaccgtgcttggtggatccagctccgcccctaacctccaggactacgcccgttcccatggcaaaaaactccctcccgcatcccttaagcacagagatgaattactcttcgtgcctgcagttaaacgattcagtgtgtctttcgccaaacatcccacaaatggcttcgagggctgctcaatggtccctaccatctacccgctggaaactttacacaacgccctgtccctgagacaggtgagcgagttcttgtctcgagtatgccagagacacaccgacgctcaggctcaggcatccgctgcattattcgacagcatgcattcctcccaggcgtctgacaatcctttcagcccaccccggaccctgcacagccccccactgcagcttcagcagagatctgaaaaacctccctggtatagcagcggaccaagctccaccgtgtcttcagccggcccatcatcccctacaaccgtcgacgggaatagtcaattcggcttttctgaccagccttctctgaattcccatgtagcagaagagcaccagggcctgggattactacaggaaacaccaggcagcggcgcccaggaactgagcatagagggagaacaagaactttttgagcctaaccagtccccccaggttccccctatggaaacctcccaaccctatgaggaggtctcccaaccatgtcaggaagttcccgatatcagtcaaccctgccaggacatcagtgaggcactgtcccagccatgtcagaaggtccctgacatctctcaacagtgccaggagaaccacgacaacggcaaccacacctgccaggaagtcccacatatctcccagccttgtcagaagtcgtcacagctttgtcagaaagtgtcagaagaggtatgtcaactgtgtcttgaaaacagcgaagaggtcagtcaaccttgccaaggcgtgtcagttgaggtgggcaaactggtgcataaatttcacgttggcgtggggtcactcgtccaggagaccctggtggaagtgggatctccagctgaggaaattcccgaggaagttatccagccttatcaagaattttctgtcgaggtcggaagattggcgcaggaaacgtctgctattaaccttctcagtcaggggattcctgaaatcgacaagccttctcaggaattccctgaagagatcgacctgcaggcccaggaggtccctgaagagatcaactag

SEQ ID NO: 48697 - DNA, 4302 bp, Artificial Sequence
  derived and/or modified sequence
atgtggagcctgaccgccagcgagggcgagagcaccaccgcccacttcttcctgggcgccggagacgaaggtttaggcacccgcggcataggcatgagacccgaggaatctgacagcgaactgttagaggatgaggaagacgaggtacctcccgaacctcagatcatcgtggggatatgcgccatgacaaaaaaatctaagtctaagccaatgacccagatcctggaaaggctgtgtcgctttgattacctgaccgtggtgattctgggcgaggacgttatcttaaatgagccagtggaaaactggccttcttgtcattgtctcattagttttcatagtaaaggttttcctctcgataaagcagtcgcttactccaagctgcggaaccctttcttgatcaacgacctcgccatgcagtactacatccaggacaggagggaagtttaccgcattctgcaggaagaaggcatagatctgcctaggtacgctgtattgaaccgcgatcccgcccggcccgaggagtgcaacctgatcgaaggtgaggaccaggttgaggtgaacggagcagtgttccccaaacctttcgttgagaagccagttagtgctgaagaccataacgtgtatatttactaccctagttccgctggtggagggtcccagcgtctcttccgaaaaattggatctcggtcatctgtgtattcccctgaatcatctgtccgaaagaccggtagctatatctacgaagagttcatgcccacggacggcaccgacgtaaaagtctacaccgtgggcccggactatgctcacgccgaggctaggaagagccccgccctggatggcaaagtcgagcgggattctgagggcaaggagatccgataccctgttatgttgaccgccatggagaaactggtcgcgcgcaaggtgtgtgtggcttttaagcagaccgtctgtggtttcgaccttctcagggctaacgggcacagtttcgtgtgtgacgttaacggcttctcattcgtaaagaactcaatgaaatactatgacgattgtgccaagatactgggcaatactattatgcgtgagcttgcaccacagttccagataccctggagcatcccaacggaggccgaagacatcccgattgtgcctacaacttctgggacaatgatggaactgcgctgtgtaatcgcaatcattagacacggagatcggacgcccaaacagaaaatgaagatggaagtaaaacaccctagattctttgccttgtttgagaaacatggcggctataaaaccggaaagctcaagctgaaacgccccgaacagctccaggaggtactggacatcacgaggctgctcctggctgagttggaaaaagaaccaggaggcgagatagaggagaagacaggcaaactcgaacagctgaaaagcgtgctggaaatgtacggccattttagtgggattaacaggaaggtgcaactcacctattacccacacggagtgaaagcctctaacgaagggcaagaccctcagagagagaccctcgccccttccttgttgcttgtgctgaagtgggggggagagcttacccctgcgggaagggttcaggctgaggaactcgggagggctttccggtgcatgtatccaggcggccagggcgactacgctggatttcccgggtgcggcctgctgcgcctgcatagcacatttcggcatgacttaaaaatttacgcctctgacgagggccgtgtccaaatgacagccgccgccttcgccaagggcctcctggcactggagggcgagctgactcctattttagtccaaatggttaaatctgcaaacatgaacgggctgttagattctgacggcgactccctgtcgagttgtcaacatcgcgtgaaggcccgcctccaccacatcctgcagcaggatgccccctttggccctgaagactatgatcagttagctcccacccggtctacttcgttactgaatagcatgaccataattcaaaaccctgtcaaagtctgcgatcaagtgttcgccttgatcgagaatctcacccaccagattcgagagagaatgcaggacccaagaagtgtagacctacagttgtaccactcagagactctagaactgatgctccaacggtggagtaaactggaacgagacttccgacagaagtcaggaaggtatgacatcagtaaaatcccagacatatatgactgtgtgaaatacgacgttcagcataacggctcactgggacttcagggaacagccgagcttcttcgtctgtccaaggccctggctgatgtcgttattccccaggaatatggaatttcgagagaagaaaaactggaaatcgccgtggggttttgcctcccactcctccgtaagattctgctggacctgcaaaggacccatgaagacgaaagcgtaaacaagctgcaccctctgtgctacctccgttacagcagaggtgtactctctccagggagacacgtgcgcaccaggctgtatttcacatctgagagccacgtgcactctctcttgagtgtgttccgatatggcggtctgttggacgagacacaggacgcccagtggcagagagcactggactatctcagtgcaatcagtgagctgaattacatgacacaaatcgtcattatgctttacgaagacaacacccaggaccccctgtcggaggagcgctttcatgtggagttacacttttcgccgggcgtgaaaggcgttgaggaggaaggctctgctcctgccggctgtggctttaggcctgcctccagcgagaacgaggaaatgaagacaaaccaaggctccatggaaaatctgtgccccggtaaagccagcgacgaacctgatcgagctctccagacctcaccccagcctcctgaaggacccggccttccgcggagatcgcctttgatcagaaaccgtaaggcaggcagcatggaagtgctctccgagacttctagcagccgaccagggggatacaggctgttctcaagcagcagaccacctacagaaatgaaacagtcaggactggggtctcagtgtaccggccttttcagcaccaccgtcttaggagggtcttcctccgcaccgaatctgcaggactatgcaagatcacacgggaaaaagttgccacccgcttccctcaagcaccgggatgagctgctgtttgtgcccgcagtaaagcggttctccgtttcctttgccaagcaccctaccaatgggtttgagggctgctcaatggtccccaccatatatcccctcgagaccctgcacaacgcattgtccctgcggcaagtgagcgaatttcttagccgcgtttgccagaggcacacagatgctcaggcacaagcttcggccgctctcttcgattctatgcatagctctcaagcatcagacaacccgttcagcccaccccgcacacttcactcgcctccccttcagttacaacagagatctgaaaagcccccatggtattcaagtgggccaagctctactgtttctagcgccggtcctagttctccgactaccgtcgacggcaactcccaatttggctttagcgaccagccgtccttgaattcccacgttgctgaggaacaccaggggctcggcctcctccaggagacaccgggcagtggagcacaggagctgtcaatcgaaggcgagcaagagttattcgagccaaaccagtctccacaagtccccccaatggagacatcccaaccgtacgaagaggtgtcccagccttgccaagaggtgcctgatattagccagccctgtcaagatatctcagaggcactgtctcagccctgccaaaaggtgccggatatcagccagcagtgccaggagaatcatgataacggcaatcatacgtgtcaggaagtcccacatatttcacagccctgtcaaaagtcttctcagctttgccagaaggtatctgaagaagtgtgtcagctgtgcctggagaactccgaagaggtcagccagccctgtcagggcgtgtctgtcgaagtcggcaaactcgttcacaagttccacgttggtgtgggctctttagtgcaggaaacattggtggaggtgggttcccccgcagaagagattccagaggaagtaatacagccctatcaggaattctctgtggaagtgggcagactcgctcaggaaacatcagctataaacctgctctcccaaggtataccggagatcgacaagccctcccaggagtttccagaggagattgatctacaggcacaagaagtgccggaagaaattaactag

SEQ ID NO: 48698 - DNA, 4302 bp, Artificial Sequence
  derived and/or modified sequence
atgtggtctttaacggcatctgagggtgagtctactaccgcccacttctttctcggcgcaggagacgaagggctgggcactaggggcattggaatgagaccagaggaatccgattctgagcttctagaggacgaggaagacgaagtgccacctgaaccacagatcattgtcggaatttgtgctatgacaaaaaagtccaagagcaaacctatgactcagatcctggagcgcctctgtagatttgactatctgacggtggtgatcctcggagaagacgtaatattaaacgagccggtggaaaattggccctcatgtcactgcctgatcagctttcactcaaaagggttccccctagacaaggccgtggcatactcgaaacttcgcaatcctttcctgataaatgacctggccatgcagtattacatacaggataggagggaggtgtatcggatactgcaagaggaaggtatcgacctgcctaggtatgccgtactgaatcgggaccccgctagacccgaggagtgcaacctgattgagggcgaagatcaggtcgaggtgaatggcgctgtgttccctaaaccatttgtggaaaagcccgtgagcgccgaagatcacaatgtgtatatttattatccctcctctgcgggtgggggaagtcaaaggctgttcagaaagattgggagccgttccagtgtgtactcccctgagagctcagtgaggaagactggctcgtacatttacgaagaatttatgcctactgacggcacagacgtgaaagtgtacactgtgggaccggattatgctcatgccgaggctcggaaatctcccgctctggacggaaaagttgagcgggattcagagggcaaagaaattagataccccgtcatgctgactgcaatggaaaagttggtggccagaaaggtctgcgttgcctttaagcaaaccgtatgcggattcgatctgctgcgagccaacggtcacagctttgtctgcgatgtgaacggctttagctttgtgaagaattccatgaaatactatgacgattgtgcgaagatcctggggaacaccatcatgagggagctggcccctcagtttcagattccttggtctatcccaacagaagctgaagacatccccatcgtgcccactacaagcggcactatgatggagctccgttgtgtgatcgcaatcatcaggcacggcgacaggacacccaaacagaagatgaagatggaagtcaaacaccctcgtttttttgccctgtttgagaaacatggtggatacaagacgggaaaattgaagctgaaacgccctgagcagctgcaagaggttctggacatcacacggcttctgctagcagagttagagaaggagccgggaggggagatagaggagaagaccgggaagttggagcagctcaagagtgtactcgagatgtatggacacttttctggaatcaacaggaaggttcagcttacgtattatcctcacggagtgaaagccagtaatgagggacaggacccacaacgagaaacactggccccatctttgctgcttgtcctcaaatggggcggtgaactgacacctgcgggtagagttcaggccgaagagctggggcgagcctttagatgtatgtatcccggagggcagggagattacgccggatttccaggatgcggtctgctgcgtctccactcgaccttccgccatgatctaaaaatctacgcttctgacgaaggtcgagtccagatgacagccgctgcattcgcaaagggactgttagcgctggagggagagctgaccccaatcctggtacagatggtgaagagcgcgaatatgaatggtcttttggacagcgatggagacagcctgagctcttgccaacatagggtgaaagcaagattgcaccatatcctacaacaggacgctccatttggacccgaagattacgatcagctggcgccaactcgatccactagcctgctgaattctatgactataatccagaacccagtgaaggtgtgcgatcaggtcttcgctcttatcgagaatctgacccatcagatcagagagagaatgcaagatccccgatccgtagaccttcagctctatcatagtgagactctggagcttatgctgcagcgctggtccaaactggagcgggactttcgtcagaagagtggccgatacgatatttcaaagatccctgatatatacgattgcgtcaagtacgatgtgcaacataacggatccttgggattgcaggggacagccgaacttctccggttgagcaaggcactggctgatgtagtcatcccacaggagtatggcatttctagggaagagaaattagaaatcgctgtgggtttctgtttaccacttctgcgcaaaatcctgctggatctacagcgaacccacgaggacgagagcgtcaacaaactgcatccattatgctacctgcggtactctcgaggcgtgctgagcccagggagacatgtacgtacacgcctgtactttaccagtgagtctcacgtgcacagtctactgagtgtgttcagatatggcggtctcctcgatgagacacaggatgcacagtggcagcgagcactcgactacctgtctgcaatctctgagctgaattacatgacccaaatcgttataatgctctacgaagataacactcaggatccactgtctgaggagagatttcatgtcgaattacacttttcccctggggtgaagggtgtggaggaggagggaagcgcgccagccggttgtggattcagaccagcctcctctgaaaacgaggaaatgaagactaatcaaggcagcatggagaacctctgccctggcaaagcctcagatgagccagatcgagccttgcagacctccccgcagcctccagagggacccggattgccacgcaggtctcccctgattcgtaacaggaaggccggttcgatggaggtgctttcagaaacgtcaagcagccgcccaggaggttatagactctttagcagcagcagaccccctaccgaaatgaaacagtcagggctcggatcacagtgcaccggcctgttctctaccacggtcttgggaggttcgagcagcgccccaaatctgcaggactatgccaggtcacatgggaagaaactgccccctgcatctctgaaacatagagacgaactcctcttcgtacccgctgtgaaaagattttcagtgtccttcgctaagcacccaactaacgggtttgaagggtgtagcatggtcccgactatctatccattggagactctccacaacgcgttgtcactccgacaagttagtgagttcttgagccgagtgtgtcagcgccatactgatgcccaggctcaggctagtgcagctctattcgactccatgcacagctcgcaagctagcgacaacccattcagcccccctcgtactctacactctccacccttacagctccagcagcggagtgaaaagccaccttggtattcatcaggaccatcttctacggtgagcagtgcagggccaagttcgcccacaactgttgatgggaattcccagtttggatttagcgaccaacccagcttaaacagccacgtggctgaggagcatcagggcctggggctcttgcaggagactcccggaagcggagctcaggagctgagtattgagggggagcaggaactgtttgagcctaatcagtcgccacaggtcccccctatggaaaccagccaaccttacgaggaagtgtctcagccttgccaggaggtgccagacatctctcagccttgtcaggatataagcgaagcactgagccagccctgtcagaaagtccccgacatttcccaacagtgtcaggaaaatcacgacaatggtaaccacacctgccaggaggtcccccacatcagccaaccatgccaaaagtcatcccagttgtgtcaaaaagtgtccgaggaggtctgtcagctgtgcctcgagaatagcgaagaggtgagccagccttgccagggagtgagtgtcgaagtcggtaaattagtgcataaatttcacgtaggggtgggaagcctggtgcaggaaaccctggtggaggtcggtagtcccgctgaggagatacccgaggaagtgatccagccatatcaagagttttccgtagaggtggggaggctggcgcaggagacctctgccatcaacttgttatcccagggtatccccgagattgacaaaccatctcaggagtttcccgaagagatcgacctccaggcccaggaggtgcccgaagaaattaattag

SEQ ID NO: 48699 - DNA, 5697 bp, Artificial Sequence
  derived and/or modified sequence
gattgggccgctgtcaggtgtcgctgcctgcaggttcggctgcgcgagcggagggaggcgggactcaagagtagccttcctcgaggacctgcctttcccatttgctgcctgaagttaatgtttcttgctggccaaatcagggacatgccggcattagcgggatgagtgggtgttccggcagggatgtggtcattgacggccagtgagggcgagagtaccacggcccacttcttccttggagctggagatgaggggctgggcacccgtggaataggcatgaggccagaagagagtgacagcgagctccttgaggatgaggaggatgaagtgcctcctgaacctcagatcattgttggcatctgtgccatgaccaagaaatccaagtccaagccaatgactcaaatcctagagcgactctgcagatttgactacctgactgttgtcattctgggagaagatgtaatccttaatgaacctgtggaaaactggccatcctgccactgcctcatctctttccactccaaaggctttcctctggacaaagctgttgcttactccaagcttcgaaacccctttcttatcaatgatctggccatgcagtattacatccaagataggagggaggtgtaccggatcctgcaggaagagggtattgatctgcctcgatatgctgtgctcaaccgtgatcctgcccggcctgaggaatgcaacctgatagaaggtgaagaccaagtagaggtcaatggagctgtctttcccaagccctttgtggagaagccagtgagtgcagaagaccacaatgtttacatctactaccccagctcagctggaggaggaagccagcgtctctttcgtaagattggcagccgaagcagtgtttactctcctgagagcagcgtccgaaagacggggtcgtacatctatgaggagtttatgccaacagatggcacagatgtcaaggtgtatacagtggggccagattatgcccatgctgaagctagaaaatctccagctttggatgggaaggttgaacgagacagtgaggggaaagagattcgatatccagtcatgctgactgccatggaaaagctggtggccaggaaagtctgcgtagctttcaagcaaacagtttgtggatttgaccttcttcgtgccaatggtcattcctttgtgtgtgatgtcaatggctttagttttgtcaagaactcgatgaaatactacgatgactgtgccaagattctggggaacaccataatgcgggagcttgccccacagttccagattccatggtccatccccacggaggctgaggacattcccattgttcccaccacatctggcactatgatggaacttcgttgtgtcattgcaattattcgtcatggggatcgtactcccaagcagaagatgaagatggaagtgaaacacccaaggttttttgctctgtttgaaaaacatggtggctacaagacagggaaattaaaactcaagcgacctgagcagctccaggaggtgctggatatcacaaggctgttgttggctgaactggagaaagaaccaggtggtgagatcgaggagaagactggaaaactagagcagctgaagtctgtactggagatgtatggtcacttctcaggtataaaccggaaggtacaattgacttactaccctcatggagtaaaagcttctaatgaggggcaagatccacagagggaaactctggccccatctctgttgctggtactgaagtggggtggagaactgactcctgctggccgtgttcaggctgaggagctggggcgagcttttcgctgcatgtaccctggaggacagggtgactatgctggcttccctggttgtgggctgcttcgtctccatagcactttccgccacgatctcaagatctatgcctctgatgagggtcgtgttcagatgactgctgctgccttcgccaagggccttctggctctagaaggggagctgacacccattttggtgcaaatggtgaagagtgccaacatgaatgggctactggacagcgatggggattccttgagcagctgccagcaccgggtgaaggctcggctgcaccatattctacagcaggatgcgccctttggccctgaggactacgatcagctggctcccaccagaagtacttccctgctcaactccatgactatcatccagaatcctgtgaaggtctgtgatcaggtatttgccctgatcgaaaacctcacccaccagatccgggaacgaatgcaggaccccaggtctgtagacctgcagctctaccacagtgagacactagagctaatgctacagcgttggagcaagctggagcgtgactttcgacagaagagtgggcgctatgatatcagtaagatccctgacatctatgactgtgtcaagtatgatgtgcagcacaatgggagtctgggacttcaaggcacagcagagttgctccgtctctctaaggcactggctgatgtggtcattccccaggagtacgggatcagtcgggaggagaaactggaaattgctgtgggcttctgtcttccactgttgcggaagatactacttgacctgcagagaacccacgaggatgagtctgtcaacaagctgcatcccctctgttatctcaggtactcccgaggcgtgctctccccaggtcgccacgttcgaacgcgtctctatttcaccagtgagagccatgtccactccctgctcagtgtcttccgttatggaggacttcttgatgagacccaggatgcacaatggcagcgagctttggattatcttagtgccatctcagagcttaactacatgacccagattgtcatcatgctttatgaggacaacacacaggatcccttatcagaggaacggttccatgtggagctacacttcagccccggagtgaaaggtgttgaggaagaaggcagtgccccggctggctgtggattccgtccagcctcttctgagaatgaggagatgaaaaccaaccaaggcagtatggagaacctgtgtccaggaaaggcatcagatgaaccagaccgggcattgcagacttcaccccagcctcctgagggccctggccttccgaggagatcacccctcattcgtaaccgaaaagctggttccatggaggtactttctgagacttcatcctcgaggcctggtggctaccggctcttttcatcttcacggccacccacagaaatgaagcagagtggcctaggctcacagtgcacagggctgttcagcaccacagtgctgggtggctcctccagtgccccgaatcttcaggactacgcccgcagccatggcaaaaagctaccacctgccagtctgaagcaccgagatgagctcttgtttgtcccggccgtaaaacgattttctgtgtcgtttgcaaagcatccgactaacgggtttgaagggtgttccatggtgcctaccatctaccctctggaaacactgcataatgccctttccctacgtcaagtgagtgaattcttgagtagagtctgccagcgccacactgatgcccaggcacaggcatctgcagccctctttgattccatgcacagcagccaggcctcagataacccattttctccaccacgtactcttcattcacctcccctgcaactccagcagcgctctgagaagcccccttggtacagcagtggcccttctagcactgtgtccagtgctggtccttcttcccctactacagtagatggtaactcccaatttggcttcagtgatcaaccctccctaaattcacacgtggctgaagaacatcaaggccttgggctgctccaggagacccctgggagtggagcacaagagctctccatagaaggggagcaagagctttttgaaccaaatcagtccccacaggtgccacctatggaaaccagccagccatacgaggaggtcagccagccatgtcaggaggtccctgacatcagccagccatgccaggacatttctgaggcgctcagccagccatgtcagaaggtccctgacatcagccagcaatgccaggagaaccatgacaatggtaaccacacatgccaggaggtccctcacatcagccagccatgccagaagtccagccaactgtgccagaaagtctctgaggaagtttgccagctatgtctggagaactccgaggaggtcagccagccatgccagggggtctctgtggaggttggcaagctggtccataagttccatgtaggggttggtagcttggtccaggaaacccttgtagaagttggcagcccagctgaagagatccctgaggaggtcatccagccataccaggagttctctgtggaggttggcaggctggcccaggagacttctgcgatcaatctgttatctcagggcatccctgagattgataaaccatcccaagagttccctgaggagattgatctgcaggcccaggaggtccctgaggagataaattagaagtcctgggtggtccctgaagtgattgatcagctgcctggagagggtattcctcaagcccagcatccatctggtgatccaaaccctcagagccagtctctagcccatgaccagcactcaccccttccaccagcaacatgtgattaattttctcattagtggtatcacactataccagccatttgagccagcaaccttttctgttggctaactcactggccagctctcaccagcggtgtctggggaagtagttctctttgtatgaagcatacctgtgccagagctgtggttgaggaggagccagttttaggttcgaagaagccattggctcctcacttagccattagacttgaataggatttccttggggtgggttggtctgtcattacccagccttctctgagcatcctaggaaatcacagattgttaaaggaaatgccgcttcactgctgaagacaccatctggcgacagcaaatgcaaaagaggggactctagggtcttcacttttctggggaaatgttcacgacttctcaaggtacgcttagaccatatgtgcattcaggggactcttgtctttgccagcactcctcaggtgagcccgggatggctatctgaaatgtctggaaaatagagtcccttccccaaacatctgacatggccactaaatctttagacttgccttatagatccttccatatcatccccaagtgccccttctgcctcagtcctgttcctctgggcaatagctctagggaaaagtaggtattagactgctgtgcaaaattcagagcaactacttaaaatgctctagaggattcttagccagtctgtgaaagtgggcctcctctgtggtggggctgtttggcttaggagatgctgtagtagtagagataatcaggttctattttaagcaatcagcagagatcaatattgtacagatacaagcaaaggtttaataaatatatatatatatatttatttctgtagttgtgccagggacagactggccaaagaccaaacactgcagggtccccaagaaatttgtccttatatcattgtgtctgagggccagatatgattatgaagctttttccaaagatccagggatgggaatgggagtgggtaggaggggtaatgcggtcattggagtcgggggctggaacattatgagtgctcaataaatataaactaatgagaatggtggtgatgga

SEQ ID NO: 48700 - DNA, 4302 bp, Artificial Sequence
  derived and/or modified sequence
atgtggtcgttgacagcttctgaaggagagtccacaactgcccatttctttctgggcgctggcgacgagggcttgggaacacggggtatcggaatgagaccggaggagagcgatagcgagctgttggaggacgaggaagatgaggtgccgccagagccgcaaatcatagttggtatatgcgctatgaccaaaaagtcgaaatcaaagcccatgacacaaattctcgagcgactatgtcggttcgactacttaacggtggtgatcctcggggaagacgtgatcttgaatgaacccgttgagaattggccctcttgtcactgcctgattagctttcactcaaagggttttccgttggataaggctgttgcatatagcaaacttcgtaacccgtttctcattaacgacttagccatgcagtattatatacaggatcggagagaagtctataggatcctgcaggaggagggtatcgatttacccaggtacgccgtcctgaaccgagatccggctcgaccagaggaatgcaacctgatcgagggagaagaccaggtcgaggtgaatggagctgtgttccctaaaccattcgtagagaaaccagtctccgcagaagatcataatgtgtatatctattatccctcatccgctggaggcggttcacaaagattgtttcgcaaaatcggctctcgatctagtgtgtattcacctgagtcctccgtccgtaaaacaggctcctacatttatgaagaattcatgcccaccgacggtacggacgtgaaggtgtatactgtggggcctgattacgctcatgcagaagcgcgaaaatcacccgctcttgatggaaaggttgagagggattccgagggcaaggaaatacgctacccagtgatgctgactgctatggaaaaactagtagccagaaaggtctgcgtagcttttaagcagaccgtttgtgggttcgacctgctgcgggcaaatggtcacagttttgtgtgtgatgtgaacggcttctcgttcgtcaagaatagcatgaaatattacgatgactgcgctaagattctcggcaataccataatgagggaattggcccctcagttccagatcccctggtccatacccacagaagccgaagatattcctatcgtacccactacttccggcacaatgatggaattgcgctgcgtcattgctataattcgtcacggtgatcggacgcccaagcagaaaatgaaaatggaggtgaaacacccaagatttttcgctctgttcgagaagcatggaggatacaagactgggaagttgaagctgaagaggccagagcaacttcaggaggtgttggatatcacgcgacttctcctagcagaattagagaaagaacccggtggagaaatcgaggaaaaaacagggaagctcgaacagctcaagtctgtcctagaaatgtacggccacttttccggcattaataggaaagttcagctgacctattatccacacggcgtgaaggcttcgaatgagggacaggatcctcagcgcgaaactcttgctccatccttgctactcgtcctgaagtggggaggggaattaactcctgccggtcgggtgcaggcagaggaactaggaagggccttcagatgcatgtatcccggaggtcagggggattacgccggattcccgggttgcggcctgctgaggcttcacagcacttttcgacatgacctcaagatttatgcttccgatgagggcagggttcagatgaccgctgcagccttcgctaaaggactgttggctctggaaggggaattaacacctattctggtccagatggtgaagtccgcaaatatgaacgggctcctcgattctgacggcgatagcctgagctcttgtcagcatagagtcaaggcccgtctgcaccatattttgcaacaggacgccccattcggcccagaagattatgatcagctggctccaacaaggtccacatcacttttgaacagcatgaccataattcagaaccctgttaaagtatgcgaccaggtcttcgcattaattgaaaatttgactcaccagattagggaaaggatgcaggacccaaggtccgtagacctgcagctgtaccactctgagacactggaactaatgctgcagcgatggagtaagttagagagagattttaggcagaagagtggccgatatgacattagcaaaatccccgatatatacgattgcgttaagtacgacgtacaacacaatgggagtcttggactgcagggaaccgcagagctcctgcgcctatcaaaggccttagccgacgtcgtgatcccccaggaatacggcatctctcgagaagaaaaactggagatcgcagttggcttctgtctacccctccttcgaaaaattctgctcgatttgcagagaacgcacgaggatgagtccgtcaataagctccatcctctctgctatttacgctatagcagaggggtattatcaccgggacgccatgtgcgaacccgtctttattttactagcgaaagccacgttcatagtctcttgagcgtgtttcgctacggaggccttctggacgagactcaagacgctcagtggcagagagctcttgactatctttctgcaatcagtgagctgaactacatgacacagattgttatcatgctgtatgaggacaatacgcaggaccctctcagcgaagaacgctttcacgtggaattgcattttagtcccggtgtgaaaggcgtcgaagaagaagggagtgcacccgctgggtgtgggtttcgcccagccagttctgagaacgaagaaatgaaaacaaaccagggctcaatggaaaacctttgtcctggcaaggcaagtgacgaacctgatcgagcactgcagacgtcccctcagcctccagaggggcctgggttgcccaggcgtagtccactgattcgcaataggaaagctggctctatggaggtgctttctgaaactagttctagcagacctggtggctatagattgttttcgtcctcgcgtcctcccacggaaatgaagcagtcaggtttaggaagccagtgcacaggccttttcagtaccaccgtgctggggggttcctccagcgcgccaaacctccaggattacgctcggtcccacggcaagaagctccccccagcatctctgaaacacagggacgagctgttatttgtgcccgcagttaagcgattctccgtgtcattcgcgaagcaccccactaacggctttgagggttgcagcatggtgcccaccatatatccactagagaccctgcataatgccctgagtctgcgacaggtgtccgagtttctcagtcgtgtctgccagcgccacacagacgcccaggcccaggcatctgcagctctatttgacagcatgcactcaagtcaggcctcagacaatcctttctctccaccgagaaccctccacagtccacctctgcagctgcagcagcgaagcgagaagcctccgtggtactcttcagggccatcttcgactgtgtcatctgctggaccctctagcccaactacggtcgacgggaatagtcagttcggcttctccgatcagccctcgctcaattctcacgtggccgaagagcatcagggcctgggcctcctccaggagacccctggtagcggagcccaggaactctccatcgagggtgaacaggagctgtttgaaccaaaccagtctccccaggttcccccaatggagacatcccagccgtatgaagaagtctctcagccctgccaggaggttcccgacatatcccaaccgtgtcaggacatcagtgaggctctttcccagccgtgtcagaaggtgcccgacatatcccagcaatgccaagagaaccacgacaatgggaaccacacttgccaagaggtgccacacatttcccaaccatgccaaaagtcttctcagctctgccagaaagtttccgaggaggtgtgtcagctgtgcctggaaaattccgaagaagtgtcacagccatgtcagggcgtttcagtagaagtcggaaagctggtgcacaagtttcacgtgggggttgggagcctggtgcaggagacgctggtcgaagtgggctcaccggcagaggagattcccgaggaggtgatccagccataccaggagttcagcgtcgaagttggccgattggcacaagagacctcagctatcaacttgttgtctcaagggatcccagagatagataaacccagccaggagtttccagaggagatcgacctgcaggcacaagaagttcctgaggaaattaactag

SEQ ID NO: 48701 - DNA, 4302 bp, Artificial Sequence
  derived and/or modified sequence
atgtggtcgctcaccgcttccgagggcgagtctaccactgcccacttctttctgggtgccggtgacgaggggctggggacacgcggaatcgggatgcgccctgaagagtccgatagtgagctgctcgaagatgaggaggatgaggtcccccctgaacctcagattattgtcggcatatgcgcgatgacaaaaaagtcaaagtccaaacccatgactcagattctggagcgtttgtgcaggttcgattacctgaccgttgtgatactcggggaagacgtcatattgaacgaaccagtggagaattggccctcttgccactgtttaatcagttttcactccaaaggctttccccttgacaaggcagttgcctacagcaagttgcggaatccgtttttaataaacgacctggccatgcagtattatattcaggacaggcgggaagtgtacaggattttgcaagaggagggtatcgatttgcctagatacgcagtgttaaaccgagaccctgctcgaccagaagaatgcaacctgatcgaaggcgaggatcaggttgaggtcaacggagctgtgtttcctaaaccctttgtcgagaagcccgtcagtgcagaggaccataatgtgtacatctattatccatcttcagcgggtggcggatcccaacggttgtttcgcaagatcggttccaggagcagcgtatactctccggaatcctccgttcggaaaaccggtagctatatttatgaggaatttatgcccaccgacggtactgatgtaaaagtgtacaccgtgggccctgactatgcccacgctgaggcgaggaagtcccccgctctagacggcaaagtcgagcgcgactcagaaggcaaagagatccgttatcctgtgatgttgacggccatggagaaattagtggctagaaaggtctgcgtggcatttaagcagaccgtgtgcgggtttgatctgcttagagctaatggtcatagctttgtctgtgacgtgaacggattttcttttgtgaaaaactcaatgaaatattatgacgattgcgcgaaaatcctcggcaacaccataatgagagaattagctccacagttccagatcccatggtctatacccacagaggcagaggacatccccatcgtgccaaccacctctggaaccatgatggagctgcggtgtgttatagctattatcagacatggtgatagaaccccaaaacaaaagatgaaaatggaagtgaaacaccctagattcttcgccctttttgagaagcatggaggctataaaactgggaagctcaagctgaaacgccctgagcagctgcaggaggttctagatattacccgtctgcttctcgccgagctcgagaaagagccgggaggcgaaattgaagaaaaaacggggaagctcgagcagctgaaatctgtgctggaaatgtatgggcatttctctggaattaacaggaaagtgcaactgacttattacccccatggtgtgaaagcaagtaacgaggggcaggatcctcagcgcgagacactggctccgtcgctccttctggtgctcaaatggggcggagagctgacccccgcaggacgagtgcaggctgaggagctgggcagagctttccgctgcatgtatccgggagggcagggcgattatgcaggcttcccgggttgtgggctccttcgtctgcacagcacttttcggcacgacttgaagatctatgcctcggatgaagggagagtgcagatgacagcggctgcttttgcaaaaggcttgttggctctggagggagaactgacacccattctcgtacagatggtgaaaagcgccaacatgaacgggctcctggactcggacggagactctttgtcctcgtgtcagcatagagtgaaagcccgactccaccacatcctgcagcaggatgcgccatttgggccagaagactatgatcagttggcaccgactaggtccacaagcctccttaacagtatgacgattatacaaaacccggtgaaagtgtgcgaccaggtcttcgctttgatcgaaaatttgacgcaccaaatacgcgagcgcatgcaggatccacgctccgtggaccttcagttgtaccattcagaaaccctagagctgatgcttcagcggtggtcgaagctcgagcgagactttagacaaaagtccggaagatacgatatatcaaagatcccagacatctacgattgtgtcaagtacgacgtccagcataacggatctctgggtctccaaggaaccgcggagcttctgcgcttgtcaaaggccctggccgacgtcgtgataccgcaggagtacgggatctctagagaggaaaaattggagatagccgtgggcttctgtctccccctgctgagaaaaatcctgcttgatcttcagaggacccacgaggatgagtccgtgaacaagttgcacccactgtgctatctgcggtactcccgtggagtgctgtcaccagggagacacgtgagaactcggttgtattttacttcagaatcacacgtccactcactcctctctgtatttaggtatgggggactgcttgacgagacacaggacgcccagtggcaaagggctcttgattaccttagcgcgatctcagaattgaactacatgacccagatagttataatgctatatgaagataatactcaggaccccctgtctgaggaacgtttccatgtagagctccattttagtcctggcgtaaaaggagtggaagaagaagggtccgcccctgcgggatgtggctttcgaccagcctcttcggagaacgaggaaatgaagaccaaccaggggagtatggaaaacctgtgcccgggaaaggccagtgacgagccggatagagctcttcagaccagcccgcagccccctgaagggccaggtttgcctaggcggagcccattaatacggaaccgcaaagccggaagtatggaggtattgagcgagacctcttcgtcccgcccaggtggctacaggctgtttagctcctcccggcctcccaccgaaatgaaacagtcagggttggggtcacaatgtactggtctgttctctacaacagtgctcggtggatcttcttctgctccaaacttgcaagactatgccagatctcacggcaaaaagctgccaccggctagtttaaagcaccgtgacgaactgctttttgtgccagcagtcaagagattttcagtttcctttgccaagcaccctaccaatggattcgagggatgctcaatggtcccgactatctacccactggagaccttgcacaacgcactgagcctgcgacaggtgtccgaattcctttcaagagtctgtcagcgtcataccgacgcccaggcgcaggcctccgcagccctgttcgactctatgcactcaagccaggcctcggataacccattcagtccccctcgcactctgcatagcccccctctacagctccagcaacggtccgaaaaacctccttggtatagtagtggaccaagtagtactgtaagttcggcgggaccgagctctccaacaactgtggatggaaactcccagttcggcttcagcgaccagccgtccttgaattcacacgtggctgaggaacatcagggtctgggattacttcaggaaacgccgggatctggggctcaagagctcagtatcgagggagaacaagaactgtttgaacccaatcagtctccacaggttcctcctatggaaacttcccaaccttacgaagaagtgagtcaaccctgccaagaggtgccggacattagtcagccttgtcaggatatctccgaagccctgagtcagccttgtcagaaagttccagacatctctcagcagtgccaggagaatcacgacaatggcaatcacacatgccaggaagtaccacatattagccaaccatgtcagaagtcctcccagctgtgtcagaaagtctccgaggaagtgtgccagctgtgtcttgagaattctgaggaggtgagtcagccctgccagggcgtttcagttgaggtcgggaaactcgtccataagttccacgtcggggtgggatcactggttcaagagaccctggtcgaagtgggatcccccgcagaggagattcctgaagaggtgatccaaccctatcaggaattctccgtcgaggtgggcaggctagcgcaagagacttcagctattaacctccttagtcaggggatccccgagattgataagcctagccaggagtttccggaggaaatagatttacaggcccaggaggtgccggaggaaattaattag

SEQ ID NO: 48702 - DNA, 5718 bp, Artificial Sequence
  derived and/or modified sequence
accgcaaagaagtcgcgctttgattgggccgctgtcaggtgtcgctgcctgcaggttcggctgcgcgagcggagggaggcgggactcaagagtagccttcctcgaggacctgcctttcccatttgctgcctgaagttaatgtttcttgctggccaaatcagggacatgccggcattagcgggatgagtgggtgttccggcagggatgtggtcattgacggccagtgagggcgagagtaccacggcccacttcttccttggagctggagatgaggggctgggcacccgtggaataggcatgaggccagaagagagtgacagcgagctccttgaggatgaggaggatgaagtgcctcctgaacctcagatcattgttggcatctgtgccatgaccaagaaatccaagtccaagccaatgactcaaatcctagagcgactctgcagatttgactacctgactgttgtcattctgggagaagatgtaatccttaatgaacctgtggaaaactggccatcctgccactgcctcatctctttccactccaaaggctttcctctggacaaagctgttgcttactccaagcttcgaaacccctttcttatcaatgatctggccatgcagtattacatccaagataggagggaggtgtaccggatcctgcaggaagagggtattgatctgcctcgatatgctgtgctcaaccgtgatcctgcccggcctgaggaatgcaacctgatagaaggtgaagaccaagtagaggtcaatggagctgtctttcccaagccctttgtggagaagccagtgagtgcagaagaccacaatgtttacatctactaccccagctcagctggaggaggaagccagcgtctctttcgtaagattggcagccgaagcagtgtttactctcctgagagcagcgtccgaaagacggggtcgtacatctatgaggagtttatgccaacagatggcacagatgtcaaggtgtatacagtggggccagattatgcccatgctgaagctagaaaatctccagctttggatgggaaggttgaacgagacagtgaggggaaagagattcgatatccagtcatgctgactgccatggaaaagctggtggccaggaaagtctgcgtagctttcaagcaaacagtttgtggatttgaccttcttcgtgccaatggtcattcctttgtgtgtgatgtcaatggctttagttttgtcaagaactcgatgaaatactacgatgactgtgccaagattctggggaacaccataatgcgggagcttgccccacagttccagattccatggtccatccccacggaggctgaggacattcccattgttcccaccacatctggcactatgatggaacttcgttgtgtcattgcaattattcgtcatggggatcgtactcccaagcagaagatgaagatggaagtgaaacacccaaggttttttgctctgtttgaaaaacatggtggctacaagacagggaaattaaaactcaagcgacctgagcagctccaggaggtgctggatatcacaaggctgttgttggctgaactggagaaagaaccaggtggtgagatcgaggagaagactggaaaactagagcagctgaagtctgtactggagatgtatggtcacttctcaggtataaaccggaaggtacaattgacttactaccctcatggagtaaaagcttctaatgaggggcaagatccacagagggaaactctggccccatctctgttgctggtactgaagtggggtggagaactgactcctgctggccgtgttcaggctgaggagctggggcgagcttttcgctgcatgtaccctggaggacagggtgactatgctggcttccctggttgtgggctgcttcgtctccatagcactttccgccacgatctcaagatctatgcctctgatgagggtcgtgttcagatgactgctgctgccttcgccaagggccttctggctctagaaggggagctgacacccattttggtgcaaatggtgaagagtgccaacatgaatgggctactggacagcgatggggattccttgagcagctgccagcaccgggtgaaggctcggctgcaccatattctacagcaggatgcgccctttggccctgaggactacgatcagctggctcccaccagaagtacttccctgctcaactccatgactatcatccagaatcctgtgaaggtctgtgatcaggtatttgccctgatcgaaaacctcacccaccagatccgggaacgaatgcaggaccccaggtctgtagacctgcagctctaccacagtgagacactagagctaatgctacagcgttggagcaagctggagcgtgactttcgacagaagagtgggcgctatgatatcagtaagatccctgacatctatgactgtgtcaagtatgatgtgcagcacaatgggagtctgggacttcaaggcacagcagagttgctccgtctctctaaggcactggctgatgtggtcattccccaggagtacgggatcagtcgggaggagaaactggaaattgctgtgggcttctgtcttccactgttgcggaagatactacttgacctgcagagaacccacgaggatgagtctgtcaacaagctgcatcccctctgttatctcaggtactcccgaggcgtgctctccccaggtcgccacgttcgaacgcgtctctatttcaccagtgagagccatgtccactccctgctcagtgtcttccgttatggaggacttcttgatgagacccaggatgcacaatggcagcgagctttggattatcttagtgccatctcagagcttaactacatgacccagattgtcatcatgctttatgaggacaacacacaggatcccttatcagaggaacggttccatgtggagctacacttcagccccggagtgaaaggtgttgaggaagaaggcagtgccccggctggctgtggattccgtccagcctcttctgagaatgaggagatgaaaaccaaccaaggcagtatggagaacctgtgtccaggaaaggcatcagatgaaccagaccgggcattgcagacttcaccccagcctcctgagggccctggccttccgaggagatcacccctcattcgtaaccgaaaagctggttccatggaggtactttctgagacttcatcctcgaggcctggtggctaccggctcttttcatcttcacggccacccacagaaatgaagcagagtggcctaggctcacagtgcacagggctgttcagcaccacagtgctgggtggctcctccagtgccccgaatcttcaggactacgcccgcagccatggcaaaaagctaccacctgccagtctgaagcaccgagatgagctcttgtttgtcccggccgtaaaacgattttctgtgtcgtttgcaaagcatccgactaacgggtttgaagggtgttccatggtgcctaccatctaccctctggaaacactgcataatgccctttccctacgtcaagtgagtgaattcttgagtagagtctgccagcgccacactgatgcccaggcacaggcatctgcagccctctttgattccatgcacagcagccaggcctcagataacccattttctccaccacgtactcttcattcacctcccctgcaactccagcagcgctctgagaagcccccttggtacagcagtggcccttctagcactgtgtccagtgctggtccttcttcccctactacagtagatggtaactcccaatttggcttcagtgatcaaccctccctaaattcacacgtggctgaagaacatcaaggccttgggctgctccaggagacccctgggagtggagcacaagagctctccatagaaggggagcaagagctttttgaaccaaatcagtccccacaggtgccacctatggaaaccagccagccatacgaggaggtcagccagccatgtcaggaggtccctgacatcagccagccatgccaggacatttctgaggcgctcagccagccatgtcagaaggtccctgacatcagccagcaatgccaggagaaccatgacaatggtaaccacacatgccaggaggtccctcacatcagccagccatgccagaagtccagccaactgtgccagaaagtctctgaggaagtttgccagctatgtctggagaactccgaggaggtcagccagccatgccagggggtctctgtggaggttggcaagctggtccataagttccatgtaggggttggtagcttggtccaggaaacccttgtagaagttggcagcccagctgaagagatccctgaggaggtcatccagccataccaggagttctctgtggaggttggcaggctggcccaggagacttctgcgatcaatctgttatctcagggcatccctgagattgataaaccatcccaagagttccctgaggagattgatctgcaggcccaggaggtccctgaggagataaattagaagtcctgggtggtccctgaagtgattgatcagctgcctggagagggtattcctcaagcccagcatccatctggtgatccaaaccctcagagccagtctctagcccatgaccagcactcaccccttccaccagcaacatgtgattaattttctcattagtggtatcacactataccagccatttgagccagcaaccttttctgttggctaactcactggccagctctcaccagcggtgtctggggaagtagttctctttgtatgaagcatacctgtgccagagctgtggttgaggaggagccagttttaggttcgaagaagccattggctcctcacttagccattagacttgaataggatttccttggggtgggttggtctgtcattacccagccttctctgagcatcctaggaaatcacagattgttaaaggaaatgccgcttcactgctgaagacaccatctggcgacagcaaatgcaaaagaggggactctagggtcttcacttttctggggaaatgttcacgacttctcaaggtacgcttagaccatatgtgcattcaggggactcttgtctttgccagcactcctcaggtgagcccgggatggctatctgaaatgtctggaaaatagagtcccttccccaaacatctgacatggccactaaatctttagacttgccttatagatccttccatatcatccccaagtgccccttctgcctcagtcctgttcctctgggcaatagctctagggaaaagtaggtattagactgctgtgcaaaattcagagcaactacttaaaatgctctagaggattcttagccagtctgtgaaagtgggcctcctctgtggtggggctgtttggcttaggagatgctgtagtagtagagataatcaggttctattttaagcaatcagcagagatcaatattgtacagatacaagcaaaggtttaataaatatatatatatatatttatttctgtagttgtgccagggacagactggccaaagaccaaacactgcagggtccccaagaaatttgtccttatatcattgtgtctgagggccagatatgattatgaagctttttccaaagatccagggatgggaatgggagtgggtaggaggggtaatgcggtcattggagtcgggggctggaacattatgagtgctcaataaatataaactaatgagaatggtggtgatgga

SEQ ID NO: 48703 - DNA, 4302 bp, Artificial Sequence
  derived and/or modified sequence
atgtggagcctgaccgccagcgagggcgagagcaccaccgcccacttcttcctgggcgccggcgacgagggcctgggcaccagaggcatcggcatgagacccgaggagagcgacagcgagctgctggaggacgaggaggacgaggtgccccccgagccccagatcatcgtgggcatctgcgccatgaccaagaagagcaagagcaagcccatgacccagatcctggagagactgtgcagattcgactacctgaccgtggtgatcctgggcgaggacgtgatcctgaacgagcccgtggagaactggcccagctgccactgcctgatcagcttccacagcaagggcttccccctggacaaggccgtggcctacagcaagctgagaaaccccttcctgatcaacgacctggccatgcagtactacatccaggacagaagagaggtgtacagaatcctgcaggaggagggcatcgacctgcccagatacgccgtgctgaacagagaccccgccagacccgaggagtgcaacctgatcgagggcgaggaccaggtggaggtgaacggcgccgtgttccccaagcccttcgtggagaagcccgtgagcgccgaggaccacaacgtgtacatctactaccccagcagcgccggcggcggcagccagagactgttcagaaagatcggcagcagaagcagcgtgtacagccccgagagcagcgtgagaaagaccggcagctacatctacgaggagttcatgcccaccgacggcaccgacgtgaaggtgtacaccgtgggccccgactacgcccacgccgaggccagaaagagccccgccctggacggcaaggtggagagagacagcgagggcaaggagatcagataccccgtgatgctgaccgccatggagaagctggtggccagaaaggtgtgcgtggccttcaagcagaccgtgtgcggcttcgacctgctgagagccaacggccacagcttcgtgtgcgacgtgaacggcttcagcttcgtgaagaacagcatgaagtactacgacgactgcgccaagatcctgggcaacaccatcatgagagagctggccccccagttccagatcccctggagcatccccaccgaggccgaggacatccccatcgtgcccaccaccagcggcaccatgatggagctgagatgcgtgatcgccatcatcagacacggcgacagaacccccaagcagaagatgaagatggaggtgaagcaccccagattcttcgccctgttcgagaagcacggcggctacaagaccggcaagctgaagctgaagagacccgagcagctgcaggaggtgctggacatcaccagactgctgctggccgagctggagaaggagcccggcggcgagatcgaggagaagaccggcaagctggagcagctgaagagcgtgctggagatgtacggccacttcagcggcatcaacagaaaggtgcagctgacctactacccccacggcgtgaaggccagcaacgagggccaggacccccagagagagaccctggcccccagcctgctgctggtgctgaagtggggcggcgagctgacccccgccggcagagtgcaggccgaggagctgggcagagccttcagatgcatgtaccccggcggccagggcgactacgccggcttccccggctgcggcctgctgagactgcacagcaccttcagacacgacctgaagatctacgccagcgacgagggcagagtgcagatgaccgccgccgccttcgccaagggcctgctggccctggagggcgagctgacccccatcctggtgcagatggtgaagagcgccaacatgaacggcctgctggacagcgacggcgacagcctgagcagctgccagcacagagtgaaggccagactgcaccacatcctgcagcaggacgcccccttcggccccgaggactacgaccagctggcccccaccagaagcaccagcctgctgaacagcatgaccatcatccagaaccccgtgaaggtgtgcgaccaggtgttcgccctgatcgagaacctgacccaccagatcagagagagaatgcaggaccccagaagcgtggacctgcagctgtaccacagcgagaccctggagctgatgctgcagagatggagcaagctggagagagacttcagacagaagagcggcagatacgacatcagcaagatccccgacatctacgactgcgtgaagtacgacgtgcagcacaacggcagcctgggcctgcagggcaccgccgagctgctgagactgagcaaggccctggccgacgtggtgatcccccaggagtacggcatcagcagagaggagaagctggagatcgccgtgggcttctgcctgcccctgctgagaaagatcctgctggacctgcagagaacccacgaggacgagagcgtgaacaagctgcaccccctgtgctacctgagatacagcagaggcgtgctgagccccggcagacacgtgagaaccagactgtacttcaccagcgagagccacgtgcacagcctgctgagcgtgttcagatacggcggcctgctggacgagacccaggacgcccagtggcagagagccctggactacctgagcgccatcagcgagctgaactacatgacccagatcgtgatcatgctgtacgaggacaacacccaggaccccctgagcgaggagagattccacgtggagctgcacttcagccccggcgtgaagggcgtggaggaggagggcagcgcccccgccggctgcggcttcagacccgccagcagcgagaacgaggagatgaagaccaaccagggcagcatggagaacctgtgccccggcaaggccagcgacgagcccgacagagccctgcagaccagcccccagccccccgagggccccggcctgcccagaagaagccccctgatcagaaacagaaaggccggcagcatggaggtgctgagcgagaccagcagcagcagacccggcggctacagactgttcagcagcagcagaccccccaccgagatgaagcagagcggcctgggcagccagtgcaccggcctgttcagcaccaccgtgctgggcggcagcagcagcgcccccaacctgcaggactacgccagaagccacggcaagaagctgccccccgccagcctgaagcacagagacgagctgctgttcgtgcccgccgtgaagagattcagcgtgagcttcgccaagcaccccaccaacggcttcgagggctgcagcatggtgcccaccatctaccccctggagaccctgcacaacgccctgagcctgagacaggtgagcgagttcctgagcagagtgtgccagagacacaccgacgcccaggcccaggccagcgccgccctgttcgacagcatgcacagcagccaggccagcgacaaccccttcagcccccccagaaccctgcacagcccccccctgcagctgcagcagagaagcgagaagcccccctggtacagcagcggccccagcagcaccgtgagcagcgccggccccagcagccccaccaccgtggacggcaacagccagttcggcttcagcgaccagcccagcctgaacagccacgtggccgaggagcaccagggcctgggcctgctgcaggagacccccggcagcggcgcccaggagctgagcatcgagggcgagcaggagctgttcgagcccaaccagagcccccaggtgccccccatggagaccagccagccctacgaggaggtgagccagccctgccaggaggtgcccgacatcagccagccctgccaggacatcagcgaggccctgagccagccctgccagaaggtgcccgacatcagccagcagtgccaggagaaccacgacaacggcaaccacacctgccaggaggtgccccacatcagccagccctgccagaagagcagccagctgtgccagaaggtgagcgaggaggtgtgccagctgtgcctggagaacagcgaggaggtgagccagccctgccagggcgtgagcgtggaggtgggcaagctggtgcacaagttccacgtgggcgtgggcagcctggtgcaggagaccctggtggaggtgggcagccccgccgaggagatccccgaggaggtgatccagccctaccaggagttcagcgtggaggtgggcagactggcccaggagaccagcgccatcaacctgctgagccagggcatccccgagatcgacaagcccagccaggagttccccgaggagatcgacctgcaggcccaggaggtgcccgaggagatcaactag

SEQ ID NO: 48704 - protein, 1160 aa, Artificial Sequence
  derived and/or modified sequence
MWAMESGHLLWALLFMQSLWPQLTDGATRVYYLGIRDVQWNYAPKGRNVITNQPLDSDIVASSFLKSDKNRIGGTYKKTIYKEYKDDSYTDEVAQPAWLGFLGPVLQAEVGDVILIHLKNFATRPYTIHPHGVFYEKDSEGSLYPDGSSGPLKADDSVPPGGSHIYNWTIPEGHAPTDADPACLTWIYHSHVDAPRDIATGLIGPLITCKRGALDGNSPPQRQDVDHDFFLLFSVVDENLSWHLNENIATYCSDPASVDKEDETFQESNRMHAINGFVFGNLPELNMCAQKRVAWHLFGMGNEIDVHTAFFHGQMLTTRGHHTDVANIFPATFVTAEMVPWEPGTWLISCQVNSHFRDGMQALYKVKSCSMAPPVDLLTGKVRQYFIEAHEIQWDYGPMGHDGSTGKNLREPGSISDKFFQKSSSRIGGTYWKVRYEAFQDETFQEKMHLEEDRHLGILGPVIRAEVGDTIQVVFYNRASQPFSMQPHGVFYEKDYEGTVYNDGSSYPGLVAKPFEKVTYRWTVPPHAGPTAQDPACLTWMYFSAADPIRDTNSGLVGPLLVCRAGALGADGKQKGVDKEFFLLFTVLDENKSWYSNANQAAAMLDFRLLSEDIEGFQDSNRMHAINGFLFSNLPRLDMCKGDTVAWHLLGLGTETDVHGVMFQGNTVQLQGMRKGAAMLFPHTFVMAIMQPDNLGTFEIYCQAGSHREAGMRAIYNVSQCPGHQATPRQRYQAARIYYIMAEEVEWDYCPDRSWEREWHNQSEKDSYGYIFLSNKDGLLGSRYKKAVFREYTDGTFRIPRPRTGPEEHLGILGPLIKGEVGDILTVVFKNNASRPYSVHAHGVLESTTVWPLAAEPGEVVTYQWNIPERSGPGPNDSACVSWIYYSAVDPIKDMYSGLVGPLAICQKGILEPHGGRSDMDREFALLFLIFDENKSWYLEENVATHGSQDPGSINLQDETFLESNKMHAINGKLYANLRGLTMYQGERVAWYMLAMGQDVDLHTIHFHAESFLYRNGENYRADVVDLFPGTFEVVEMVASNPGTWLMHCHVTDHVHAGMETLFTVFSRTEHLSPLTVITKETEKVPPRDIEEGNVKMLGMQIPIKNVEMLASVLVAISVTLLLVVLALGGVVWYQHRQRKLRRNRRSILDDSFKLLSFKQ

SEQ ID NO: 48705 - protein, 303 aa, Artificial Sequence
  derived and/or modified sequence
MTRARIGCFGPGGRARGTESAPEPSKRVPPGRSWQTQEVRQTRGANGLGPRAGSAGAKAPGPAQGAAQHGLGGSAGLRVRVSPLAMGSAALEILGLVLCLVGWGGLILACGLPMWQVTAFLDHNIVTAQTTWKGLWMSCVVQSTGHMQCKVYDSVLALSTEVQAARALTVSAVLLAFVALFVTLAGAQCTTCVAPGPAKARVALTGGVLYLFCGLLALVPLCWFANIVVREFYDPSVPVSQKYELGAALYIGWAATALLMVGGCLLCCGAWVCTGRPDLSFPVKYSAPRRPTATGDYDKKNYV

SEQ ID NO: 48706 - DNA, 912 bp, Artificial Sequence
  derived and/or modified sequence
atgactagagctaggattggttgcttcggacccggcggtagggcaagagggacggaaagcgcccctgagcccagtaagagggttcccccaggtcggtcctggcagacgcaagaggtgcgacaaacaaggggagccaatgggctgggaccccgtgccgggtcggccggggctaaggcaccgggacctgcacagggcgctgctcaacacgggctgggcggatcagccgggctgagggtgagggtgtccccgcttgcaatgggatccgccgcccttgagatcctggggctagtgctgtgcctagtgggatggggcggcttgattctggcctgtggtttgccaatgtggcaggttacggcatttctcgatcacaacattgtcaccgctcaaaccacctggaaggggctgtggatgagctgtgtcgtgcagtctacaggtcatatgcagtgcaaagtctacgatagtgtactggctctgtccaccgaggtgcaggctgcccgggctctcacagtgtccgctgtcctgttggcgttcgtcgccttgtttgttacccttgccggggcccagtgtaccacgtgtgtcgccccaggccctgccaaagccagggtggcactgacagggggggtgttgtatctgttctgtgggctcctggctctggtgcccctgtgttggtttgccaatattgtggtaagagagttctatgatccctcagttcccgtttcacagaagtacgaacttggtgctgccctgtacattgggtgggccgcaacagccctgctcatggtgggtggatgtctgctgtgctgtggcgcctgggtttgcacggggcggccagatctgtcctttccagttaagtactccgctccccggagacctactgctacgggcgactacgataaaaagaactatgtgtag

SEQ ID NO: 48707 - DNA, 912 bp, Artificial Sequence
  derived and/or modified sequence
atgactcgggcgcgcatcggttgctttggtcctgggggaagggccagaggtacagaatctgctcctgaaccttcaaaaagggttccccccggcagatcctggcagacccaggaggttagacagacgaggggagcaaacggcctgggtcctagagctggttcagcaggcgccaaagcgcctgggcccgcccagggcgcggcgcagcacggcctgggtggatccgccgggctgcgggtcagggtcagccctttagccatgggcagtgcagccttggagatactggggttggtcctctgcctggtaggctggggaggcctgatactcgcatgtgggctgcctatgtggcaggtcacggctttcctcgatcataatattgtcacagctcagacaacttggaaaggattgtggatgagctgtgtggtacagtcgacaggccatatgcagtgtaaagtgtatgactccgtgttagctctgtccaccgaggtacaagccgcccgcgctttaaccgtgtctgccgtgctactggcgtttgtggccctgtttgttacactggccggggctcagtgtaccacatgtgtcgcccccgggccggccaaagctcgggtggccctgaccggtggggtgctatacctcttctgcggactgctcgccctggtcccactgtgctggttcgccaacatagtggtccgggaattctacgacccttccgttcctgttagtcagaaatacgagctgggcgccgccttatacattggatgggctgccactgccctgctaatggttggtggctgcctgctctgttgtggagcttgggtgtgcacaggaagacccgacttatcgtttccagtcaaatatagcgccccccgtcgcccaacggcaaccggggactatgacaaaaaaaactacgtatag

SEQ ID NO: 48708 - DNA, 912 bp, Artificial Sequence
  derived and/or modified sequence
atgacacgcgcccgtattggctgctttggccccggaggacgggccagggggaccgagtctgcgcctgagccttccaaaagagtccctcccgggagaagctggcagacccaggaggtgcgccagactcgcggcgccaacgggttaggcccacgtgctggcagtgccggcgctaaggcacctggacctgcacagggcgctgcccagcacgggctagggggttctgctgggctcagagtgagagtgtccccattggccatgggaagcgcagcgctggaaatactcggactggttttgtgtttagtcggctggggtggcctgatcctggcttgcggactgccaatgtggcaggtgacggcattcctggaccacaatattgtgacggcccaaaccacctggaaagggctgtggatgtcctgtgtggtgcagtccaccggtcacatgcagtgtaaagtgtacgatagcgtccttgccctgagcacagaagtgcaggccgcccgagcactgacggttagcgctgtgctcctcgcatttgtggcattattcgtcacactggccggggcccagtgtacaacttgcgtcgccccagggccagccaaagctagggtcgccctgactggaggggttctttacctgttctgcgggctactggccctggtaccactttgttggttcgctaatatcgtcgtcagggaattctacgatccttctgttcccgtatcacagaagtacgagctaggagccgccctttacatagggtgggctgctactgctctactgatggttggtggatgccttctttgttgcggcgcttgggtgtgcacaggcagaccggacctgagtttccccgtgaaatactccgctccgaggaggcctactgctaccggcgactacgacaaaaagaattacgtttag

SEQ ID NO: 48709 - DNA, 912 bp, Artificial Sequence
  derived and/or modified sequence
atgacccgggcccgcatcggctgctttggacctgggggccgggcccggggcacagagagcgcccctgagcccagcaagagggtgcccccaggccgctcctggcagacccaggaggtgcggcagaccaggggggccaacggcctgggcccccgggccggcagcgctggggccaaggcccctggccctgcccagggcgccgcccagcacggcctgggcggcagcgctggcctgcgggtgcgggtgagccccctggccatgggcagcgctgccctggagatcctgggcctggtgctgtgcctggtgggctggggcggcctcatcctggcctgtggcctgcccatgtggcaggtgacagccttcctggaccacaacatcgtgacagcccagaccacctggaagggcctgtggatgagctgtgtggtgcagagcacaggccacatgcagtgcaaggtgtatgacagcgtgctggccctgagcacagaggtgcaggccgcccgggccctgactgtgtctgctgtgctgctggcctttgtggccctgtttgtgaccctggccggggcccagtgcaccacctgtgtggcccctggccctgccaaggcccgggtggccctgactggaggagtgctgtacctgttctgtggcctgctggccctggtgcccctgtgctggtttgccaacatcgtggtgcgggagttctatgaccccagcgtgcctgtgtcccagaagtatgagctgggcgccgccctgtacatcggctgggccgccacagccctgctgatggtgggcggctgcctgctgtgctgcggggcctgggtgtgcaccggccgcccagacctgtccttccctgtgaagtacagcgccccccggcggcccacagccaccggggactatgacaagaagaactacgtgtag

SEQ ID NO: 48710 - DNA, 912 bp, Artificial Sequence
  derived and/or modified sequence
atgacccgggcccggatcggctgcttcggccccggcggccgggcccgcgggacggaatcagctccggagccctctaagagggtgccacccggcagatcctggcagactcaggaggttcggcagacccggggcgccaacggactcggtcctagagctggctctgccggggctaaggcaccagggccagcccaaggcgctgcccagcatgggctgggcgggtccgctggcctgcgtgtccgcgtgtccccattagcaatgggttccgccgctctggagatcctggggttggtgctctgtttggtcgggtggggcggtcttatcctggcctgcggattgcccatgtggcaagtgacggcgtttctcgatcataatatagtcacggcacagactacttggaaaggtctgtggatgtcctgcgtggtgcagagcaccggacacatgcagtgcaaagtgtacgatagtgtcctcgctttgtctacagaggtgcaggctgctcgcgccctgacagtttccgctgtcttgctagcctttgtggccctgttcgtgaccctcgctggcgcacagtgcaccacatgcgtggcccctgggccagctaaagctagggttgcacttactggtggggtcctttacctgttctgtgggcttctggcactcgtaccgctgtgctggtttgccaatatcgtggttagggagttttatgacccctccgtgcctgtcagccagaagtatgaattaggtgccgccctgtatattggatgggccgccactgcgctcctgatggtcggcgggtgcctactctgctgtggcgcctgggtttgtacagggcgacccgacctttcgtttccggttaagtatagtgcgccacgacggccaaccgccacgggagattatgacaaaaagaactacgtgtag

SEQ ID NO: 48711 - DNA, 912 bp, Artificial Sequence
  derived and/or modified sequence
atgacccgggcccggatcggctgcttcggccccggcggccgggccaggggcaccgaatcggctccggaaccttcaaaaagagtccctccaggcagatcatggcagacacaggaggttaggcaaacacgcggcgctaacggccttggacccagagccggctccgccggcgctaaggctcctggacccgctcagggcgctgcgcagcacggtttggggggttcggccggactgcgggtccgcgtgagcccgctggcaatggggtccgccgctcttgagatattggggttagttctatgcctcgttggatgggggggacttattctagcctgtggcctcccgatgtggcaggtgactgccttcctggatcataatatcgtaaccgctcagacaacctggaaaggcttatggatgtcttgcgtggtgcagtctacaggccatatgcagtgcaaagtgtatgatagcgtgcttgctctaagcactgaggtgcaggccgcccgggcattaacagtgtctgcggttctgctggctttcgtcgccttattcgtgaccttagctggggcccaatgtaccacatgcgtggctccggggcctgccaaagctagggttgcactaacgggcggggtcctgtatctattctgcggactgctcgcactggtgccgctttgttggttcgctaatatagtcgttcgcgaattttacgacccgtctgttcccgtcagccaaaagtacgagctgggcgcagccttgtatattggatgggccgctacagcccttctgatggtgggtgggtgcttactgtgctgtggcgcatgggtgtgtacagggagaccagatctcagttttccagtcaagtactcagcccccaggcggcccaccgcgacaggcgattatgacaagaaaaattacgtctag

SEQ ID NO: 48712 - DNA, 912 bp, Artificial Sequence
  derived and/or modified sequence
atgacccgggcccggatcggctgcttcggccccggcggccgggcccgcgggaccgaaagcgcacctgagccttctaagagagtaccgcccgggagatcctggcagacgcaggaggtgcgtcagacccggggcgccaatgggctgggtccaagggcaggatctgctggtgccaaggcccccggtcccgctcagggggctgctcaacatgggctaggcggatcagcgggactaagggtccgggtttctccgctggcaatgggctctgccgcactggaaatcctgggactcgtactgtgcctggtcggatggggtggccttatcctggcgtgtggtctgccaatgtggcaggttacggcttttcttgaccataatatagtgaccgctcaaactacatggaagggactgtggatgtcgtgcgtggtgcaaagcaccggccatatgcagtgcaaagtgtatgatagtgtgttggctttgagcaccgaagtgcaggccgccagagccctcactgtgtctgctgtcctgcttgcattcgtggcgctcttcgttacattggccggggcccagtgtactacttgtgtcgccccgggaccggccaaagccagagtggccctcactggcggcgtgttgtacttgttttgtggtctgctggctctagtgcctctctgctggtttgccaatatcgtcgtgcgcgagttctatgaccccagtgtgcccgtcagccagaaatacgagctgggagctgcactctacattgggtgggcggctaccgctctcctgatggtagggggatgtcttttgtgctgcggggcctgggtctgtactggaaggcccgatctgtccttccccgtgaagtacagcgccccaaggaggccgaccgccaccggcgattacgataaaaaaaactacgtctag

SEQ ID NO: 48713 - DNA, 912 bp, Artificial Sequence
  derived and/or modified sequence
atgacgcgggcaaggataggatgtttcggacccggtggcagggctaggggaacagagtccgccccagagcctagcaagcgagtaccacctggacggtcatggcagacccaggaagtgcggcaaacccggggagctaacgggcttggacctcgcgcaggaagcgctggcgctaaggcacccggtcccgctcagggggcagctcagcatggactggggggaagcgcgggattgagagtccgcgtgtcccctttggctatgggtagcgccgctctcgaaattttgggcctcgtgctgtgtttggtggggtgggggggactgatcctggcttgcggactgcctatgtggcaggtcacagcgttcctagaccacaatatcgtcacggcacagaccacgtggaaggggctatggatgagctgcgtcgtgcagtcgacagggcacatgcagtgtaaggtatacgattctgtgcttgctctatctaccgaggttcaggctgccagggccctcacagtaagtgcagtgctactcgcctttgtggctctgtttgtaactctggcaggggctcagtgtacaacatgcgtcgctcccggtcccgcaaaagcacgtgtggctctgacgggtggggtcttgtatctcttttgcggcctcttagcgctggtccctttgtgttggtttgccaatatagttgtgagggaattctatgatccgagtgtccccgtctcccagaaatatgagctcggcgcagcactttatatagggtgggccgcaactgccctgctgatggtagggggatgtttactttgttgcggcgcttgggtgtgcacgggcaggcctgacttaagtttccctgtaaagtatagcgctccccgtaggcctacagccaccggcgattatgacaagaagaattacgtgtag

SEQ ID NO: 48714 - DNA, 912 bp, Artificial Sequence
  derived and/or modified sequence
atgaccagggcacgcattggctgcttcgggcctgggggtcgagcccgaggcacggaatctgcacctgagccatctaaacgcgtgccacctggcagatcttggcaaacccaggaggttaggcagaccagaggcgcaaatggcctagggccaagggccggttccgcaggcgctaaggcacctggcccagcgcagggagctgcccagcacggcctgggagggtcagccggactccgcgtgcgtgtgtccccactggccatgggttccgctgcgctggagattctcggcctggtcctgtgtctggtggggtggggcggtctgattctggcttgcggcttgcccatgtggcaggtcaccgccttcctggatcacaacatcgtgactgcccagaccacctggaagggcttatggatgtcctgtgtcgtgcagagcacaggacacatgcagtgcaaggtttacgacagcgtgctcgctctgtcaaccgaggttcaagcagcccgagccttaacagtttccgccgtactgctggcgtttgtcgctctgtttgtcacgctggctggcgctcaatgcacaacctgtgtcgcacctggcccagccaaggcgagggttgctttaaccggtggggtcctgtatctgttctgcgggcttctcgctctcgttccactctgctggtttgcaaatatcgtagtccgcgagttttacgatccgtctgtgccggtatcacaaaagtacgagctgggggctgccttgtatatcgggtgggccgcaaccgccctcttaatggtaggaggctgtcttctgtgttgcggcgcttgggtatgcactgggcgaccagacctctcttttcctgtgaagtatagtgcccctaggagacccactgccactggtgattatgataaaaaaaactatgtgtag

SEQ ID NO: 48715 - DNA, 912 bp, Artificial Sequence
  derived and/or modified sequence
atgacacgggcacgcattggatgctttggtcccggtggccgtgctcgtggcaccgaaagtgcccctgagccttcgaagcgcgtgccccctggcagaagttggcagacccaggaagttcgacagacccggggagcaaatgggcttggacctcgcgcaggctcggccggtgccaaagcaccgggaccggcacaaggagccgcacaacatggcctgggcggaagtgccggacttagagtgagagtttccccattggccatgggatccgcagcgcttgaaatactgggactggttctctgtttggttgggtggggcggattaatcctggcctgcggacttcctatgtggcaagtgaccgcctttttggatcacaatattgtaactgcccagactacctggaaaggcttgtggatgagctgcgtcgtgcaaagcaccggacacatgcaatgcaaggtgtatgatagcgtgcttgctctctcaaccgaagtccaagcagcccgagctttgaccgtcagtgcagtattgctggctttcgtggctcttttcgtgactttggccggagcgcaatgcaccacctgcgttgcacccggtcccgctaaggctagagttgccctcactgggggagtgttataccttttttgtgggcttctggctctggtgcccctgtgctggttcgccaacatagtggtcagggagttctacgacccctcagtcccagtctctcaaaagtatgagctcggcgctgcgctctacatcgggtgggcggctactgccctgctgatggtgggtggctgcctgctgtgctgcggcgcatgggtttgtactgggagaccagatttgtcttttcctgtgaagtacagtgcacctcgtcgccctaccgcaaccggagactatgataagaagaattacgtatag

SEQ ID NO: 48716 - DNA, 2357 bp, Artificial Sequence
  derived and/or modified sequence
atcgccactggtgggagggcagggcacagcccctccgtgtccctttgtctctcctgtctgaaggccagagcaggctgctaggcctggggccaccactgcccctgggtgctacacccagtgtgctgggtcactgggaacttcctgaagtggtgtcacctgaactgggcccccaaggatggggtgcgggcagtaccgcaggaagaggagcagcccctgtgaagattgagaggtctgggaagcccctgcggcttgggagagtgggggtcgccaggcagggggaaagcccctgtgccaccgctttttgccagagactcaggctccagagaggcagtgagtggcatggggggtgaggctggggccctgggcctgacctccacacgcctgcctggcctctctgtttgccatgggatgagagagacagtgctgggactcagagcggggctggagagtgagagtgcgagaaagggcctgggtggggcttggaccccggggcgggctttctggagagcccccctacgagggcctctacggcggtgacggggtggggggcttctgcaaaccttggtcagggaagtggagctggctcgagtggaagagaccacccggctcagtcggggatgtgggagtggactgggtggtgcagactgggggtcgagcgccttctgaagtgacggggccgggacgcgcagggaggcggcccaagaagcgcgccctaggccagcccagaatgcgctcggccgcgactaggacaacggcgggtggggctgggggcggctgccgggcggggagcggtcccgcgccctcagctacccctcaagagccgttgtttccctaacttcagctgccagaggctctgtgattggctgcggcacgatgacccgcgcacggattggctgcttcgggccggggggccgggcccgggggacagaatccgcccccgaaccttcaaagagggtaccccccggcaggagctggcagacccaggaggtgcgacagacccgcggggcaaacggactggggccaagagccgggagcgcgggcgcaaaggcaccagggcccgcccagggcgccgcgcagcacggccttgggggttctgcgggccttcgggtgcgcgtctcgcctctagccatggggtccgcagcgttggagatcctgggcctggtgctgtgcctggtgggctgggggggtctgatcctggcgtgcgggctgcccatgtggcaggtgaccgccttcctggaccacaacatcgtgacggcgcagaccacctggaaggggctgtggatgtcgtgcgtggtgcagagcaccgggcacatgcagtgcaaagtgtacgactcggtgctggctctgagcaccgaggtgcaggcggcgcgggcgctcaccgtgagcgccgtgctgctggcgttcgttgcgctcttcgtgaccctggcgggcgcgcagtgcaccacctgcgtggccccgggcccggccaaggcgcgtgtggccctcacgggaggcgtgctctacctgttttgcgggctgctggcgctcgtgccactctgctggttcgccaacattgtcgtccgcgagttttacgacccgtctgtgcccgtgtcgcagaagtacgagctgggcgcagcgctgtacatcggctgggcggccaccgcgctgctcatggtaggcggctgcctcttgtgctgcggcgcctgggtctgcaccggccgtcccgacctcagcttccccgtgaagtactcagcgccgcggcggcccacggccaccggcgactacgacaagaagaactacgtctgagggcgctgggcacggccgggcccctcctgccagccacgcctgcgaggcgttggataagcctggggagccccgcatggaccgcggcttccgccgggtagcgcggcgcgcaggctcctcggaacgtccggctctgcgccccgacgcggctcctggatccgctcctgcctgcgcccgcagctgaccttctcctgccactagcccggccctgcccttaacagacggaatgaagtttccttttctgtgcgcggcgctgtttccataggcagagcgggtgtcagactgaggatttcgcttcccctccaagacgctgggggtcttggctgctgccttacttcccagaggctcctgctgacttcggaggggcggatgcagagcccagggcccccaccggaagatgtgtacagctggtctttactccatcggcagggcccgagcccagggaccagtgacttggcctggacctcccggtctcactccagcatctccccaggcaaggcttgtgggcaccggagcttgagagagggcgggagtgggaaggctaagaatctgcttagtaaatggtttgaactctc

SEQ ID NO: 48717 - DNA, 2548 bp, Artificial Sequence
  derived and/or modified sequence
aaagcagaacaatggctgggggtgagcaggtggccttggccagtgctctgccccaagggccctttaccagagatcaggggtttgtgtccctgcctaaccaggacacctccgatctccacctgcaggccctggaccactgtggcactgtggacacaaggccgcttctgccccttggacgccgagccccttcccacctctgggatcttgcactggctattgcttctgctctgcctggaacttcttccccggatccctgtgaaatgtcacctcttcagagaggccttcaccactgtctttcctgcccagttcttggttgataggttcctgtcagctccttctgggcaggagcttcttgtgctgtgtgctctgcctagagacagtgcttgccacgaagtaggtgagcagaccctccatgagtggcaggaaaggtgggtgcaccctcatgcccctccggagtctggcctgggctactcagaggccagcctccatctgaggtgggtttgtctggggtggcgtcagcccctgcggccctctctgggcctctctgcattggcattgttccactgcagcctggggcctcgaccaacatagtggggtcagggtagaaaccagattgtgaaaggtgaagcctgagactcctctgccacgtccctgagatgctgtgaggctgccgccaaagaaacatgagcttgctggggccaccctagggtgacagctaggagagaagaaaaacaggcagccaggtgagaagggagagccttgggctggctgcagctccaagctggctagagggcaacaggcagcctcctgtgcaggacagacgcatgaagacagccaccctgtggaggttattcctggatactaggtgggaaagtcggcaagcaaaaggacaggtccagctcaagcttctaaaagcaatgctgggggacggtgcagcaaggtgttcctggaaatgacctcggcaacacatcttagaagatgagcaggacccaacctgacagatacacgctgcgggcagaagaggccaagctgccagaggctctgtgattggctgcggcacgatgacccgcgcacggattggctgcttcgggccggggggccgggcccgggggacagaatccgcccccgaaccttcaaagagggtaccccccggcaggagctggcagacccaggaggtgcgacagacccgcggggcaaacggactggggccaagagccgggagcgcgggcgcaaaggcaccagggcccgcccagggcgccgcgcagcacggccttgggggttctgcgggccttcgggtgcgcgtctcgcctctagccatggggtccgcagcgttggagatcctgggcctggtgctgtgcctggtgggctgggggggtctgatcctggcgtgcgggctgcccatgtggcaggtgaccgccttcctggaccacaacatcgtgacggcgcagaccacctggaaggggctgtggatgtcgtgcgtggtgcagagcaccgggcacatgcagtgcaaagtgtacgactcggtgctggctctgagcaccgaggtgcaggcggcgcgggcgctcaccgtgagcgccgtgctgctggcgttcgttgcgctcttcgtgaccctggcgggcgcgcagtgcaccacctgcgtggccccgggcccggccaaggcgcgtgtggccctcacgggaggcgtgctctacctgttttgcgggctgctggcgctcgtgccactctgctggttcgccaacattgtcgtccgcgagttttacgacccgtctgtgcccgtgtcgcagaagtacgagctgggcgcagcgctgtacatcggctgggcggccaccgcgctgctcatggtaggcggctgcctcttgtgctgcggcgcctgggtctgcaccggccgtcccgacctcagcttccccgtgaagtactcagcgccgcggcggcccacggccaccggcgactacgacaagaagaactacgtctgagggcgctgggcacggccgggcccctcctgccagccacgcctgcgaggcgttggataagcctggggagccccgcatggaccgcggcttccgccgggtagcgcggcgcgcaggctcctcggaacgtccggctctgcgccccgacgcggctcctggatccgctcctgcctgcgcccgcagctgaccttctcctgccactagcccggccctgcccttaacagacggaatgaagtttccttttctgtgcgcggcgctgtttccataggcagagcgggtgtcagactgaggatttcgcttcccctccaagacgctgggggtcttggctgctgccttacttcccagaggctcctgctgacttcggaggggcggatgcagagcccagggcccccaccggaagatgtgtacagctggtctttactccatcggcagggcccgagcccagggaccagtgacttggcctggacctcccggtctcactccagcatctccccaggcaaggcttgtgggcaccggagcttgagagagggcgggagtgggaaggctaagaatctgcttagtaaatggtttgaactctctcc

SEQ ID NO: 48718 - DNA, 1760 bp, Artificial Sequence
  derived and/or modified sequence
ttccggagggtggcctgggggctggggtgccagggacaccatcgccactggtgggagggcagggcacagcccctccgtgtccctttgtctctcctgtctgaaggccagagcaggctgctaggcctggggccaccactgcccctgggtgctacacccagtgtgctgggtcactgggaacttcctgaagtggtgtcacctgaactgggcccccaaggatggggtgcgggcagtaccgcaggaagaggagcagcccctgtgaagattgagagctgccagaggctctgtgattggctgcggcacgatgacccgcgcacggattggctgcttcgggccggggggccgggcccgggggacagaatccgcccccgaaccttcaaagagggtaccccccggcaggagctggcagacccaggaggtgcgacagacccgcggggcaaacggactggggccaagagccgggagcgcgggcgcaaaggcaccagggcccgcccagggcgccgcgcagcacggccttgggggttctgcgggccttcgggtgcgcgtctcgcctctagccatggggtccgcagcgttggagatcctgggcctggtgctgtgcctggtgggctgggggggtctgatcctggcgtgcgggctgcccatgtggcaggtgaccgccttcctggaccacaacatcgtgacggcgcagaccacctggaaggggctgtggatgtcgtgcgtggtgcagagcaccgggcacatgcagtgcaaagtgtacgactcggtgctggctctgagcaccgaggtgcaggcggcgcgggcgctcaccgtgagcgccgtgctgctggcgttcgttgcgctcttcgtgaccctggcgggcgcgcagtgcaccacctgcgtggccccgggcccggccaaggcgcgtgtggccctcacgggaggcgtgctctacctgttttgcgggctgctggcgctcgtgccactctgctggttcgccaacattgtcgtccgcgagttttacgacccgtctgtgcccgtgtcgcagaagtacgagctgggcgcagcgctgtacatcggctgggcggccaccgcgctgctcatggtaggcggctgcctcttgtgctgcggcgcctgggtctgcaccggccgtcccgacctcagcttccccgtgaagtactcagcgccgcggcggcccacggccaccggcgactacgacaagaagaactacgtctgagggcgctgggcacggccgggcccctcctgccagccacgcctgcgaggcgttggataagcctggggagccccgcatggaccgcggcttccgccgggtagcgcggcgcgcaggctcctcggaacgtccggctctgcgccccgacgcggctcctggatccgctcctgcctgcgcccgcagctgaccttctcctgccactagcccggccctgcccttaacagacggaatgaagtttccttttctgtgcgcggcgctgtttccataggcagagcgggtgtcagactgaggatttcgcttcccctccaagacgctgggggtcttggctgctgccttacttcccagaggctcctgctgacttcggaggggcggatgcagagcccagggcccccaccggaagatgtgtacagctggtctttactccatcggcagggcccgagcccagggaccagtgacttggcctggacctcccggtctcactccagcatctccccaggcaaggcttgtgggcaccggagcttgagagagggcgggagtgggaaggctaagaatc

SEQ ID NO: 48719 - DNA, 912 bp, Artificial Sequence
  derived and/or modified sequence
atgaccagagccagaatcggctgcttcggccccggcggcagagccagaggcaccgagagcgcccccgagcccagcaagagagtgccccccggcagaagctggcagacccaggaggtgagacagaccagaggcgccaacggcctgggccccagagccggcagcgccggcgccaaggcccccggccccgcccagggcgccgcccagcacggcctgggcggcagcgccggcctgagagtgagagtgagccccctggccatgggcagcgccgccctggagatcctgggcctggtgctgtgcctggtgggctggggcggcctgatcctggcctgcggcctgcccatgtggcaggtgaccgccttcctggaccacaacatcgtgaccgcccagaccacctggaagggcctgtggatgagctgcgtggtgcagagcaccggccacatgcagtgcaaggtgtacgacagcgtgctggccctgagcaccgaggtgcaggccgccagagccctgaccgtgagcgccgtgctgctggccttcgtggccctgttcgtgaccctggccggcgcccagtgcaccacctgcgtggcccccggccccgccaaggccagagtggccctgaccggcggcgtgctgtacctgttctgcggcctgctggccctggtgcccctgtgctggttcgccaacatcgtggtgagagagttctacgaccccagcgtgcccgtgagccagaagtacgagctgggcgccgccctgtacatcggctgggccgccaccgccctgctgatggtgggcggctgcctgctgtgctgcggcgcctgggtgtgcaccggcagacccgacctgagcttccccgtgaagtacagcgcccccagaagacccaccgccaccggcgactacgacaagaagaactacgtgtag

SEQ ID NO: 48720 - protein, 352 aa, Artificial Sequence
  derived and/or modified sequence
MVRPVRHKKPVNYSQFDHSDSDDDFVSATVPLNKKSRTAPKELKQDKPKPNLNNLRKEEIPVQEKTPKKRLPEGTFSIPASAVPCTKMALDDKLYQRDLEVALALSVKELPTVTTNVQNSQDKSIEKHGSSKIETMNKSPHISNCSVASDYLDLDKITVEDDVGGVQGKRKAASKAAAQQRKILLEGSDGDSANDTEPDFAPGEDSEDDSDFCESEDNDEDFSMRKSKVKEIKKKEVKVKSPVEKKEKKSKSKCNALVTSVDSAPAAVKSESQSLPKKVSLSSDTTRKPLEIRSPSAESKKPKWVPPAASGGSRSSSSPLVVVSVKSPNQSLRLGLSRLARVKPLHPNATST

SEQ ID NO: 48721 - DNA, 1059 bp, Artificial Sequence
  derived and/or modified sequence
atggtccgccccgtgcggcataaaaaacccgtgaactacagtcagttcgaccactccgatagtgatgatgactttgtgtcagctaccgttcctctgaacaagaagtcacggactgcccccaaggaactgaagcaggacaaacccaagcctaatctcaacaacttacgcaaagaagagattccagtccaagaaaagacccctaagaaaaggcttccagagggaacattctcgattcctgcctctgcagtgccctgcacaaagatggccctggacgataaactctaccagagggacctggaagttgctctggcgctgtctgttaaggagctccctactgtgacaaccaacgtacagaattcacaggacaagtctatcgagaagcatgggtcctctaaaattgaaacaatgaataaaagcccacacatttcgaattgcagtgtcgcaagcgactatcttgacttggacaagataaccgttgaagacgacgtggggggagtgcagggtaagcgaaaagcggcctccaaggccgccgcccagcagaggaaaatcctgctggagggaagcgacggagactccgccaatgacacggaacctgacttcgccccgggcgaggacagcgaggacgatagcgacttttgcgagtccgaggacaatgacgaagacttctctatgcgcaagagcaaggtaaaggaaattaaaaaaaaggaggtgaaagtgaagtcgcccgtggagaagaaggagaaaaaatccaaatccaaatgcaatgccctcgttacaagcgtggattccgcacccgccgcagttaaatccgaatcccagtcccttccaaagaaagtatcactgtcatccgatacaacccgaaagccgctagaaatcaggtctccaagcgccgaaagcaaaaaacccaaatgggtacccccggctgcttcaggtggaagtagatcaagcagctctcccttagtggtcgtgtccgtgaagtcccccaatcagtctctaaggcttggattgtctaggcttgcccgcgtgaaacctctccatcctaatgccacaagcacatag

SEQ ID NO: 48722 - DNA, 1059 bp, Artificial Sequence
  derived and/or modified sequence
atggtgcggcctgtgcgccacaagaagcctgtgaactacagccagtttgaccacagcgacagtgatgatgactttgtgtctgccaccgtgcccctgaacaagaagagcaggacagcccccaaggagctgaagcaggacaagcccaagcccaacctgaacaacctgaggaaggaggagatccctgtgcaggagaagacccccaagaagaggctgcctgagggcaccttcagcatcccagccagcgctgtgccctgcaccaagatggccctggatgacaagctgtaccagagggacctggaggtggccctggccctgtctgtgaaggagctgcccaccgtgaccaccaacgtgcagaacagccaggacaagagcattgagaagcacggcagcagcaagattgagaccatgaacaagagcccccacatcagcaactgcagcgtggccagtgactacctggacctggacaagatcaccgtggaggatgatgtgggcggcgtgcagggcaagaggaaggccgccagcaaggctgctgcccagcagaggaagatcctgctggagggcagtgatggagacagcgccaatgacacagagccagactttgcccctggagaggacagtgaagatgacagcgacttctgtgagagcgaggacaatgatgaggacttctccatgaggaagagcaaggtgaaggagatcaagaagaaggaggtgaaggtgaagagccctgtggagaagaaggagaagaagagcaagagcaaatgtaatgccctggtgacctctgtggacagcgccccagctgctgtgaagtctgagagccagagcctgcccaagaaggtgtccctgagcagtgacaccaccaggaagcccctggagatccgcagccccagcgctgagagcaagaagcccaagtgggtgcccccagctgccagcggcggcagccgcagcagcagcagccccctggtggtggtgtctgtgaagagccccaaccagagcctgcggctgggcctgagccggctggcccgggtgaagcccctgcaccccaatgccaccagcacctag

SEQ ID NO: 48723 - DNA, 1059 bp, Artificial Sequence
  derived and/or modified sequence
atggtgcggcccgtgcggcacaagaagcccgtgaactacagccagtttgatcattctgactccgatgatgattttgtgtcggcgactgtacccctgaacaaaaaatctcggactgcccccaaagaactgaagcaggacaagccaaaacccaatttgaacaatctaagaaaggaggagatccccgtgcaggagaagactcctaagaaacgtctgccagagggaaccttttcaatcccggccagtgcagtgccatgcactaaaatggcattggacgataaactgtaccagagggatctcgaagtggccctcgccctgagcgtgaaagaacttcccacagtcaccaccaatgtgcagaatagtcaggacaaatctattgaaaaacatggttcatccaaaatcgaaactatgaacaagtctccgcacatttccaattgttccgtggcctctgattatctggaccttgacaagattactgtggaagatgatgtggggggcgtgcaggggaagagaaaagccgcgagcaaagccgcggctcaacaacgcaaaatcctacttgaaggcagtgatggtgatagtgcaaacgacacagagccagactttgcacctggagaagatagtgaggatgattccgatttctgcgaatcggaggataacgacgaggatttctcaatgcggaagtctaaggtgaaggagatcaaaaagaaagaggtgaaggtcaaaagtcccgttgaaaaaaaggagaagaaaagcaaaagcaaatgtaacgcactcgtaactagcgtagactcggcacctgccgcggtgaaaagcgaaagtcagtccctcccgaagaaggtgtccctttcttccgacacgaccagaaagcccctcgagattaggtccccttcggcagagtcgaaaaagccaaagtgggtccccccagctgcctcaggcgggagccgatcttcatcatctcccctcgtggtcgtgagcgttaaatcgccaaatcagtcacttagattgggcctcagcaggctggcccgcgttaagcccttacatccgaacgctacctccacatag

SEQ ID NO: 48724 - DNA, 1059 bp, Artificial Sequence
  derived and/or modified sequence
atggttcgccctgtccgccataagaaaccagtgaactactcacaatttgatcactcagactctgatgacgattttgtcagtgcaaccgttccccttaataaaaaaagccgcactgctccaaaagagctgaagcaggacaagcccaaaccaaacctcaataatctccgtaaggaggagatcccagtgcaagagaagacaccaaaaaagcggctgcctgagggcactttttctatcccagcatcagccgtaccctgcaccaagatggccttggacgacaaactctaccagcgcgacctggaagtcgcccttgctctgagcgttaaggagctccctactgtgaccacaaacgtgcaaaactctcaggacaaatctatagagaaacatgggtctagtaagatcgaaactatgaacaagtccccgcatatatcaaattgctccgtggcttctgactatctggacctggacaagataacggtggaagacgatgtgggtggggtgcagggtaaacgaaaggcagcatctaaggccgctgcccagcagagaaaaattctgttagaggggtccgatggcgatagcgccaacgatacagagcctgatttcgcccctggagaggattccgaggatgactctgatttctgtgagtccgaagataatgatgaggatttttctatgagaaaatctaaggtgaaggaaatcaagaaaaaggaagttaaggtcaaatcccccgtcgagaagaaagagaagaagtcaaaatcaaagtgcaatgcactggtgacttcggtggacagtgctcccgctgctgttaagagtgagtctcagagcctcccaaagaaggtgagcctgtcctccgatactacccggaagcccttagaaatccgcagcccatccgccgagtccaagaagcccaagtgggtgccacctgccgcaagcgggggtagtaggtccagttccagcccgttagttgtcgtgtctgttaaaagcccgaaccagtctttgcgccttggactctcgcgattggccagggtgaaacctcttcatccaaatgcgacaagtacctag

SEQ ID NO: 48725 - DNA, 1059 bp, Artificial Sequence
  derived and/or modified sequence
atggtgagacccgtgagacacaagaagcccgtgaactacagccagttcgaccacagcgacagcgacgacgacttcgtgagcgccaccgtgcccctgaacaagaagagcagaaccgcccccaaggagctgaagcaggacaagcccaagcccaacctgaacaacctgagaaaggaggagatccccgtgcaggagaagacccccaagaagagactgcccgagggcaccttcagcatccccgccagcgccgtgccctgcaccaagatggccctggacgacaagctgtaccagagagacctggaggtggccctggccctgagcgtgaaggagctgcccaccgtgaccaccaacgtgcagaacagccaggacaagagcatcgagaagcacggcagcagcaagatcgagaccatgaacaagagcccccacatcagcaactgcagcgtggccagcgactacctggacctggacaagatcaccgtggaggacgacgtgggcggcgtgcagggcaagagaaaggccgccagcaaggccgccgcccagcagagaaagatcctgctggagggcagcgacggcgacagcgccaacgacaccgagcccgacttcgcccccggcgaggacagcgaggacgacagcgacttctgcgagagcgaggacaacgacgaggacttcagcatgagaaagagcaaggtgaaggagatcaagaagaaggaggtgaaggtgaagagccccgtggagaagaaggagaagaagagcaagagcaagtgcaacgccctggtgaccagcgtggacagcgcccccgccgccgtgaagagcgagagccagagcctgcccaagaaggtgagcctgagcagcgacaccaccagaaagcccctggagatcagaagccccagcgccgagagcaagaagcccaagtgggtgccccccgccgccagcggcggcagcagaagcagcagcagccccctggtggtggtgagcgtgaagagccccaaccagagcctgagactgggcctgagcagactggccagagtgaagcccctgcaccccaacgccaccagcacctag

SEQ ID NO: 48726 - DNA, 2163 bp, Artificial Sequence
  derived and/or modified sequence
gaagccaacaagaatttgagaactgtaaataccaagccttgaaagggaccatggtgcggcctgtgagacataagaaaccagtcaattactcacagtttgaccactctgacagtgatgatgattttgtttctgcaactgtacctttaaacaagaaatccagaacagcaccaaaggagttaaaacaagataaaccaaaacctaacttgaacaatctccggaaagaagaaatcccagtacaagagaaaacccctaaaaaaagactccctgaaggtacttttagtattccagctagtgcagtgccttgtacaaagatggctttagatgacaagctctaccagagagacttagaagttgcactagctttatcagtgaaggaacttccaacagtcaccactaatgtgcagaactctcaagataaaagcattgaaaaacatggcagtagtaaaatagaaacaatgaataagtctcctcatatctctaattgcagtgtagccagtgattatttagatttggataagattactgtggaagatgatgttggtggtgttcaagggaaaagaaaagcagcatctaaagctgcagcacagcagaggaagattcttctggaaggcagtgatggtgatagtgctaatgacactgaaccagactttgcacctggtgaagattctgaggatgattctgatttttgtgagagtgaggataatgacgaagacttctctatgagaaaaagtaaagttaaagaaattaaaaagaaagaagtgaaggtaaaatccccagtagaaaagaaagagaagaaatctaaatccaaatgtaatgctttggtgacttcggtggactctgctccagctgccgtcaaatcagaatctcagtccttgccaaaaaaggtttctctgtcttcagataccactaggaaaccattagaaatacgcagtccttcagctgaaagcaagaaacctaaatgggtcccaccagcggcatctggaggtagcagaagtagcagcagcccactggtggtagtgtctgtgaagtctcccaatcagagtctccgccttggcttgtccagattagcacgagttaaacctttgcatccaaatgccactagcacctgagtgtggtacaggaggaatgtttggttgggagaatcacagctttacaagggtgtttatatttgatttgtgtttatatttgaggcaggtattgtaatataaaggaatccattaccatgtcctataaatgacctctagccattttatgattatgttctctgtaaaactcttcaagacttcaatgagaagtttgtttataagaattatcttctcatacctttccttgtgaagagcgtattctgtttttctatcagttcgacatgaagtccacatcacatgctgttcttttctagttacatgatgtgcctttctagctttgtctagtttatagcaccttaactttaactgttcagttttatctggcagaggaaaacattcttatttctttcagaagacatttctgaaatcttataagctacttaagctacgttgtcagttttatcgcaaagatgttttgtattttagccaaatctttttatagtacaaacttagaattattttacacactaaaatggttgcagttttatggcatatgtctccgatttagatggttattctctagaaaatagtatttaaagacattttatgaaatcttcattgtcaaaacctttaataaaagtggaaatattttgaaatgccctttttcttgataccactcatccacgtgttcctgattgtccacatttcatgataaaatgagagctccgcagagaatgttagcctttctgttgtaaatgtaatcttcaagtagtcactttttgttaagttctttagaaagtagttgtcaagtacttagtcatccctattatgatatgagatagtacagcttttcaggaagcttagatctgaatttactttgaaaaacaattgtaatgaatattttatatttacattgagaatttcaactagcttctgatcaatttttaataaaaaattttcaaatcatgttagctgttaaaaaatgtataataactcagtttttcttggtttatggaaatatctatattaatgtgaaaataattaatttagaattgtgattaaagtgagcatttgtcta

SEQ ID NO: 48727 - protein, 888 aa, Artificial Sequence
  derived and/or modified sequence
MARRSSFQSCQIISLFTFAVGVNICLGFTAHRIKRAEGWEEGPPTVLSDSPWTNISGSCKGRCFELQEAGPPDCRCDNLCKSYTSCCHDFDELCLKTARGWECTKDRCGEVRNEENACHCSEDCLARGDCCTNYQVVCKGESHWVDDDCEEIKAAECPAGFVRPPLIIFSVDGFRASYMKKGSKVMPNIEKLRSCGTHSPYMRPVYPTKTFPNLYTLATGLYPESHGIVGNSMYDPVFDATFHLRGREKFNHRWWGGQPLWITATKQGVKAGTFFWSVVIPHERRILTILQWLTLPDHERPSVYAFYSEQPDFSGHKYGPFGPEMTNPLREIDKIVGQLMDGLKQLKLHRCVNVIFVGDHGMEDVTCDRTEFLSNYLTNVDDITLVPGTLGRIRSKFSNNAKYDPKAIIANLTCKKPDQHFKPYLKQHLPKRLHYANNRRIEDIHLLVERRWHVARKPLDVYKKPSGKCFFQGDHGFDNKVNSMQTVFVGYGSTFKYKTKVPPFENIELYNVMCDLLGLKPAPNNGTHGSLNHLLRTNTFRPTMPEEVTRPNYPGIMYLQSDFDLGCTCDDKVEPKNKLDELNKRLHTKGSTEAETRKFRGSRNENKENINGNFEPRKERHLLYGRPAVLYRTRYDILYHTDFESGYSEIFLMPLWTSYTVSKQAEVSSVPDHLTSCVRPDVRVSPSFSQNCLAYKNDKQMSYGFLFPPYLSSSPEAKYDAFLVTNMVPMYPAFKRVWNYFQRVLVKKYASERNGVNVISGPIFDYDYDGLHDTEDKIKQYVEGSSIPVPTHYYSIITSCLDFTQPADKCDGPLSVSSFILPHRPDNEESCNSSEDESKWVEELMKMHTARVRDIEHLTSLDFFRKTSRSYPEILTLKTYLHTYESEI

SEQ ID NO: 48728 - DNA, 2667 bp, Artificial Sequence
  derived and/or modified sequence
atggctcgccgctcttccttccagtcctgccagattataagcttgtttaccttcgccgttggggtcaacatttgcctgggtttcaccgcacaccgaatcaaacgagccgagggatgggaggaagggccgccaaccgtgctgtcagacagtccttggactaacatcagtggttcctgcaagggcaggtgttttgaattgcaggaagcagggccccccgactgtagatgtgacaacttgtgtaagtcttatacatcttgttgtcacgacttcgacgaactctgtcttaagactgcccgcggctgggagtgtaccaaggaccgttgtggtgaggtgagaaacgaagagaacgcctgccattgttctgaagactgtttagcccgcggggattgctgtactaactaccaggttgtttgtaaaggagaatcccactgggtggacgacgactgcgaggaaatcaaggccgccgaatgtcccgcagggttcgtgcgtccacctctcataattttttcggttgatggcttccgcgctagctacatgaaaaaagggagcaaggtgatgccaaatattgagaagttaaggagctgcgggactcattccccctatatgcggcccgtataccctaccaagacctttccaaacctctatacccttgcaactggactgtatcccgagtcccacggaatagttggtaattctatgtacgaccctgtgtttgatgctacatttcacctccgcgggcgagagaaattcaatcatcggtggtgggggggacagcctttgtggataactgcaaccaagcagggcgtgaaagcaggcacttttttctggagtgtggttataccgcatgagagaaggatcctgaccatactgcagtggctcacacttcccgaccacgagcgcccatcagtgtacgcattctacagtgagcagcctgacttttccggccacaaatatggacctttcggccccgaaatgacgaaccccctgagagaaatcgataagattgtgggtcagctgatggatggtctcaagcagctgaagctgcataggtgtgtcaacgtgattttcgtgggggatcatggcatggaagacgttacatgcgatcgcaccgaatttctttcgaactacctcaccaatgtcgatgacattaccctcgtgccaggcactctgggcagaattcgttctaagttttctaacaacgcgaagtatgaccctaaggctatcatagccaacctaacgtgcaagaaacctgatcagcatttcaaaccctatctcaagcagcacctccccaaacggcttcactacgccaacaacaggcgaatcgaggacatccacttactggtcgagaggcgctggcacgttgctcggaaacctctggacgtgtacaaaaaaccgtcaggaaagtgtttctttcagggagatcacggtttcgacaataaggtaaactctatgcagactgtctttgtgggttacggaagtacttttaaatacaagacaaaggtgcctccatttgagaatatcgaattatataatgtgatgtgcgacctgctcgggttaaagccagcaccgaacaacggtactcatggttcactgaatcacttactccggactaatacgtttaggcccaccatgcctgaggaggtgacgaggccaaactatccagggatcatgtacctgcaatcagattttgacctcggctgcacctgtgatgataaagtggaaccgaagaacaaacttgacgagctgaataaacgcctccacacaaagggatcaacagaggcagaaactaggaagttccgtggctctaggaacgaaaacaaggaaaacataaatggaaacttcgagcccaggaaagaaagacacctgctttacggtcggccagccgtgctgtaccggaccagatatgacattctgtaccacactgacttcgagagtggctattccgagatctttctcatgccactgtggacctcttacacggttagcaagcaggcagaggtctctagcgtgcccgaccacctgaccagctgcgtgcgccccgatgtgcgcgttagtccttcattctcacaaaactgtctcgcatacaaaaacgacaaacagatgtcttacgggttcctgttccccccctacctgtcatcttccccagaggcgaagtatgatgccttcctggtgaccaacatggtccccatgtaccctgctttcaagcgagtctggaactacttccagagagtgctggttaagaaatacgcatcagagaggaatggcgtgaacgtcatttccgggcccatattcgactatgactatgacggtctccacgacacggaggataagattaagcagtatgtggaaggctcctcaatacccgtcccaacccattattattccattataacaagctgccttgatttcacccagccagcggataagtgtgatgggcctttgagtgtgagctctttcatcctaccccatagaccggacaacgaggagtcttgtaattcatcagaagacgagtctaagtgggtggaggaactgatgaaaatgcatacagctagggtaagagacatcgagcatctgacctcactggatttctttcggaaaacgtcacggtcatacccagagatactgactttgaaaacctatttacacacgtacgaatccgaaatctag

SEQ ID NO: 48729 - DNA, 2667 bp, Artificial Sequence
  derived and/or modified sequence
atggcccggcgcagcagcttccagagctgccagatcatcagcctcttcacctttgctgtgggcgtgaacatctgcctgggcttcaccgcccaccgcatcaagagagctgagggctgggaggagggccccccaacagtgctgagtgacagcccctggaccaacatcagcggcagctgcaagggccgctgctttgagctgcaggaggccggccccccagactgccgctgtgacaacctgtgcaagagctacaccagctgctgccacgactttgatgagctgtgcctgaagacagcccggggctgggagtgcaccaaggacagatgtggggaggtgagaaatgaagaaaatgcctgccactgcagcgaggactgcctggcccggggggactgctgcaccaactaccaggtggtgtgcaagggggagagccactgggtggatgatgactgtgaggagatcaaggctgctgagtgcccagctggctttgtgcggcccccactcatcatcttctctgtggatggcttccgggccagctacatgaagaagggcagcaaggtgatgcccaacatcgagaagctgcggagctgtggcacccacagcccctacatgaggcctgtgtaccccaccaagaccttccccaacctgtacaccctggccaccggcctgtacccagagagccacggcatcgtgggcaacagcatgtatgaccctgtgtttgatgccaccttccacctgcggggccgggagaagttcaaccaccgctggtggggcggccagcccctgtggatcacagccaccaagcagggcgtgaaggccggcaccttcttctggagcgtggtgatcccccatgagcggcgcatcctgaccatcctgcagtggctgaccctgcctgaccacgagcggcccagcgtgtatgccttctacagcgagcagcctgacttcagcggccacaagtatggcccctttggacctgagatgaccaaccccctgcgggagattgacaagatcgtgggccagctgatggatggcctgaagcagctgaagctgcaccgctgtgtgaatgtcatctttgtgggggaccacggcatggaggatgtgacctgtgacagaacagagttcctgagcaactacctgaccaacgtggatgacatcaccctggtgcccggcaccctgggccgcatccgcagcaagttcagcaacaatgccaagtatgaccccaaggccatcatcgccaacctgacctgcaagaagccagaccagcacttcaagccctacctgaagcagcacctgcccaagaggctgcactacgccaacaacagaagaattgaggacatccacctgctggtggagcggcgctggcacgtggccaggaagcccctggatgtgtacaagaagcccagcggcaagtgcttcttccagggcgaccacggctttgacaacaaggtgaacagcatgcagacagtgtttgtgggctacggcagcaccttcaagtacaagaccaaggtgcccccatttgaaaatattgagctgtacaacgtgatgtgtgacctgctgggcctgaagccagcccccaacaacggcacccacggcagcctgaaccacctgctgcggaccaacaccttccggcccaccatgcctgaggaggtgacccggcccaactacccaggcatcatgtacctgcagagcgactttgacctgggctgcacctgtgatgacaaggtggagcccaagaacaagctggatgagctgaacaagaggctgcacaccaagggcagcacagaggccgagaccaggaagttccggggcagcagaaatgaaaacaaggagaacatcaatggaaactttgagcccaggaaggagcggcacctgctgtatggccggcctgctgtgctgtaccgcaccaggtatgacatcctgtaccacacagactttgaaagtggctacagcgagatcttcctgatgcccctgtggaccagctacacagtgtccaagcaggccgaggtgtcctctgtgcctgaccacctgaccagctgtgtgcggccagatgtgcgggtgagccccagcttcagccagaactgcctggcctacaagaatgacaagcagatgtcctatggcttcctgttccccccctacctgagcagcagccctgaggccaagtatgatgccttcctggtgaccaacatggtgcccatgtacccagccttcaagagggtgtggaactacttccagagggtgctggtgaagaagtatgccagcgagagaaatggagtgaatgtcatcagcggccccatctttgattatgactatgatggcctgcatgacacagaggacaagatcaagcagtatgtggagggcagcagcatccctgtgcccacccactactacagcatcatcaccagctgcctggacttcacccagcctgctgacaagtgtgatggccccctgtctgtgagcagcttcatcctgccccacaggccagacaatgaggagagctgcaacagcagtgaagatgagagcaagtgggtggaggagctgatgaagatgcacacagcccgggtgcgggacatcgagcacctgaccagcctggacttcttcaggaagaccagccgcagctacccagagatcctgaccctgaagacctacctgcacacctatgagagcgagatctag

SEQ ID NO: 48730 - DNA, 2667 bp, Artificial Sequence
  derived and/or modified sequence
atggcccggcggagcagcttccagagctgccagatcatcagcctgttcacatttgctgttggggtgaatatatgccttggatttaccgcccaccgcatcaagagggctgagggatgggaggagggacccccaacggtcctctcagactcaccttggaccaacatcagtggatcctgtaagggccgctgctttgagctgcaagaggccggtcctccagattgccgctgcgataacctgtgtaaatcctacacaagttgttgtcatgactttgatgaactgtgcctgaaaactgccagaggctgggagtgcacaaaggaccggtgtggggaagtgaggaacgaggagaatgcgtgccactgttccgaagattgtttagcccgcggcgattgttgtactaattatcaggttgtctgtaaaggcgagtctcattgggtagatgatgactgtgaggagatcaaagccgcagaatgccccgcgggcttcgtccgcccacctcttattattttctcggtagatggattcagagcttcctacatgaagaaagggtccaaagtcatgccgaatattgagaagctgcggagttgcggaacgcattctccctacatgcgccccgtgtaccctacaaagacctttcccaacctgtacacccttgccaccggactttacccggaaagtcatggaatagtgggcaactcgatgtacgatcccgtcttcgatgccacctttcacctaagaggccgcgagaagttcaatcatcgctggtggggcggacaacctctctggattaccgccactaaacagggagtgaaggcaggcacattcttctggagcgtggtcattccacatgagcgccggattctgacgattttgcagtggttgaccctccccgaccacgagagaccttcagtgtacgctttttattcagaacagcctgactttagtgggcacaagtacgggccctttggacctgagatgactaaccctcttcgggagatcgataagatagttggtcagctcatggatggtctgaaacagttgaagctacaccgctgcgtgaatgtcattttcgtgggcgatcatggtatggaagatgtgacttgtgaccgaaccgagttcctctctaactatctgacaaatgtcgacgacattactttggtcccaggaaccctgggcagaatccgatccaaatttagcaacaatgctaaatacgatccaaaagccattatcgccaacctgacttgtaagaaacctgaccagcacttcaagccctacctaaaacagcatttgccaaagcgactccattatgccaataataggcggattgaggatattcatttactggtggaacgcagatggcacgtggccagaaagccgctggatgtatacaagaagccctctggcaagtgcttcttccagggagaccacgggtttgacaacaaggtgaacagcatgcagacagtgttcgtggggtatggtagtaccttcaaatacaaaacgaaggttcccccttttgagaacatcgagctctataacgtgatgtgcgatctgctgggtcttaagcctgctcctaataacgggacacacgggtctctaaaccatctgttgcgtaccaatacctttcgacctacgatgcccgaggaagtgacccgcccaaactatccagggatcatgtatctgcagagcgattttgacttggggtgtacctgcgatgacaaggtcgagccaaaaaataagctggatgaactgaataagaggctgcacacaaaagggtccaccgaagcagagaccaggaagtttaggggatcgcggaacgaaaataaggaaaacataaatgggaactttgagccacgtaaagagcgacacttactgtacgggcgcccagccgtgctataccggaccagatatgatatcctgtaccacaccgactttgagagcggctactctgagatttttcttatgcctctatggacttcatataccgtgagcaagcaggcggaagtgagcagtgtccccgaccatctgacatcatgcgtgcgacccgatgtgcgagtaagtcctagtttctcgcagaattgtcttgcatacaagaacgataaacagatgtcatatggcttcctgttccccccatacttgagttcgtcacccgaggccaagtatgatgcctttctggtgacaaacatggtcccgatgtatccagcctttaaaagagtgtggaactacttccagagggttctggtgaagaagtatgccagcgaaaggaatggggtaaatgtgatcagtggccccatctttgattacgattacgacggtttgcatgacacagaggacaaaataaagcagtacgtggagggttctagcattcctgtacctacgcattattactccatcatcacaagctgcctggatttcacccagcccgccgacaaatgcgacggaccacttagtgtgtcctcgtttatactcccccatagacccgacaatgaagaaagctgtaactcctccgaagacgaatctaaatgggtggaggagctaatgaagatgcacaccgcccgagtgagagacatcgaacacctaacttctctggatttttttcgaaaaacatctcgaagctaccccgagatcctcaccctgaaaacctatctccacacctatgaatcagaaatatag

SEQ ID NO: 48731 - DNA, 2667 bp, Artificial Sequence
  derived and/or modified sequence
atggctcgacgaagtagtttccagagctgccaaatcattagcctgttcacattcgcagtgggggtcaacatttgcctgggtttcaccgctcatagaattaagagagccgaaggttgggaggagggccctccaacggtgctgagcgattcgccttggactaacatttccgggagttgcaaggggcgatgcttcgaactgcaggaagctgggcctcccgactgtagatgtgacaatctttgcaagtcatatacctcttgttgtcatgattttgatgaactttgtctcaagacagctcggggatgggagtgtactaaggataggtgcggagaggtgcgcaatgaggagaatgcttgtcactgttcagaggattgcctcgcccgaggcgattgttgtaccaattaccaggttgtctgtaagggtgagagccactgggtggacgacgattgcgaggagatcaaagcggctgagtgtcctgctggtttcgtcagacctcccctgattatattctcagtggacggattcagagcatcgtacatgaaaaagggatccaaggtcatgcctaatatagaaaaactgaggtcatgtggcacccattcaccatacatgcggccagtttatcccactaaaaccttcccgaacctctatacactggctaccggattgtatccggaatcccatgggatagtgggtaactcaatgtacgatcctgtttttgatgctacgttccacctgcgcggtagggaaaagtttaatcacagatggtggggtggccagcctctgtggatcacagctaccaagcaaggagttaaagccggaacgtttttctggtctgtggtaattcctcacgagagaaggatccttacgatcttgcaatggctcacacttccggaccatgagcggccatctgtctatgcgttctactccgagcagccggatttctccggccacaagtatggaccttttgggcctgaaatgaccaacccccttcgggagatcgacaagatcgttgggcaattgatggacggcctgaagcagctgaagctccataggtgcgttaacgttatttttgtcggcgatcacggcatggaggacgtcacatgcgaccgtaccgaatttctgtcaaactaccttacaaacgtagatgacatcacgctcgtacctggcacactgggcagaatcagaagtaagttcagcaataacgccaagtacgatcctaaagccattattgcgaatctaacgtgcaagaagcctgatcaacatttcaagccctacttaaaacagcatctccctaaaagattgcactacgccaacaatcggaggatagaggacatccacttactggttgagcgcagatggcatgtcgccagaaaaccactggacgtctacaaaaaacccagtggaaagtgttttttccaaggcgaccacgggtttgataataaggtgaatagtatgcagacggtctttgtgggatacgggagcacctttaaatacaagactaaggtgcctccgtttgagaacatcgagttatacaacgtcatgtgtgatttgctcggcctcaagccagctccaaacaacggcacgcacggatccctcaatcacttacttagaacaaacaccttccgccctactatgccagaggaggtgactagaccaaactaccccggtataatgtatctgcagtcagatttcgatctcggctgtacatgcgatgacaaggtggagccaaaaaacaagctcgacgagctgaataaaagactgcacacgaaaggtagcaccgaagcagaaacgcggaaattccgtgggagccgtaacgagaacaaagagaacattaatggaaattttgaacccaggaaggaacggcacctactttatggccgtccggctgtcctctatcgcacaaggtatgatatcttgtaccacacagacttcgagtccggatactccgaaattttcctcatgccgttatggacctcgtacactgtgtctaaacaggctgaggtgtccagcgtccccgaccatcttacctcatgcgtgcgacccgatgtgcgggtcagtccaagcttttctcaaaactgtttagcctacaaaaacgataagcaaatgtcctacggattccttttcccaccatacctcagcagctcccccgaggcaaaatacgacgcttttttggttactaatatggtcccgatgtaccccgcatttaaacgtgtctggaattactttcagcgagttctggtcaagaagtacgctagcgagcgcaacggtgttaacgttatcagcgggcctatcttcgattacgactatgatggacttcacgataccgaggacaaaataaaacagtatgttgagggcagcagcataccagtgcccacacattactacagcatcattacatcgtgtctcgattttacccagccagctgacaaatgcgacgggccactgtcggtatcttcctttattttgcctcatcggccagacaacgaggagagctgtaactcctctgaggacgagagcaagtgggtcgaagagctaatgaagatgcataccgcaagggtccgcgatattgaacacctgaccagcctggatttcttccggaagacctctcggtcctacccagagattttaactctaaagacatacctgcacacctatgaatccgaaatctag

SEQ ID NO: 48732 - DNA, 2667 bp, Artificial Sequence
  derived and/or modified sequence
atggccagaagaagcagcttccagagctgccagatcatcagcctgttcaccttcgccgtgggcgtgaacatctgcctgggcttcaccgcccacagaatcaagagagccgagggctgggaggagggcccccccaccgtgctgagcgacagcccctggaccaacatcagcggcagctgcaagggcagatgcttcgagctgcaggaggccggcccccccgactgcagatgcgacaacctgtgcaagagctacaccagctgctgccacgacttcgacgagctgtgcctgaagaccgccagaggctgggagtgcaccaaggacagatgcggcgaggtgagaaacgaggagaacgcctgccactgcagcgaggactgcctggccagaggcgactgctgcaccaactaccaggtggtgtgcaagggcgagagccactgggtggacgacgactgcgaggagatcaaggccgccgagtgccccgccggcttcgtgagaccccccctgatcatcttcagcgtggacggcttcagagccagctacatgaagaagggcagcaaggtgatgcccaacatcgagaagctgagaagctgcggcacccacagcccctacatgagacccgtgtaccccaccaagaccttccccaacctgtacaccctggccaccggcctgtaccccgagagccacggcatcgtgggcaacagcatgtacgaccccgtgttcgacgccaccttccacctgagaggcagagagaagttcaaccacagatggtggggcggccagcccctgtggatcaccgccaccaagcagggcgtgaaggccggcaccttcttctggagcgtggtgatcccccacgagagaagaatcctgaccatcctgcagtggctgaccctgcccgaccacgagagacccagcgtgtacgccttctacagcgagcagcccgacttcagcggccacaagtacggccccttcggccccgagatgaccaaccccctgagagagatcgacaagatcgtgggccagctgatggacggcctgaagcagctgaagctgcacagatgcgtgaacgtgatcttcgtgggcgaccacggcatggaggacgtgacctgcgacagaaccgagttcctgagcaactacctgaccaacgtggacgacatcaccctggtgcccggcaccctgggcagaatcagaagcaagttcagcaacaacgccaagtacgaccccaaggccatcatcgccaacctgacctgcaagaagcccgaccagcacttcaagccctacctgaagcagcacctgcccaagagactgcactacgccaacaacagaagaatcgaggacatccacctgctggtggagagaagatggcacgtggccagaaagcccctggacgtgtacaagaagcccagcggcaagtgcttcttccagggcgaccacggcttcgacaacaaggtgaacagcatgcagaccgtgttcgtgggctacggcagcaccttcaagtacaagaccaaggtgccccccttcgagaacatcgagctgtacaacgtgatgtgcgacctgctgggcctgaagcccgcccccaacaacggcacccacggcagcctgaaccacctgctgagaaccaacaccttcagacccaccatgcccgaggaggtgaccagacccaactaccccggcatcatgtacctgcagagcgacttcgacctgggctgcacctgcgacgacaaggtggagcccaagaacaagctggacgagctgaacaagagactgcacaccaagggcagcaccgaggccgagaccagaaagttcagaggcagcagaaacgagaacaaggagaacatcaacggcaacttcgagcccagaaaggagagacacctgctgtacggcagacccgccgtgctgtacagaaccagatacgacatcctgtaccacaccgacttcgagagcggctacagcgagatcttcctgatgcccctgtggaccagctacaccgtgagcaagcaggccgaggtgagcagcgtgcccgaccacctgaccagctgcgtgagacccgacgtgagagtgagccccagcttcagccagaactgcctggcctacaagaacgacaagcagatgagctacggcttcctgttccccccctacctgagcagcagccccgaggccaagtacgacgccttcctggtgaccaacatggtgcccatgtaccccgccttcaagagagtgtggaactacttccagagagtgctggtgaagaagtacgccagcgagagaaacggcgtgaacgtgatcagcggccccatcttcgactacgactacgacggcctgcacgacaccgaggacaagatcaagcagtacgtggagggcagcagcatccccgtgcccacccactactacagcatcatcaccagctgcctggacttcacccagcccgccgacaagtgcgacggccccctgagcgtgagcagcttcatcctgccccacagacccgacaacgaggagagctgcaacagcagcgaggacgagagcaagtgggtggaggagctgatgaagatgcacaccgccagagtgagagacatcgagcacctgaccagcctggacttcttcagaaagaccagcagaagctaccccgagatcctgaccctgaagacctacctgcacacctacgagagcgagatctag

SEQ ID NO: 48733 - DNA, 2667 bp, Artificial Sequence
  derived and/or modified sequence
atggcaaggaggagctcgttccagtcgtgtcagataatatccctgttcacttttgccgttggagtcaatatctgcttaggattcactgcacatcgaattaagagagcagaaggatgggaggaaggtcctcctacagtgctatcagactccccctggaccaacatctccggatcttgcaagggcaggtgctttgaacttcaagaggctggacctcctgattgtcgctgtgacaacttgtgtaagagctataccagttgctgccatgactttgatgagctgtgtttgaagacagcccgtggctgggagtgtactaaggacagatgtggagaagtcagaaatgaagaaaatgcctgtcactgctcagaggactgcttggccaggggagactgctgtaccaattaccaagtggtttgcaaaggagagtcgcattgggttgatgatgactgtgaggaaataaaggccgcagaatgccctgcagggtttgttcgccctccattaatcatcttctccgtggatggcttccgtgcatcatacatgaagaaaggcagcaaagtcatgcctaatattgaaaaactaaggtcttgtggcacacactctccctacatgaggccggtgtacccaactaaaacctttcctaacttatacactttggccactgggctatatccagaatcacatggaattgttggcaattcaatgtatgatcctgtatttgatgccacttttcatctgcgagggcgagagaaatttaatcatagatggtggggaggtcaaccgctatggattacagccaccaagcaaggggtgaaagctggaacattcttttggtctgttgtcatccctcacgagcggagaatattaaccatattgcagtggctcaccctgccagatcatgagaggccttcggtctatgccttctattctgagcaacctgatttctctggacacaaatatggccctttcggccctgagatgacaaatcctctgagggaaatcgacaaaattgtggggcaattaatggatggactgaaacaactaaaactgcatcggtgtgtcaacgtcatctttgtcggagaccatggaatggaagatgtcacatgtgatagaactgagttcttgagtaattacctaactaatgtggatgatattactttagtgcctggaactctaggaagaattcgatccaaatttagcaacaatgctaaatatgaccccaaagccattattgccaatctcacgtgtaaaaaaccagatcagcactttaagccttacttgaaacagcaccttcccaaacgtttgcactatgccaacaacagaagaattgaggatatccatttattggtggaacgcagatggcatgttgcaaggaaacctttggatgtttataagaaaccatcaggaaaatgctttttccagggagaccacggatttgataacaaggtcaacagcatgcagactgtttttgtaggttatggctcaacatttaagtacaagactaaagtgcctccatttgaaaacattgaactttacaatgttatgtgtgatctcctgggattgaagccagctcctaataatgggacccatggaagtttgaatcatctcctgcgcactaataccttcaggccaaccatgccagaggaagttaccagacccaattatccagggattatgtaccttcagtctgattttgacctgggctgcacttgtgatgataaggtagagccaaagaacaagttggatgaactcaacaaacggcttcatacaaaagggtctacagaagctgaaaccaggaaattcagaggcagcagaaatgaaaacaaggaaaacattaatggaaattttgaacctagaaaagagagacacctcctctatgggcgacctgcagtgctttatcggactagatatgatatcttatatcacactgactttgaaagtggttatagtgaaatattcctaatgccactctggacatcatatactgtttccaaacaggctgaggtttccagcgttcctgaccatctgaccagttgcgtccggcctgatgtccgtgtttctccgagtttcagtcagaactgtttggcctacaaaaatgataagcagatgtcctacggattcctctttcctccttatctgagctcttcaccagaggctaaatatgatgcattccttgtaaccaatatggttccaatgtatcctgctttcaaacgggtctggaattatttccaaagggtattggtgaagaaatatgcttcggaaagaaatggagttaacgtgataagtggaccaatcttcgactatgactatgatggcttacatgacacagaagacaaaataaaacagtacgtggaaggcagttccattcctgttccaactcactactacagcatcatcaccagctgtctggatttcactcagcctgccgacaagtgtgacggccctctctctgtgtcctccttcatcctgcctcaccggcctgacaacgaggagagctgcaatagctcagaggacgaatcaaaatgggtagaagaactcatgaagatgcacacagctagggtgcgtgacattgaacatctcaccagcctggacttcttccgaaagaccagccgcagctacccagaaatcctgacactcaagacatacctgcatacatatgagagcgagatttaa

SEQ ID NO: 48734 - protein, 405 aa, Artificial Sequence
  derived and/or modified sequence
MRELKRTLDAKGHGVLEMPSGTGKTVSLLALIMAYQRAYPLEVTKLIYCSRTVPEIEKVIEELRKLLNFYEKQEGEKLPFLGLALSSRKNLCIHPEVTPLRFGKDVDGKCHSLTASYVRAQYQHDTSLPHCRFYEEFDAHGREVPLPAGIYNLDDLKALGRRQGWCPYFLARYSILHANVVVYSYHYLLDPKIADLVSKELARKAVVVFDEAHNIDNVCIDSMSVNLTRRTLDRCQGNLETLQKTVLRIKETDEQRLRDEYRRLVEGLREASAARETDAHLANPVLPDEVLQEAVPGSIRTAEHFLGFLRRLLEYVKWRLRVQHVVQESPPAFLSGLAQRVCIQRKPLRFCAERLRSLLHTLEITDLADFSPLTLLANFATLVSTYAKGQAQHCGSSRNQKRSHP

SEQ ID NO: 48735 - DNA, 1218 bp, Artificial Sequence
  derived and/or modified sequence
atgagagagctgaagagaaccctggacgccaagggccacggcgtgctggagatgcccagcggcaccggcaagaccgtgagcctgctggccctgatcatggcctaccagagagcctaccccctggaggtgaccaagctgatctactgcagcagaaccgtgcccgagatcgagaaggtgatcgaggagctgagaaagctgctgaacttctacgagaagcaggagggcgagaagctgcccttcctgggcctggccctgagcagcagaaagaacctgtgcatccaccccgaggtgacccccctgagattcggcaaggacgtggacggcaagtgccacagcctgaccgccagctacgtgagagcccagtaccagcacgacaccagcctgccccactgcagattctacgaggagttcgacgcccacggcagagaggtgcccctgcccgccggcatctacaacctggacgacctgaaggccctgggcagaagacagggctggtgcccctacttcctggccagatacagcatcctgcacgccaacgtggtggtgtacagctaccactacctgctggaccccaagatcgccgacctggtgagcaaggagctggccagaaaggccgtggtggtgttcgacgaggcccacaacatcgacaacgtgtgcatcgacagcatgagcgtgaacctgaccagaagaaccctggacagatgccagggcaacctggagaccctgcagaagaccgtgctgagaatcaaggagaccgacgagcagagactgagagacgagtacagaagactggtggagggcctgagagaggccagcgccgccagagagaccgacgcccacctggccaaccccgtgctgcccgacgaggtgctgcaggaggccgtgcccggcagcatcagaaccgccgagcacttcctgggcttcctgagaagactgctggagtacgtgaagtggagactgagagtgcagcacgtggtgcaggagagcccccccgccttcctgagcggcctggcccagagagtgtgcatccagagaaagcccctgagattctgcgccgagagactgagaagcctgctgcacaccctggagatcaccgacctggccgacttcagccccctgaccctgctggccaacttcgccaccctggtgagcacctacgccaagggccaggcccagcactgcggcagcagcagaaaccagaagagaagccacccctag

SEQ ID NO: 48736 - DNA, 1218 bp, Artificial Sequence
  derived and/or modified sequence
atgcgcgaactgaagcggaccctggacgccaaaggacacggggtactcgagatgccttctgggacggggaagacagtcagcctgctcgcgctgatcatggcctaccagagggcttacccacttgaggtgacaaagctgatctactgcagtcgcacagttcccgagatcgaaaaggtgatcgaggaattaaggaaactgctgaatttctacgagaagcaggagggggagaagctccctttcctcggtcttgccctcagttctcggaagaatctgtgcattcaccccgaagtcactcctctgagatttggcaaagatgtggacggaaaatgccacagcctgaccgcctcctatgtccgagcgcaatatcagcacgacacaagcctgccccattgcagattttatgaagagtttgatgcacacggccgagaggtccctctccccgccggcatctacaatctcgacgacttgaaagctttggggagacgccaggggtggtgcccttatttcctcgcccgttacagcattttacacgcgaatgtagtggtctacagctaccattacctgctggatcccaaaatcgctgatctggtttcaaaagagctggctcgaaaagccgtggtggtgttcgatgaggcgcataatatcgataacgtttgtatcgattccatgtccgtcaacctgacacgaagaacactcgaccgctgtcagggcaatctcgagactctgcagaagacagtgctcagaatcaaagaaacggacgaacagcgactgcgggatgaataccgccgactagtcgaaggcctgagagaggcttccgcggcccgcgaaactgatgctcatttggctaatcccgtgctgccggatgaggtgttacaggaggccgtccctggctcaatacgaaccgcagagcatttcctcggattcctccgccgtctgctggagtatgtcaagtggcgcttacgagtccaacacgtcgttcaagagagccccccagccttcctgagcggcctcgcccagagggtgtgcattcagcggaagccgctgcgattttgtgccgagaggctgcggagtttactccacaccctggaaataacagacctggcggacttttcgcctcttaccctgttggctaatttcgccactctggtatctacctacgctaagggtcaggcgcagcactgtggtagttccagaaatcagaaacgatcgcatccatag

SEQ ID NO: 48737 - DNA, 745 bp, Artificial Sequence
  derived and/or modified sequence
acagtccggccggcgccatgaagctcaacgtggacgggctcctggtctacttcccgtacgactacatctaccccgagcagttctcctacatgcgggagctcaaacgcacgctggacgccaagggtcatggagtcctggagatgccctcaggcaccgggaagacagtatccctgttggccctgatcatggcataccagagagcatatccgctggaggtgaccaaactcatctactgctcaagaactgtgccagagattgagaaggtgattgaagagcttcgaaagttgctcaacttctatgagaagcaggagggcgagaagctgccgtttctgggactggctctgagctcccgcaaaaacttgtgtattcaccctgagacaacgtctgcatcgactccatgagcgtcaacctcacccgccggacccttgaccggtgccagggcaacctggagaccctgcagaagacggtgctcaggatcaaagagacagacgagcagcgcctgcgggacgagtaccggcgtctggtggaggggctgcgggaggccagcgccgcccgggagacggacgcccacctggccaaccccgtgctgcccgacgaagtgctgcaggaggcagtgcctggctccatccgcacggccgagcatttcctgggcttcctgaggcggctgctggagtacgtgaagtggcggctgcgtgtgcagcatgtggtgcaggagagcccgcccgccttcctgagcggcctggcc

SEQ ID NO: 48738 - DNA, 1218 bp, Artificial Sequence
  derived and/or modified sequence
atgagggagctgaagaggaccctggatgccaagggccatggagtgctggagatgcccagcggcaccgggaagacagtgtccctgctggccctgatcatggcctaccagagggcctaccccctggaggtgaccaagctgatctactgcagcaggacagtgcctgagattgagaaggtgattgaggagctgaggaagctgctgaacttctatgagaagcaggagggggagaagctgcccttcctgggcctggccctgagcagcaggaagaacctgtgcatccaccctgaggtgacccccctgcgctttgggaaggatgtggatggcaagtgccacagcctgacagccagctatgtgcgggcccagtaccagcacgacaccagcctgccccactgccgcttctatgaggagtttgatgcccacggccgggaggtgcccctgcctgctggcatctacaacctggatgacctgaaggccctgggccggcggcagggctggtgcccctacttcctggcccgctacagcatcctgcacgccaacgtggtggtgtacagctaccactacctgctggaccccaagattgctgacctggtgtccaaggagctggccaggaaggctgtggtggtgtttgatgaggcccacaacatcgacaacgtgtgcatcgacagcatgtctgtgaacctgaccaggaggaccctggaccgctgccagggcaacctggagaccctgcagaagacagtgctgcgcatcaaggagacagatgagcagaggctgagagatgagtaccgccgcctggtggagggcctgcgggaggccagcgctgcccgggagacagatgcccacctggccaaccctgtgctgcctgatgaggtgctgcaggaggccgtgcccggcagcatcagaacagctgagcacttcctgggcttcctgcggcggctgctggagtatgtgaagtggaggctgcgggtgcagcacgtggtgcaggagagccccccagccttcctgagcggcctggcccagagggtgtgcatccagaggaagcccctgcgcttctgtgccgagcggctgcggagcctgctgcacaccctggagatcacagacctggccgacttcagccccctgaccctgctggccaactttgccaccctggtgtccacctacgccaagggccaggcccagcactgcggcagcagcaggaaccagaagaggagccacccctag

SEQ ID NO: 48739 - DNA, 1218 bp, Artificial Sequence
  derived and/or modified sequence
atgcgggagctgaagcggaccctggacgccaagggccacggcgtgttagaaatgccttcaggcaccggaaagacagtaagtctgttggcactgataatggcctaccaaagggcctacccactggaggtgaccaaacttatttactgctccaggacagtgccagagattgagaaggttatagaagagttgaggaaattgttgaacttttacgaaaagcaggagggcgagaagctccctttcttggggctggcattgtctagcagaaaaaacctctgtatccaccccgaggtcacaccgctgcgctttggaaaagacgtggatgggaagtgccactctctgacagcctcctatgttagagctcaataccagcatgacacatctctcccccattgccgattttatgaggaattcgacgctcatggacgcgaagtccccctgccagctggaatatacaaccttgatgacctcaaggcactcggaaggcggcagggttggtgcccttactttctggcccgatactctatcctgcatgccaatgttgtcgtctactcttaccattatctccttgacccaaaaatcgctgatttggtctctaaggagctggctcggaaggcagtagttgtgttcgacgaagcccacaacatcgataacgtgtgcattgattccatgtcggtgaatcttacccgaaggacactggacaggtgtcaggggaacttggagacgttacagaaaacagtcttaagaatcaaggaaaccgacgagcagaggttgcgagacgagtacaggaggctggtggagggtctccgcgaagcaagcgcggcccgagaaaccgacgcgcatctagccaatcctgtattacccgatgaagttctgcaagaggccgtgcccggatccattcgcaccgccgagcacttcctcggcttcttaagacggctcttggagtacgttaagtggcgcctacgggttcagcatgtggtacaggagtcacctcccgcctttttgagcggactggcacagcgggtctgtatccaaagaaagcctttaaggttctgtgcagagcgcctgcgctccttgctgcatacattggaaatcaccgacttggccgactttagtccgcttaccctcctagcaaattttgccactttggtgagcacctacgccaaagggcaggcccagcactgtggttcaagtcgaaatcagaagcgctcacatccatag

SEQ ID NO: 48740 - DNA, 1218 bp, Artificial Sequence
  derived and/or modified sequence
atgcgcgaactgaaaagaactctagacgccaaggggcacggagtgctagagatgccatcagggaccggcaaaaccgtgagccttctagccttaatcatggcgtatcagcgggcttatcccctagaggtgactaaactgatttactgctctcgcactgtcccagagattgagaaagtgatcgaggagctgcgaaagctcttaaatttctacgagaaacaagagggcgaaaagttgcccttcctgggtctggccctgagtagtaggaagaacctgtgtattcaccctgaggtgaccccactgcggtttggcaaggacgtcgatggaaaatgccactcccttactgcatcctacgtcagagcacagtaccaacacgacacctccctcccacattgccggttttacgaggagtttgacgcccacggacgggaggtgcccctgcctgcgggaatctacaaccttgacgatctgaaggctctcggcagacggcagggttggtgcccttacttcttggccaggtattccattcttcatgctaatgtcgtggtgtattcctatcattaccttttggatcctaaaattgctgacctggtttcaaaggagctagccaggaaggctgtggttgtgttcgacgaagcacataatatcgacaacgtgtgtatagactcaatgtccgtcaacctcacccgcaggacacttgataggtgccagggcaatttggagactctgcagaagacagtgttacgcattaaagaaacagacgagcagagattgagggatgagtacagaagacttgttgaaggactgagggaagcctcagccgctagggagaccgatgcccatctcgctaacccagtgctgccagacgaggttctgcaggaggcagtgcccggatctatcagaactgctgaacactttcttggcttcctacgcagactgctcgaatatgtgaaatggagactccgggtgcagcatgttgtccaagaatcacctcccgcttttctgagtggcctagcacagcgcgtttgtatacagcgaaagccccttaggttttgtgctgagcgcttgcgaagcctgctccacaccctcgagatcactgatctcgcagatttttccccactgactcttctcgccaactttgccacgctagtgtccacttatgcaaaaggccaggcccagcactgtggctccagccggaaccagaagcgtagccatccatag

SEQ ID NO: 48741 - protein, 356 aa, Artificial Sequence
  derived and/or modified sequence
MIYTRFLKGSLKMANYTLAPEDEYDVLIEGELESDEAEQCDKYDAQALSAQLVPSLCSAVFVIGVLDNLLVVLILVKYKGLKRVENIYLLNLAVSNLCFLLTLPFWAHAGGDPMCKILIGLYFVGLYSETFFNCLLTVQRYLVFLHKGNFFSARRRVPCGIITSVLAWVTAILATLPEFVVYKPQMEDQKYKCAFSRTPFLPADETFWKHFLTLKMNISVLVLPLFIFTFLYVQMRKTLRFREQRYSLFKLVFAIMVVFLLMWAPYNIAFFLSTFKEHFSLSDCKSSYNLDKSVHITKLIATTHCCINPLLYAFLDGTFSKYLCRCFHLRSNTPLQPRGQSAQGTSREEPDHSTEV

SEQ ID NO: 48742 - protein, 344 aa, Artificial Sequence
  derived and/or modified sequence
MANYTLAPEDEYDVLIEGELESDEAEQCDKYDAQALSAQLVPSLCSAVFVIGVLDNLLVVLILVKYKGLKRVENIYLLNLAVSNLCFLLTLPFWAHAGGDPMCKILIGLYFVGLYSETFFNCLLTVQRYLVFLHKGNFFSARRRVPCGIITSVLAWVTAILATLPEFVVYKPQMEDQKYKCAFSRTPFLPADETFWKHFLTLKMNISVLVLPLFIFTFLYVQMRKTLRFREQRYSLFKLVFAIMVVFLLMWAPYNIAFFLSTFKEHFSLSDCKSSYNLDKSVHITKLIATTHCCINPLLYAFLDGTFSKYLCRCFHLRSNTPLQPRGQSAQGTSREEPDHSTEV

SEQ ID NO: 48743 - protein, 217 aa, Artificial Sequence
  derived and/or modified sequence
MANYTLAPEDEYDVLIEGELESDEAEQCDKYDAQALSAQLVPSLCSAVFVIGVLDNLLVVLILVKYKGLKRVENIYLLNLAVSNLCFLLTLPFWAHAGGDPMCKILIGLYFVGLYSETFFNCLLTVQRYLVFLHKGNFFSARRRVPCGIITSVLAWVTAILATLPEFVVYKPQMEDQKYKCAFSRTPFLPADETFWKHFLTLKMNISVLVLPLFIFT

SEQ ID NO: 48744 - DNA, 1071 bp, Artificial Sequence
  derived and/or modified sequence
atgatctacactagatttctcaaaggaagccttaaaatggcgaattacaccctggctccagaggacgagtacgatgtgcttatcgaaggagagctggagagcgacgaggcggagcaatgtgataagtacgacgcccaggcattgtcggctcagctggttccgagcctttgttcagccgtcttcgttataggagtgctggataatcttctagtggtgctcattctcgtgaaatataaggggctgaagagagtagaaaatatttacctgttaaacctagcagtgagcaatctctgttttttgctaactctgccattctgggcgcatgctggaggcgatcccatgtgtaagatccttattgggttatattttgtggggctgtattctgagacctttttcaattgcctgctaacagtgcagcgctatctggtgtttctacacaaaggaaattttttctcagctagaaggagagtgccctgtgggatcatcaccagcgtgctggcgtgggttaccgccatcttggccaccctgcccgagttcgtcgtgtacaaacctcagatggaagaccagaagtataaatgcgccttcagcaggacaccctttttgcctgcggacgagaccttttggaagcacttccttaccctcaagatgaatatcagtgtgctcgtgctgccgctctttatcttcacatttctctatgttcagatgcggaagacccttagatttagggaacagcgttactccctgttcaaactggtgtttgcaatcatggtggtttttctgctgatgtgggctccctataatatcgccttctttctttcaacatttaaagagcacttctccttgagcgattgcaagtcaagctataatctcgacaaatccgtgcacattaccaagttgatcgccactactcattgttgtataaatcctcttctctacgcctttctggatgggactttctctaaatacctgtgccggtgcttccatctgagaagcaacacaccactgcagcctcggggtcagagcgcacaggggacatctcgagaggagcctgaccacagcacggaggtgtag

SEQ ID NO: 48745 - DNA, 1071 bp, Artificial Sequence
  derived and/or modified sequence
atgatctacacccgcttcctgaagggcagcctgaagatggccaactacaccctggccccagaagatgaatatgatgtgctgattgaaggagagctggagagtgatgaagctgagcagtgtgacaagtatgatgcccaggccctgagcgcccagctggtgcccagcctgtgcagcgctgtgtttgtgattggagtgctggacaacctgctggtggtgctgatcctggtgaagtacaagggcctgaagagggtggagaacatctacctgctgaacctggccgtgagcaacctgtgcttcctgctgaccctgcccttctgggcccatgctggaggagaccccatgtgcaagatcctgattggcctgtactttgtgggcctgtacagcgagaccttcttcaactgcctgctgactgtgcagcgctacctggtgttcctgcacaagggcaacttcttcagcgccaggagaagagtgccctgtggcatcatcacctctgtgctggcctgggtgacagccatcctggccaccctgcctgagtttgtggtgtacaagccccagatggaggaccagaagtacaagtgtgccttcagcaggacccccttcctgcctgcagatgagaccttctggaagcacttcctgaccctgaagatgaacatctctgtgctggtgctgcccctcttcatcttcaccttcctgtatgtgcagatgaggaagaccctgcgcttccgggagcagcgctacagcctcttcaagctggtgtttgccatcatggtggtgttcctgctgatgtgggccccctacaacatcgccttcttcctgagcaccttcaaggagcacttcagcctgagtgactgcaagagcagctacaacctggacaagtctgtgcacatcaccaagctgattgccaccacccactgctgcatcaaccccctgctgtatgccttcctggatggcaccttcagcaagtacctgtgccgctgcttccacctgcggagcaacacccccctgcagccccggggccagagcgcccagggcaccagccgggaggagccagaccacagcacagaggtgtag

SEQ ID NO: 48746 - DNA, 1071 bp, Artificial Sequence
  derived and/or modified sequence
atgatctacacccggttcctgaagggcagcctgaagatggccaactacacgttagctcccgaagatgagtacgatgtgctcatcgagggggaattagaatcggatgaggcagagcagtgcgataaatacgacgcccaggcactgtcagcccagctggtaccaagcctgtgcagcgccgtgtttgtgattggcgttctggataatctcctggtcgtgttgatcctcgtgaagtacaaagggctgaagagagtggagaacatatacctgctgaacttggctgtgtcaaatctctgctttctgctcacactacccttctgggctcatgccggcggcgacccgatgtgcaagatcttgattggtctgtacttcgtcggcctgtatagcgagaccttcttcaactgtctgctgaccgtgcagaggtatctcgtgttcctgcacaagggtaatttctttagcgctcggagacgcgtgccttgcgggatcataacatcggtcctggcatgggtgaccgcaattttagccacgctccccgagttcgtggtctataagccccagatggaggaccaaaaatataagtgcgcgttcagtcgcaccccgttcctgccggcggatgagactttctggaagcacttcctcacactgaagatgaacataagtgtgctggtgttgcccttatttatatttacgtttctgtatgtgcagatgcgcaaaaccctcaggttccgagaacagagatactccctgtttaagctggtgttcgcaattatggtggtctttctcttgatgtgggccccatacaatattgctttttttcttagcacattcaaggaacatttctccctgtctgattgcaagtcatcctacaacctggacaaaagcgtacacattacgaagctcatcgcgacgactcactgctgcattaatcccctgttgtatgcgtttctagacggtaccttctcaaaatatctgtgcaggtgctttcacctccgttccaacactcctctccaacctcgcggtcagtctgcgcagggcactagtcgcgaagagcccgaccacagtactgaagtgtag

SEQ ID NO: 48747 - DNA, 1071 bp, Artificial Sequence
  derived and/or modified sequence
atgatttacacacgatttctgaagggcagcctgaagatggcaaattataccttggcccctgaagacgagtacgacgtgctgatcgaaggggagttggagtcagacgaggcggaacaatgtgacaagtatgacgctcaggcactcagcgcccaacttgtaccctcactgtgctcagcagtcttcgtgatcggcgtcctcgacaatttgctggtggtgttgatcttggtgaaatataagggtttgaaacgcgtcgaaaacatttatctgctgaacctggcggtatcgaatctgtgtttcctgctcactctcccattttgggcccacgccggaggagatccaatgtgcaagattttaataggtctctacttcgtggggctgtactccgagacatttttcaattgtctgcttactgtgcagaggtatctggtattcttacacaaaggtaattttttctctgctcgaaggagagtgccttgcggtatcatcacctccgtcctcgcatgggtaacagccatccttgctaccctcccagagttcgtggtttataagcctcagatggaagatcagaaatacaaatgcgctttcagccgcaccccttttttgccggctgatgagacattctggaaacacttcctcactctgaaaatgaacatttctgttttagtgctgcccctttttatctttacctttctgtatgtgcagatgaggaagactctccgtttccgagagcagagatattcactgtttaagttagtcttcgccatcatggttgttttcctcttaatgtgggccccatacaacatcgccttcttcctttccacctttaaggagcacttttccctctccgattgtaagtcatcttacaacctggacaagtctgttcacattacaaagctgatcgctactacccactgttgtatcaacccactgctttacgcattccttgacggcacctttagtaagtatctgtgtcgctgctttcacctgagatcaaacaccccactgcagcctcggggacagagtgcccagggtacatcccgtgaagagcctgaccattctaccgaggtatag

SEQ ID NO: 48748 - DNA, 1593 bp, Artificial Sequence
  derived and/or modified sequence
gagcatggtttcacttttgcaaacatttatttatacccttcgagagaaaaacgtctcagctgtcacaggaagctgcttcggggggtgagcaaactttttaaaatgcagaaattatgatctacacccgtttcttaaaaggcagtctgaagatggccaattacacgctggcaccagaggatgaatatgatgtcctcatagaaggtgaactggagagcgatgaggcagagcaatgtgacaagtatgacgcccaggcactctcagcccagctggtgccatcactctgctctgctgtgtttgtgatcggtgtcctggacaatctcctggttgtgcttatcctggtaaaatataaaggactcaaacgcgtggaaaatatctatcttctaaacttggcagtttctaacttgtgtttcttgcttaccctgcccttctgggctcatgctgggggcgatcccatgtgtaaaattctcattggactgtacttcgtgggcctgtacagtgagacatttttcaattgccttctgactgtgcaaaggtacctagtgtttttgcacaagggaaactttttctcagccaggaggagggtgccctgtggcatcattacaagtgtcctggcatgggtaacagccattctggccactttgcctgaattcgtggtttataaacctcagatggaagaccagaaatacaagtgtgcatttagcagaactcccttcctgccagctgatgagacattctggaagcattttctgactttaaaaatgaacatttcggttcttgtcctccccctatttatttttacatttctctatgtgcaaatgagaaaaacactaaggttcagggagcagaggtatagccttttcaagcttgtttttgccataatggtagtcttccttctgatgtgggcgccctacaatattgcatttttcctgtccactttcaaagaacacttctccctgagtgactgcaagagcagctacaatctggacaaaagtgttcacatcactaaactcatcgccaccacccactgctgcatcaaccctctcctgtatgcgtttcttgatgggacatttagcaaatacctctgccgctgtttccatctgcgtagtaacaccccacttcaacccagggggcagtctgcacaaggcacatcgagggaagaacctgaccattccaccgaagtgtaaactagcatccaccaaatgcaagaagaataaacatggattttcatctttctgcattatttcatgtaaattttctacacatttgtatacaaaatcggatacaggaagaaaagggagaggtgagctaacatttgctaagcactgaatttgtctcaggcaccgtgcaaggctctttacaaacgtgagctccttcgcctcctaccacttgtccatagtgtggataggactagtctcatttctctgagaagaaaactaaggcgcggaaatttgtctaagatcacataactaggaagtggcagaactgattctccagccctggtagcatttgctcagagcctacgcttggtccagaacatcaaactccaaaccctggggacaaacgacatgaaataaatgtattttaaaacatcta

SEQ ID NO: 48749 - DNA, 1796 bp, Artificial Sequence
  derived and/or modified sequence
ctcagaaggccagaagacggctgtcaaaggtcacagggaaatcaaaggcggggtacagggccagagggaggaggaaacaacttcccggttgctttcagacgcttcagagatcctctggaggcctgggggagcttttgagtactttatttcagttggtccctgagctcggtgagtggggcgggtagagccaccaggggaatcaacagtggtttctcgtgcccctcagggtcaggagcagtctgatcaaaaggagggcatccactgtccggggccattcccacagctcccggatgctgggtctggaggctgcgcccttcccctgcaggagctcagcccagtgggcagtctgaagatggccaattacacgctggcaccagaggatgaatatgatgtcctcatagaaggtgaactggagagcgatgaggcagagcaatgtgacaagtatgacgcccaggcactctcagcccagctggtgccatcactctgctctgctgtgtttgtgatcggtgtcctggacaatctcctggttgtgcttatcctggtaaaatataaaggactcaaacgcgtggaaaatatctatcttctaaacttggcagtttctaacttgtgtttcttgcttaccctgcccttctgggctcatgctgggggcgatcccatgtgtaaaattctcattggactgtacttcgtgggcctgtacagtgagacatttttcaattgccttctgactgtgcaaaggtacctagtgtttttgcacaagggaaactttttctcagccaggaggagggtgccctgtggcatcattacaagtgtcctggcatgggtaacagccattctggccactttgcctgaattcgtggtttataaacctcagatggaagaccagaaatacaagtgtgcatttagcagaactcccttcctgccagctgatgagacattctggaagcattttctgactttaaaaatgaacatttcggttcttgtcctccccctatttatttttacatttctctatgtgcaaatgagaaaaacactaaggttcagggagcagaggtatagccttttcaagcttgtttttgccataatggtagtcttccttctgatgtgggcgccctacaatattgcatttttcctgtccactttcaaagaacacttctccctgagtgactgcaagagcagctacaatctggacaaaagtgttcacatcactaaactcatcgccaccacccactgctgcatcaaccctctcctgtatgcgtttcttgatgggacatttagcaaatacctctgccgctgtttccatctgcgtagtaacaccccacttcaacccagggggcagtctgcacaaggcacatcgagggaagaacctgaccattccaccgaagtgtaaactagcatccaccaaatgcaagaagaataaacatggattttcatctttctgcattatttcatgtaaattttctacacatttgtatacaaaatcggatacaggaagaaaagggagaggtgagctaacatttgctaagcactgaatttgtctcaggcaccgtgcaaggctctttacaaacgtgagctccttcgcctcctaccacttgtccatagtgtggataggactagtctcatttctctgagaagaaaactaaggcgcggaaatttgtctaagatcacataactaggaagtggcagaactgattctccagccctggtagcatttgctcagagcctacgcttggtccagaacatcaaactccaaaccctggggacaaacgacatgaaataaatgtattttaaaacatcta

SEQ ID NO: 48750 - DNA, 1106 bp, Artificial Sequence
  derived and/or modified sequence
tttatttatacccttcgagagaaaaacgtctcagctgtcacaggaagctgcttcgggggggcagtctgaagatggccaattacacgctggcaccagaggatgaatatgatgtcctcatagaaggtgaactggagagcgatgaggcagagcaatgtgacaagtatgacgcccaggcactctcagcccagctggtgccatcactctgctctgctgtgtttgtgatcggtgtcctggacaatctcctggttgtgcttatcctggtaaaatataaaggactcaaacgcgtggaaaatatctatcttctaaacttggcagtttctaacttgtgtttcttgcttaccctgcccttctgggctcatgctgggggcgatcccatgtgtaaaattctcattggactgtacttcgtgggcctgtacagtgagacatttttcaattgccttctgactgtgcaaaggtacctagtgtttttgcacaagggaaactttttctcagccaggaggagggtgccctgtggcatcattacaagtgtcctggcatgggtaacagccattctggccactttgcctgaattcgtggtttataaacctcagatggaagaccagaaatacaagtgtgcatttagcagaactcccttcctgccagctgatgagacattctggaagcattttctgactttaaaaatgaacatttcggttcttgtcctccccctatttatttttacatttctctatgtgcaaatgagaaaaacactaaggttcagggagcagaggtatagccttttcaagcttgtttttgccataatggtagtcttccttctgatgtgggcgccctacaatattgcatttttcctgtccactttcaaagaacacttctccctgagtgactgcaagagcagctacaatctggacaaaagtgttcacatcactaaactcatcgccaccacccactgctgcatcaaccctctcctgtatgcgtttcttgatgggacatttagcaaatacctctgccgctgtttccatctgcgtagtaacaccccacttcaacccagggggcagtctgcacaaggcacatcgagggaagaacctgaccattccaccgaagtgtaa

SEQ ID NO: 48751 - DNA, 1642 bp, Artificial Sequence
  derived and/or modified sequence
ctgctctggggaagtgggcacacgttaaagaaatgtttatttcagtcttctgaaatagggaattactctggctaaaatgtagctccagaaagggaaagtggggctgtatgaatccaggtccagtttgttgtttcctccaggataaggcagctgtcggaggggaaaatcatctcccatttctccacagggcagtctgaagatggccaattacacgctggcaccagaggatgaatatgatgtcctcatagaaggtgaactggagagcgatgaggcagagcaatgtgacaagtatgacgcccaggcactctcagcccagctggtgccatcactctgctctgctgtgtttgtgatcggtgtcctggacaatctcctggttgtgcttatcctggtaaaatataaaggactcaaacgcgtggaaaatatctatcttctaaacttggcagtttctaacttgtgtttcttgcttaccctgcccttctgggctcatgctgggggcgatcccatgtgtaaaattctcattggactgtacttcgtgggcctgtacagtgagacatttttcaattgccttctgactgtgcaaaggtacctagtgtttttgcacaagggaaactttttctcagccaggaggagggtgccctgtggcatcattacaagtgtcctggcatgggtaacagccattctggccactttgcctgaattcgtggtttataaacctcagatggaagaccagaaatacaagtgtgcatttagcagaactcccttcctgccagctgatgagacattctggaagcattttctgactttaaaaatgaacatttcggttcttgtcctccccctatttatttttacatttctctatgtgcaaatgagaaaaacactaaggttcagggagcagaggtatagccttttcaagcttgtttttgccataatggtagtcttccttctgatgtgggcgccctacaatattgcatttttcctgtccactttcaaagaacacttctccctgagtgactgcaagagcagctacaatctggacaaaagtgttcacatcactaaactcatcgccaccacccactgctgcatcaaccctctcctgtatgcgtttcttgatgggacatttagcaaatacctctgccgctgtttccatctgcgtagtaacaccccacttcaacccagggggcagtctgcacaaggcacatcgagggaagaacctgaccattccaccgaagtgtaaactagcatccaccaaatgcaagaagaataaacatggattttcatctttctgcattatttcatgtaaattttctacacatttgtatacaaaatcggatacaggaagaaaagggagaggtgagctaacatttgctaagcactgaatttgtctcaggcaccgtgcaaggctctttacaaacgtgagctccttcgcctcctaccacttgtccatagtgtggataggactagtctcatttctctgagaagaaaactaaggcgcggaaatttgtctaagatcacataactaggaagtggcagaactgattctccagccctggtagcatttgctcagagcctacgcttggtccagaacatcaaactccaaaccctggggacaaacgacatgaaataaatgtattttaaaacatct

SEQ ID NO: 48752 - DNA, 713 bp, Artificial Sequence
  derived and/or modified sequence
gtcacaggaagctgcttcggggggcaagtcctgtttctgctaaaagaagggcagtctgaagatggccaattacacgctggcaccagaggatgaatatgatgtcctcatagaaggtgaactggagagcgatgaggcagagcaatgtgacaagtatgacgcccaggcactctcagcccagctggtgccatcactctgctctgctgtgtttgtgatcggtgtcctggacaatctcctggttgtgcttatcctggtaaaatataaaggactcaaacgcgtggaaaatatctatcttctaaacttggcagtttctaacttgtgtttcttgcttaccctgcccttctgggctcatgctgggggcgatcccatgtgtaaaattctcattggactgtacttcgtgggcctgtacagtgagacatttttcaattgccttctgactgtgcaaaggtacctagtgtttttgcacaagggaaactttttctcagccaggaggagggtgccctgtggcatcattacaagtgtcctggcatgggtaacagccattctggccactttgcctgaattcgtggtttataaacctcagatggaagaccagaaatacaagtgtgcatttagcagaactcccttcctgccagctgatgagacattctggaagcattttctgactttaaaaatgaacatttcggttcttgtcctccccctatttatttttacat

SEQ ID NO: 48753 - DNA, 1071 bp, Artificial Sequence
  derived and/or modified sequence
atgatctacaccagattcctgaagggcagcctgaagatggccaactacaccctggcccccgaggacgagtacgacgtgctgatcgagggcgagctggagagcgacgaggccgagcagtgcgacaagtacgacgcccaggccctgagcgcccagctggtgcccagcctgtgcagcgccgtgttcgtgatcggcgtgctggacaacctgctggtggtgctgatcctggtgaagtacaagggcctgaagagagtggagaacatctacctgctgaacctggccgtgagcaacctgtgcttcctgctgaccctgcccttctgggcccacgccggcggcgaccccatgtgcaagatcctgatcggcctgtacttcgtgggcctgtacagcgagaccttcttcaactgcctgctgaccgtgcagagatacctggtgttcctgcacaagggcaacttcttcagcgccagaagaagagtgccctgcggcatcatcaccagcgtgctggcctgggtgaccgccatcctggccaccctgcccgagttcgtggtgtacaagccccagatggaggaccagaagtacaagtgcgccttcagcagaacccccttcctgcccgccgacgagaccttctggaagcacttcctgaccctgaagatgaacatcagcgtgctggtgctgcccctgttcatcttcaccttcctgtacgtgcagatgagaaagaccctgagattcagagagcagagatacagcctgttcaagctggtgttcgccatcatggtggtgttcctgctgatgtgggccccctacaacatcgccttcttcctgagcaccttcaaggagcacttcagcctgagcgactgcaagagcagctacaacctggacaagagcgtgcacatcaccaagctgatcgccaccacccactgctgcatcaaccccctgctgtacgccttcctggacggcaccttcagcaagtacctgtgcagatgcttccacctgagaagcaacacccccctgcagcccagaggccagagcgcccagggcaccagcagagaggagcccgaccacagcaccgaggtgtag

SEQ ID NO: 48754 - protein, 365 aa, Artificial Sequence
  derived and/or modified sequence
MAAAAAGTATSQRFFQSFSDALIDEDPQAALEELTKALEQKPDDAQYYCQRAYCHILLGNYCVAVADAKKSLELNPNNSTAMLRKGICEYHEKNYAAALETFTEGQKLDIETGFHRVGQAGLQLLTSSDPPALDSQSAGITGADANFSVWIKRCQEAQNGSESEVWTHQSKIKYDWYQTESQVVITLMIKNVQKNDVNVEFSEKELSALVKLPSGEDYNLKLELLHPIIPEQSTFKVLSTKIEIKLKKPEAVRWEKLEGQGDVPTPKQFVADVKNLYPSSSPYTRNWDKLVGEIKEEEKNEKLEGDAALNRLFQQIYSDGSDEVKRAMNKSFMESGGTVLSTNWSDVGKRKVEINPPDDMEWKKY

SEQ ID NO: 48755 - DNA, 1098 bp, Artificial Sequence
  derived and/or modified sequence
atggccgccgccgccgccggcaccgccaccagccagagattcttccagagcttcagcgacgccctgatcgacgaggacccccaggccgccctggaggagctgaccaaggccctggagcagaagcccgacgacgcccagtactactgccagagagcctactgccacatcctgctgggcaactactgcgtggccgtggccgacgccaagaagagcctggagctgaaccccaacaacagcaccgccatgctgagaaagggcatctgcgagtaccacgagaagaactacgccgccgccctggagaccttcaccgagggccagaagctggacatcgagaccggcttccacagagtgggccaggccggcctgcagctgctgaccagcagcgacccccccgccctggacagccagagcgccggcatcaccggcgccgacgccaacttcagcgtgtggatcaagagatgccaggaggcccagaacggcagcgagagcgaggtgtggacccaccagagcaagatcaagtacgactggtaccagaccgagagccaggtggtgatcaccctgatgatcaagaacgtgcagaagaacgacgtgaacgtggagttcagcgagaaggagctgagcgccctggtgaagctgcccagcggcgaggactacaacctgaagctggagctgctgcaccccatcatccccgagcagagcaccttcaaggtgctgagcaccaagatcgagatcaagctgaagaagcccgaggccgtgagatgggagaagctggagggccagggcgacgtgcccacccccaagcagttcgtggccgacgtgaagaacctgtaccccagcagcagcccctacaccagaaactgggacaagctggtgggcgagatcaaggaggaggagaagaacgagaagctggagggcgacgccgccctgaacagactgttccagcagatctacagcgacggcagcgacgaggtgaagagagccatgaacaagagcttcatggagagcggcggcaccgtgctgagcaccaactggagcgacgtgggcaagagaaaggtggagatcaacccccccgacgacatggagtggaagaagtactag

SEQ ID NO: 48756 - DNA, 1217 bp, Artificial Sequence
  derived and/or modified sequence
cagaagtttcccccttgggcggtggtggaggtggtaaccgtgatagtagcagctccggcggcagcaacagcgactacgagggatggcggcggctgcagcaggaactgcaacatcccagaggtttttccagagcttctcggatgccctaatcgacgaggacccccaggcggcgttagaggagctgactaaggctttggaacagaaaccagatgatgcacagtattattgtcaaagagcttattgtcacattcttcttgggaattactgtgttgctgttgctgatgcaaagaagtctctagaactcaatccaaataattccactgctatgctgagaaaaggaatatgtgaataccatgaaaaaaactatgctgctgccctagaaacttttacagaaggacaaaaattagatatagagacggggtttcatcgtgttggccaggctggtctccaactcttgacctcaagtgatccacctgccttggactcccaaagtgctgggattacaggtgcagatgctaatttcagtgtctggattaaaaggtgtcaagaagctcagaatggctcagaatctgaggtgtggactcatcagtcaaaaatcaagtatgactggtatcaaacagaatctcaagtagtcattacacttatgatcaagaatgttcagaagaatgatgtaaatgtggaattttcagaaaaagagttgtctgctttggttaaacttccttctggagaggattacaatttgaaactggaacttcttcatcctataataccagaacagagcacgtttaaagtactttcaacaaagattgaaattaaactgaaaaagccagaggctgtgagatgggaaaagctagaggggcaaggagatgtgcctacgccaaaacaattcgtagcagatgtaaagaacctatatccatcatcatctccttatacaagaaattgggataaattggttggtgagatcaaagaagaagaaaagaatgaaaagttggagggagatgcagctttaaacagattatttcagcagatctattcagatggttctgatgaagtgaaacgtgccatgaacaaatcctttatggagtcgggtggtacagttttgagtaccaactggtctgatgtaggtaaaaggaaagttgaaatcaatcctcctgatgatatggaatggaaaaagtactaaataaattaatttgctctcatcgtattgtgtatattca

SEQ ID NO: 48757 - DNA, 1098 bp, Artificial Sequence
  derived and/or modified sequence
atggcagcagccgcagcgggcactgcgacttcacagcgattcttccagtctttttccgacgccttaattgacgaggacccccaggctgccttagaggagctcacgaaggctctggaacagaaaccggatgatgcacagtactattgtcagcgtgcttattgtcacattctgctgggtaactactgcgtagccgtcgcagacgctaaaaaaagcctggagctcaaccctaacaattctaccgcaatgctccgcaagggaatctgtgagtatcacgagaaaaactatgctgctgctctggaaaccttcacagaaggacagaagctcgacatagagacagggttccacagggtcggacaagcagggctgcagcttttaaccagcagtgacccgcccgcccttgactcccaatcagctggcatcactggtgcagacgctaacttctcagtgtggataaagcgatgccaggaagcacaaaacggtagtgagagcgaggtctggacccaccagtcgaagattaagtacgactggtaccaaactgaatcacaggtcgtgataaccctgatgatcaagaatgtgcagaaaaatgacgtgaatgtggagttttccgaaaaggagttgtcagcgctggtgaaacttccgagtggagaagattacaacctgaagttggagctgctccacccgattatccctgagcaaagcacttttaaagtgctcagcacgaagattgagattaaactaaaaaagcctgaggccgtgcgttgggagaaactagagggccaaggcgatgtgccaacacctaagcagttcgtcgctgatgtcaaaaatctttacccttcatcttctccttatactcgtaattgggataaacttgtgggtgaaatcaaggaggaggaaaaaaatgagaagcttgagggagatgccgcccttaatcgtctgttccagcagatttattcagacggttctgacgaagtgaaaagagcgatgaataaaagttttatggagtcaggcggtaccgtgctcagtactaattggtctgatgttggcaagaggaaggtggagatcaaccctcccgacgatatggagtggaaaaagtattag

SEQ ID NO: 48758 - DNA, 1098 bp, Artificial Sequence
  derived and/or modified sequence
atggctgctgctgctgctggaacagccaccagccagcgcttcttccagagcttcagtgatgccctgattgatgaggacccccaggccgccctggaggagctgaccaaggccctggagcagaagccagatgatgcccagtactactgccagagggcctactgccacatcctgctgggcaactactgtgtggccgtggctgatgccaagaagagcctggagctgaaccccaacaacagcacagccatgctgaggaagggcatctgtgagtaccacgagaagaactatgctgctgccctggagaccttcacagagggccagaagctggacatcgagaccggcttccaccgggtgggccaggccggcctgcagctgctgaccagcagtgaccccccagccctggacagccagagcgctggcatcactggagcagatgccaacttctctgtgtggatcaagcgctgccaggaggcccagaatggaagtgaaagtgaggtgtggacccaccagagcaagatcaagtatgactggtaccagacagagagccaggtggtgatcaccctgatgatcaagaatgtgcagaagaatgatgtgaatgtggagttcagcgagaaggagctgagcgccctggtgaagctgcccagcggggaggactacaacctgaagctggagctgctgcaccccatcatccctgagcagagcaccttcaaggtgctgagcaccaagattgagatcaagctgaagaagccagaggccgtgcgctgggagaagctggagggccagggagatgtgcccacccccaagcagtttgtggctgatgtgaagaacctgtaccccagcagcagcccctacaccaggaactgggacaagctggtgggggagatcaaggaggaggagaagaatgagaagctggagggagatgctgccctgaacagactcttccagcagatctacagtgatggcagtgatgaggtgaagagggccatgaacaagagcttcatggagagcggcggcaccgtgctgagcaccaactggagcgatgtgggcaagaggaaggtggagatcaaccccccagatgacatggagtggaagaagtactag

SEQ ID NO: 48759 - DNA, 1098 bp, Artificial Sequence
  derived and/or modified sequence
atggccgccgccgccgccggcaccgccaccagccagcggttcttccagagcttttctgacgccttaattgatgaagatcctcaggctgccctggaggagctgaccaaggccttagagcagaaaccagatgacgcacagtattactgccaaagggcctactgccatatcctgctaggcaattattgtgttgccgttgccgacgccaagaaatcgctggagctgaacccaaacaactcaactgccatgcttaggaagggaatttgcgaataccatgagaaaaattatgctgccgccctcgaaacattcaccgagggccagaaactcgatatcgaaaccggctttcatagggtgggccaggcaggcctgcaactgctgactagctcagacccccccgcactcgactcacaatcggcagggattactggagccgatgctaacttctctgtttggattaagcggtgtcaggaagcgcagaacgggtccgaatcagaagtgtggacgcatcagagcaagatcaaatacgattggtatcagacagagtctcaggtagttatcacacttatgattaagaatgtgcaaaagaatgacgtgaatgtcgagttttccgagaaagaattatcagcccttgtgaaactgccttccggagaagattataaccttaagctagaactcctgcatcccattatccccgaacagagtacttttaaagtgctgtctactaagatcgaaataaagcttaaaaagccagaagcagtgagatgggaaaaattagagggccaaggcgacgtgcctaccccaaagcagtttgtggccgatgtgaaaaatctctacccttccagcagcccctatacgagaaactgggacaagttggtcggagaaatcaaggaggaggaaaaaaacgaaaagctggagggcgatgctgcgctgaatcggctgtttcagcagatctacagcgacggtagtgatgaagtcaagagggctatgaataagagcttcatggagtcagggggaaccgtcctaagtacgaattggtccgacgtgggaaagcgcaaggttgagatcaatccgccagacgatatggagtggaagaaatattag

SEQ ID NO: 48760 - DNA, 1098 bp, Artificial Sequence
  derived and/or modified sequence
atggccgctgcggcagctggtactgcaacaagtcagagattctttcagagcttctctgacgctctcatcgacgaagatccccaggccgctctggaggagctgacaaaagcactggaacagaaaccagatgacgctcagtattactgccagagggcctactgccatatcctgcttggcaactactgcgtggcagtagccgacgcaaagaaaagtctggagctaaatcccaataatagcactgccatgctgcggaaagggatttgtgagtatcacgaaaagaactatgctgcggcactggagacattcacagagggtcagaaacttgacatcgaaaccggctttcatcgtgtggggcaggcgggtctgcagcttcttacatcttcagaccctcccgcacttgactctcagagtgcaggcattacaggcgctgatgccaacttctccgtgtggattaaacggtgtcaggaagcccaaaatggctcagaatccgaagtttggacccatcagagcaaaatcaagtatgattggtatcaaaccgagagtcaggtggtgatcacactgatgataaaaaacgtccagaagaatgacgtgaacgtggaattttccgagaaagagctctcagccctcgtgaaactgccatctggggaagactataatctgaagctagagctgttgcacccaatcataccggagcagtctacctttaaagtgctctctactaaaatcgagattaagttgaagaaaccagaggccgtccggtgggagaaactggaaggtcagggcgacgtgcccacccccaagcaattcgtggccgatgtaaaaaacctttatccgtcttcctcaccttacacacgaaattgggataaactcgtcggtgaaattaaggaagaagagaagaatgaaaaactcgagggtgatgcagccctgaaccgcctgtttcagcagatctattctgacggctcggatgaggtgaagagggcgatgaacaaaagcttcatggagagcgggggaactgtactttccactaattggtcagacgtgggcaagcgcaaggtcgaaattaaccctccagacgacatggaatggaaaaagtactag

SEQ ID NO: 48761 - DNA, 99 bp, Artificial Sequence
  derived and/or modified sequence
atggccgccgccgccgccggccccgccgccagccagagattcttccagagcttcagcgacgccctgatcgaccaggacccccaggccgccctggagtag

SEQ ID NO: 48762 - DNA, 99 bp, Artificial Sequence
  derived and/or modified sequence
atggccgctgccgctgcagggcctgctgcatcccagcggttttttcagagtttttccgacgccttgattgaccaggatccacaggccgccctggaatag

SEQ ID NO: 48763 - DNA, 99 bp, Artificial Sequence
  derived and/or modified sequence
atggctgccgccgcagccggccccgctgccagtcaacgatttttccaatcattcagtgacgcactgatagaccaggacccacaggcagcgctggagtag

SEQ ID NO: 48764 - DNA, 99 bp, Artificial Sequence
  derived and/or modified sequence
atggctgctgctgctgctggccctgctgccagccagcgcttcttccagagcttcagtgatgccctgattgaccaggacccccaggccgccctggagtag

SEQ ID NO: 48765 - DNA, 99 bp, Artificial Sequence
  derived and/or modified sequence
atggccgccgccgccgccggccccgccgccagccagcggttcttccagtccttcagtgacgcactgatagaccaggatccccaggcagcattggaatag

SEQ ID NO: 48766 - DNA, 99 bp, Artificial Sequence
  derived and/or modified sequence
atggccgccgccgccgccggccccgccgccagccagcggttcttccagagcttctccgatgctcttattgaccaggaccctcaagctgccctggagtag

SEQ ID NO: 48767 - DNA, 99 bp, Artificial Sequence
  derived and/or modified sequence
atggctgccgctgctgcgggacctgctgccagtcagaggtttttccaaagcttcagcgatgcattaattgaccaggatccccaggctgctcttgaatag

SEQ ID NO: 48768 - DNA, 99 bp, Artificial Sequence
  derived and/or modified sequence
atggccgctgccgcagcaggccctgctgctagccagcgcttcttccagagcttcagtgacgcccttatagaccaggaccctcaggccgctctggagtag

SEQ ID NO: 48769 - protein, 296 aa, Artificial Sequence
  derived and/or modified sequence
MKNEIAAVVFFFTRLVRKHDKLKKEAVERFAEKLTLILQEKYKNHWYPEKPSKGQAYRCIRVNKFQRVDPDVLKACENSCILYSDLGLPKELTLWVDPCEVCCRRDGVSPCWPDCSQTPDLVIRPPWPPKALDYRREPLRPASSFLIMYGEKNNAFIVASFENKDENKDEISRKVTRALDKVTSDYHSGSSSSDEETSKEMEVKPSSVTAAASPVYQISELIFPPLPMWHPLPRKKPGMYRGNGHQNHYPPPVPFGYPNQGRKNKPYRPIPVTWVPPPGMHCDRNHWINPHMLAPH

SEQ ID NO: 48770 - protein, 46 aa, Artificial Sequence
  derived and/or modified sequence
MKNEIAAVVFFFTRLVRKHDKLKKEAVERFAEKLTLILQEKYKNHW

SEQ ID NO: 48771 - DNA, 891 bp, Artificial Sequence
  derived and/or modified sequence
atgaagaatgaaatcgcagccgtcgtctttttcttcacacgcctggtgcgcaagcatgacaagctgaagaaagaggccgtggagcgctttgctgagaaactgaccctgattctgcaggagaaatataagaaccactggtatccagagaagcctagcaagggccaggcttatcggtgtatacgtgtaaataagttccaacgggtggaccctgacgtattgaaggcatgtgagaactcatgcatcctctactccgacctcggcttgccaaaagaattgactttatgggtagatccatgcgaggtatgttgtaggcgcgacggggtgtccccgtgttggcctgattgcagccagactcctgatctcgtgattaggcctccttggcccccaaaggctctggattataggagggaaccgcttagacccgcttcttcctttcttattatgtacggcgagaaaaataacgccttcattgtggcgagtttcgagaacaaggatgagaataaggatgagatcagccggaaagtgacacgggctctggacaaggttacaagcgactatcattcaggaagcagttctagtgacgaggaaacctcaaaagagatggaagtgaaacctagtagtgttaccgccgctgcgtcccctgtataccaaatctcagagctaatctttccgcctctgcctatgtggcaccccctgcctagaaagaagcccggcatgtacaggggcaacggccatcagaatcactaccccccgcccgtgccttttgggtatcctaaccaggggcgaaaaaataagccttacagacccattccagtgacatgggtcccccctccaggaatgcactgcgaccggaatcattggataaaccctcacatgctcgccccgcattag

SEQ ID NO: 48772 - DNA, 891 bp, Artificial Sequence
  derived and/or modified sequence
atgaagaatgaaattgctgctgtggtgttcttcttcacccggctggtgaggaagcatgacaagctgaagaaggaggccgtggagagatttgctgagaagctgaccctcatcctgcaggagaagtacaagaaccactggtacccagagaagcccagcaagggccaggcctaccgctgcatccgggtgaacaagttccagagggtggaccctgatgtgctgaaggcctgtgagaacagctgcatcctgtacagcgacctgggcctgcccaaggagctgaccctgtgggtggacccctgtgaggtgtgctgcagaagagatggagtgagcccctgctggccagactgcagccagaccccagacctggtgatccggcccccctggccacccaaggccctggactacagaagagagcccctgcggcctgccagcagcttcctgatcatgtatggagagaagaacaatgccttcatcgtggccagctttgagaacaaggatgagaacaaggatgagatcagcaggaaggtgacccgggccctggacaaggtgaccagtgactaccacagcggcagcagcagcagtgatgaggagaccagcaaggagatggaggtgaagcccagctctgtgacagctgctgccagccctgtgtaccagatcagcgagctgatcttcccccccctgcccatgtggcaccccctgcccaggaagaagccaggcatgtacagaggaaatggccaccagaaccactacccacctcctgtgcccttcggctaccccaaccagggcaggaagaacaagccctaccggcccatccctgtgacctgggtgcccccacctggcatgcactgtgacaggaaccactggatcaacccccacatgctggccccccactag

SEQ ID NO: 48773 - DNA, 891 bp, Artificial Sequence
  derived and/or modified sequence
atgaagaacgagatcgccgccgtggtgttcttcttcacccggctggtgagaaagcacgacaaactcaagaaggaagccgtggagagatttgctgagaagctgaccctgatccttcaggagaaatacaaaaatcactggtacccagagaagcctagcaaaggccaggcttaccggtgtataagagtgaataagtttcagcgcgtggatcccgatgttctgaaggcttgcgagaatagctgtattttgtacagcgacctgggtcttccgaaagagctcacgctatgggtcgacccatgcgaggtgtgctgccggcgcgatggagtgagcccctgctggccagattgctctcaaacacccgatttggttatcaggccaccctggccacccaaagccctggactacaggcgggagcccttgcgcccagccagttcgttccttatcatgtacggtgaaaagaataacgcttttatagttgcctcctttgaaaataaagatgaaaataaggatgagatctcccgcaaagtgacccgcgcccttgacaaagtgacttcagactatcactcgggctcttcttctagcgacgaagaaacgagcaaggaaatggaggtgaagccatcaagtgtaaccgccgccgcaagcccagtgtatcagatctccgaactgatcttcccccccctgccaatgtggcatcccctcccacgcaagaaaccaggtatgtaccggggcaacgggcatcaaaaccattacccccctcctgtgccttttggctaccccaatcagggaaggaagaataagccatatcggcctataccagtaacctgggtgccacctcctggcatgcactgcgacagaaatcactggataaacccccatatgctggccccgcactag

SEQ ID NO: 48774 - DNA, 891 bp, Artificial Sequence
  derived and/or modified sequence
atgaagaatgagattgccgcagtcgtcttctttttcacaagattagtgcggaaacatgacaaactaaagaaggaagcagtggaaagatttgccgagaagctgacactgattttgcaggaaaaatataagaatcattggtatccagaaaaacctagcaaaggtcaggcttaccggtgtattagggtgaacaagttccagagggtggatcccgacgtgctgaaggcatgtgaaaattcttgcattctttattcagacttgggcctccctaaggagctgaccttatgggtggacccttgcgaggtgtgttgtagacgcgatggcgtgagtccatgctggcctgattgctctcagactccagacctggtcatccgtcccccttggcccccaaaggccctggactatcgcagggagcccctccggccagcatcctcttttctgataatgtatggcgagaagaataacgcttttatcgtggctagcttcgaaaataaagatgagaataaagatgagataagtcgcaaagttactagagcccttgacaaagttacgtcagattatcactctggttcctccagttcagacgaagagacttcaaaagaaatggaggtgaaaccctcaagtgtgacagccgcagcatccccagtttatcagattagcgagttgattttccctcctctaccaatgtggcatcccttgcccaggaagaagcccggaatgtaccgcggtaacgggcaccagaaccattacccccctcccgtgccttttggatacccaaaccagggcagaaaaaacaagccttacaggccaattccggtgacctgggtgcctccgccaggaatgcactgtgaccgaaaccactggatcaatccacatatgttggcaccccattag

SEQ ID NO: 48775 - DNA, 1485 bp, Artificial Sequence
  derived and/or modified sequence
cgacgcgggagccgcacgcgccggacgaggctcgctgcgctccctgttgcccagcgcgggcccgttgaggcggagccctcagttcccggccaggacacggtctgggccgccgaatctccggccgaagagcggcggcggcagcggcgggaaaaaaatgaagaatgaaattgctgccgttgtcttctttttcacaaggctagttcgaaaacatgataagttgaaaaaagaggcagttgagaggtttgctgagaaattgaccctaatacttcaagaaaaatataaaaatcactggtatccagaaaaaccatcgaaaggacaggcctacagatgtattcgtgtcaataaatttcagagagttgatcctgatgtcctgaaagcctgtgaaaacagctgcatcttgtatagtgacctgggcttgccaaaggagctcactctctgggtggacccatgtgaggtgtgctgtcgtagagatggggtttcaccatgttggccagactgctctcaaactcctgacctcgtgatccgcccgccttggcctcccaaagcgctggattacaggcgtgagccactgcgcccggcctcctcctttttgattatgtatggagagaaaaacaatgcattcattgttgccagctttgaaaataaagatgagaacaaggatgagatctccaggaaagttaccagggcccttgataaggttacctctgattatcattcaggatcctcttcttcagatgaagaaacaagtaaggaaatggaagtgaaacccagttcggtgactgcagccgcaagtcctgtgtaccagatttcagaacttatatttccacctcttccaatgtggcaccctttgcccagaaaaaagccaggaatgtatcgagggaatggccatcagaatcactatcctcctcctgttccatttggttatccaaatcagggaagaaaaaataaaccatatcgcccaattccagtgacatgggtacctcctcctggaatgcattgtgaccggaatcactggattaatcctcacatgttagcacctcactaacttcgtttttgattgtgttggtgtcatgttgagaaaaaggtagaataaaccttactacacattaaaagttaaaagttcttactaatagtagtgaagttagatgggccaaaccatcaaacttatttttatagaagttattgagaataatctttcttaaaaaatatatgcactttagatattgatatagtttgagaaattttattaaagttagtcaagtgcctaagtttttaatattggacttgagtatttatatattgtgcatcaactctgttggatacgagaacactgtagaagtggacgatttgttctagcacctttgagaatttactttatggagcgtatgtaagttatttatatacaaggaaatctattttatgtcgttgtttaagagaattgtgtgaaatcatgtagttgcaaataaaaaatagtttgaggcatga

SEQ ID NO: 48776 - DNA, 891 bp, Artificial Sequence
  derived and/or modified sequence
atgaagaacgagatcgccgccgtggtgttcttcttcaccagactggtgagaaagcacgacaagctgaagaaggaggccgtggagagattcgccgagaagctgaccctgatcctgcaggagaagtacaagaaccactggtaccccgagaagcccagcaagggccaggcctacagatgcatcagagtgaacaagttccagagagtggaccccgacgtgctgaaggcctgcgagaacagctgcatcctgtacagcgacctgggcctgcccaaggagctgaccctgtgggtggacccctgcgaggtgtgctgcagaagagacggcgtgagcccctgctggcccgactgcagccagacccccgacctggtgatcagacccccctggccccccaaggccctggactacagaagagagcccctgagacccgccagcagcttcctgatcatgtacggcgagaagaacaacgccttcatcgtggccagcttcgagaacaaggacgagaacaaggacgagatcagcagaaaggtgaccagagccctggacaaggtgaccagcgactaccacagcggcagcagcagcagcgacgaggagaccagcaaggagatggaggtgaagcccagcagcgtgaccgccgccgccagccccgtgtaccagatcagcgagctgatcttcccccccctgcccatgtggcaccccctgcccagaaagaagcccggcatgtacagaggcaacggccaccagaaccactaccccccccccgtgcccttcggctaccccaaccagggcagaaagaacaagccctacagacccatccccgtgacctgggtgcccccccccggcatgcactgcgacagaaaccactggatcaacccccacatgctggccccccactag

SEQ ID NO: 48777 - protein, 426 aa, Artificial Sequence
  derived and/or modified sequence
MEAAVAAPRPRLLLLVLAAAAAAAAALLPGATALQCFCHLCTKDNFTCVTDGLCFVSVTETTDKVIHNSMCIAEIDLIPRDRPFVCAPSSKTGSVTTTYCCNQDHCNKIELPTTGLPLLVQRTIARTIVLQESIGKGRFGEVWRGKWRGEEVAVKIFSSREERSWFREAEIYQTVMLRHENILGFIAADNKDNGTWTQLWLVSDYHEHGSLFDYLNRYTVTVEGMIKLALSTASGLAHLHMEIVGTQGKPAIAHRDLKSKNILVKKNGTCCIADLGLAVRHDSATDTIDIAPNHRVGTKRYMAPEVLDDSINMKHFESFKRADIYAMGLVFWEIARRCSIGGIHEDYQLPYYDLVPSDPSVEEMRKVVCEQKLRPNIPNRWQSCEALRVMAKIMRECWYANGAARLTALRIKKTLSQLSQQEGIKM

SEQ ID NO: 48778 - protein, 71 aa, Artificial Sequence
  derived and/or modified sequence
MEAAVAAPRPRLLLASTSLQCFCHLCTKDNFTCVTDGLCFVSVTETTDKVIHNSMCIAEIDLIPRDRPFVC

SEQ ID NO: 48779 - DNA, 1281 bp, Artificial Sequence
  derived and/or modified sequence
atggaggccgccgtggccgcccccagacccagactgctgctgctggtgctggccgccgccgccgccgccgccgccgccctgctgcccggcgccaccgccctgcagtgcttctgccacctgtgcaccaaggacaacttcacctgcgtgaccgacggcctgtgcttcgtgagcgtgaccgagaccaccgacaaggtgatccacaacagcatgtgcatcgccgagatcgacctgatccccagagacagacccttcgtgtgcgcccccagcagcaagaccggcagcgtgaccaccacctactgctgcaaccaggaccactgcaacaagatcgagctgcccaccaccggcctgcccctgctggtgcagagaaccatcgccagaaccatcgtgctgcaggagagcatcggcaagggcagattcggcgaggtgtggagaggcaagtggagaggcgaggaggtggccgtgaagatcttcagcagcagagaggagagaagctggttcagagaggccgagatctaccagaccgtgatgctgagacacgagaacatcctgggcttcatcgccgccgacaacaaggacaacggcacctggacccagctgtggctggtgagcgactaccacgagcacggcagcctgttcgactacctgaacagatacaccgtgaccgtggagggcatgatcaagctggccctgagcaccgccagcggcctggcccacctgcacatggagatcgtgggcacccagggcaagcccgccatcgcccacagagacctgaagagcaagaacatcctggtgaagaagaacggcacctgctgcatcgccgacctgggcctggccgtgagacacgacagcgccaccgacaccatcgacatcgcccccaaccacagagtgggcaccaagagatacatggcccccgaggtgctggacgacagcatcaacatgaagcacttcgagagcttcaagagagccgacatctacgccatgggcctggtgttctgggagatcgccagaagatgcagcatcggcggcatccacgaggactaccagctgccctactacgacctggtgcccagcgaccccagcgtggaggagatgagaaaggtggtgtgcgagcagaagctgagacccaacatccccaacagatggcagagctgcgaggccctgagagtgatggccaagatcatgagagagtgctggtacgccaacggcgccgccagactgaccgccctgagaatcaagaagaccctgagccagctgagccagcaggagggcatcaagatgtag

SEQ ID NO: 48780 - DNA, 216 bp, Artificial Sequence
  derived and/or modified sequence
atggaggccgccgtggccgcccccagacccagactgctgctggccagcaccagcctgcagtgcttctgccacctgtgcaccaaggacaacttcacctgcgtgaccgacggcctgtgcttcgtgagcgtgaccgagaccaccgacaaggtgatccacaacagcatgtgcatcgccgagatcgacctgatccccagagacagacccttcgtgtgctag

SEQ ID NO: 48781 - DNA, 1281 bp, Artificial Sequence
  derived and/or modified sequence
atggaggccgctgttgccgcaccacggcctcggctgttactgctcgttctcgcggctgccgccgccgcggccgcagcccttctccctggcgcaactgccctgcaatgtttttgtcatctatgtacaaaggacaattttacgtgcgtgaccgatgggctgtgtttcgtatctgtgactgagactaccgataaagttatccataatagtatgtgcatcgccgaaattgacctgattcctagggacagaccattcgtctgcgcaccatcgtccaagactggaagtgttaccaccacgtactgctgcaaccaggatcactgcaataaaatcgagttacctactactggcctgccactactggttcagcgaacaatcgcccgcaccatcgttcttcaagagagcattgggaaggggcggtttggggaagtgtggaggggtaaatggaggggcgaagaggtagctgttaaaatcttctcatctcgagaggagagaagttggtttcgggaagccgaaatttaccaaaccgtgatgttgagacatgaaaacatcctgggatttattgcagcagacaacaaagataacggaacatggacacagctgtggttggtttccgattatcatgagcacggttccctcttcgactacttgaataggtatacagtaaccgttgaaggcatgattaaattggctctttctactgccagcgggcttgcccacctacacatggagatcgtgggcacccagggcaagccagccatagcacatagggacttgaaatcaaagaatattctggtcaagaagaatggaacctgttgtattgctgatcttgggctggctgtcaggcatgattcagccaccgatacaatagatattgcgcccaatcaccgggtgggaaccaaaagatatatggcccctgaggttctagatgattcgatcaatatgaaacactttgagtcattcaagcgtgccgacatttacgcgatgggtctagtcttctgggaaattgctcggcggtgttcgatcggcgggattcacgaggactaccagctcccttattatgacctcgtaccatctgatccaagcgtggaggaaatgcgcaaggtcgtctgcgaacaaaaattgcgcccaaatatccccaaccggtggcagagttgcgaggccctgcgggtgatggccaagatcatgagagaatgctggtacgctaatggcgctgctcgtttgaccgccctgcggatcaaaaagaccttgtcacaattatcgcagcaggaggggattaaaatgtag

SEQ ID NO: 48782 - DNA, 216 bp, Artificial Sequence
  derived and/or modified sequence
atggaagccgctgtggctgcgcctcggccacgcctactgctcgcaagtacttcattgcaatgcttttgccacttatgcactaaggataactttacatgtgtgacggacggactttgtttcgtttcagtgacagagacgacagacaaggtcatacacaattctatgtgtatcgctgaaatagacttaatcccgcgggatagaccatttgtctgctag

SEQ ID NO: 48783 - DNA, 1281 bp, Artificial Sequence
  derived and/or modified sequence
atggaggccgctgtggccgccccccggccccggctgctgctgctggtgctggccgctgctgctgctgctgctgctgccctgctgcccggggccacagccctgcagtgcttctgccacctgtgcaccaaggacaacttcacctgtgtgacagatggcctgtgctttgtgtctgtgacagagaccacagacaaggtgatccacaacagcatgtgcatcgccgagattgacctgatcccccgggaccggccctttgtgtgtgcccccagcagcaagacaggctctgtgaccaccacctactgctgcaaccaggaccactgcaacaagattgagctgcccaccaccggcctgcccctgctggtgcagaggaccatcgcccggaccatcgtgctgcaggagagcatcggcaagggccgctttggagaggtgtggaggggcaagtggagaggagaggaggtggccgtgaagatcttcagcagccgggaggagaggtcctggttccgggaggccgagatctaccagacagtgatgctgcggcatgagaacatcctgggcttcatcgctgctgacaacaaggacaatggcacctggacccagctgtggctggtgtctgactaccacgagcacggcagcctgtttgactacctgaaccgctacacagtgacagtggagggcatgatcaagctggccctgagcacagccagcggcctggcccacctgcacatggagatcgtgggcacccagggcaagccagccatcgcccaccgggacctgaagagcaagaacatcctggtgaagaagaatggcacctgctgcatcgctgacctgggcctggccgtgagacatgattctgccacagacaccatcgacatcgcccccaaccaccgggtgggcaccaagcgctacatggcccctgaggtgctggatgacagcatcaacatgaagcactttgagagcttcaagagagctgacatctatgccatgggcctggtgttctgggagatcgcccggcgctgcagcatcggcggcatccacgaggactaccagctgccctactatgacctggtgcccagcgaccccagcgtggaggagatgaggaaggtggtgtgtgagcagaagctgcggcccaacatccccaaccgctggcagagctgtgaggccctgcgggtgatggccaagatcatgagggagtgctggtacgccaatggagctgcccggctgacagccctgcgcatcaagaagaccctgagccagctgagccagcaggagggcatcaagatgtag

SEQ ID NO: 48784 - DNA, 216 bp, Artificial Sequence
  derived and/or modified sequence
atggaggccgctgtggccgccccccggccccggctgctgctggccagcaccagcctgcagtgcttctgccacctgtgcaccaaggacaacttcacctgtgtgacagatggcctgtgctttgtgtctgtgacagagaccacagacaaggtgatccacaacagcatgtgcatcgccgagattgacctgatcccccgggaccggccctttgtgtgctag

SEQ ID NO: 48785 - DNA, 1281 bp, Artificial Sequence
  derived and/or modified sequence
atggaggccgccgtggccgccccccggccccggctgctgctgctggtccttgccgcggctgcggccgcggcggcagctctcctgccaggagccactgccctgcagtgtttttgccacttgtgtaccaaagataactttacatgcgtgacggacgggctgtgttttgtctcagtcaccgaaaccacagataaggtcattcataactcaatgtgcattgctgagatcgacctgattcccagagacagacctttcgtttgcgcgccaagctccaagacaggctctgtgactaccacttactgttgcaatcaagaccactgcaataagatcgagctgcccaccacaggcttaccgctgttagtgcagaggacgattgccagaaccattgttcttcaggaatccatcggaaagggtcgcttcggggaagtctggcgggggaagtggagaggcgaagaggtcgcagtgaagattttttcctctcgggaggaaaggtcatggtttagggaagccgagatatatcagaccgtcatgctcagacacgaaaacatcctcggcttcattgcggcggacaacaaggataacggtacatggacacagctttggttggtctcagactatcacgagcacgggtcattgttcgactatctgaatcgctacaccgtcaccgtagaggggatgatcaaactggctttaagcaccgcaagtgggctggcacatctacacatggaaatagtgggaacacagggaaagccggctatagcccaccgggatctgaagagtaaaaatattctggtcaaaaaaaacggtacctgctgtatcgctgaccttggcctggccgtccgacatgatagtgctaccgatacgatcgatatcgctcccaatcatcgcgtcggtaccaagaggtatatggctcctgaagtactagacgacagcattaacatgaagcattttgagagttttaagcgagccgatatctatgccatgggtctggtcttttgggagatcgcccggaggtgctcaattggcggtatccatgaagattatcagctgccttactatgatctcgtgccatctgatccatcggtggaagaaatgaggaaggttgtgtgtgaacagaaactgcgccccaacataccaaatcggtggcagtcttgtgaggcactccgtgtcatggccaaaatcatgagggaatgctggtatgctaatggagcggctaggttaaccgcacttcgcattaagaagacattgagtcagctgtctcagcaggagggcatcaaaatgtag

SEQ ID NO: 48786 - DNA, 216 bp, Artificial Sequence
  derived and/or modified sequence
atggaggccgccgtggccgccccccggccccggctgctgctggcctccacatcactccagtgtttttgtcacctttgcaccaaagataacttcacctgcgtgaccgatggactttgcttcgttagcgtgaccgaaacaacagataaagtgattcataattctatgtgcattgccgagattgaccttattcctagggaccggcccttcgtgtgctag

SEQ ID NO: 48787 - DNA, 1281 bp, Artificial Sequence
  derived and/or modified sequence
atggaggccgctgttgcagccccaagacccagactgctgctgttggtactggcagctgccgcagcggcagcagctgctttgctccctggagcgacggcactgcagtgcttttgccatctatgtacaaaggacaacttcacttgcgtaacagacgggctatgtttcgtctcggtgaccgagaccactgacaaagtgattcacaactctatgtgcattgctgaaatagatctgattcccagagatcgtccattcgtgtgcgccccaagctcaaaaacgggctccgttacaaccacctactgctgcaaccaagatcactgtaacaagattgaactgcctaccactggcctgcctctccttgttcagcgtacaatagcacgaaccattgtattacaggagagtatagggaagggtcgttttggagaagtctggcggggaaagtggcgtggtgaagaagtggcagtgaagatcttttctagccgggaggaacgttcctggttcagggaagcagaaatctatcaaacagtaatgctgaggcacgagaacattctgggctttattgctgcggacaataaggacaatggaacttggacacagctgtggttggtaagcgactaccatgagcatggtagtctatttgattacctgaaccgctataccgtcaccgttgaggggatgataaagcttgccctctctacagcttccggactggcccacttgcacatggagatagtggggacgcagggcaagcccgctattgcacacagggatctaaagtctaagaatatcctggtgaagaagaatggcacctgctgcattgctgatttgggactcgccgttcgtcacgactctgcaaccgatactatcgatattgccccaaaccatagggtggggaccaaaagatacatggcacccgaagtccttgatgactcaattaacatgaaacactttgaaagtttcaaacgggctgatatctacgcaatggggctagtcttctgggagatcgctcgccgttgctccattggtggaatccatgaagactaccagctgccctactacgacctggttcccagcgatccgtctgtcgaggagatgcgtaaggtcgtgtgcgagcaaaaactgaggccgaatattccaaaccggtggcaatcttgtgaggctctgcgcgtgatggctaagatcatgagggagtgttggtacgccaacggtgccgcaaggctgaccgcactcagaatcaaaaaaacactctcacaattgtcacaacaggagggcatcaaaatgtag

SEQ ID NO: 48788 - DNA, 216 bp, Artificial Sequence
  derived and/or modified sequence
atggaagcagccgtggctgccccacgacccaggctcctgttggcttctacgagccttcagtgtttttgtcacctctgcaccaaagacaattttacgtgtgtcaccgatggcttgtgctttgtctctgtgaccgagaccactgataaggtgatccataactccatgtgtatagcagaaatcgatttaattccacgcgatcgacctttcgtctgttag

SEQ ID NO: 48789 - DNA, 5720 bp, Artificial Sequence
  derived and/or modified sequence
gcggcggctagggaggtggggcgaggcgaggtttgctggggtgaggcagcggcgcggccgggccgggccgggccacaggcggtggcggcgggaccatggaggcggcggtcgctgctccgcgtccccggctgctcctcctcgtgctggcggcggcggcggcggcggcggcggcgctgctcccgggggcgacggcgttacagtgtttctgccacctctgtacaaaagacaattttacttgtgtgacagatgggctctgctttgtctctgtcacagagaccacagacaaagttatacacaacagcatgtgtatagctgaaattgacttaattcctcgagataggccgtttgtatgtgcaccctcttcaaaaactgggtctgtgactacaacatattgctgcaatcaggaccattgcaataaaatagaacttccaactactggtttaccattgcttgttcagagaacaattgcgagaactattgtgttacaagaaagcattggcaaaggtcgatttggagaagtttggagaggaaagtggcggggagaagaagttgctgttaagatattctcctctagagaagaacgttcgtggttccgtgaggcagagatttatcaaactgtaatgttacgtcatgaaaacatcctgggatttatagcagcagacaataaagacaatggtacttggactcagctctggttggtgtcagattatcatgagcatggatccctttttgattacttaaacagatacacagttactgtggaaggaatgataaaacttgctctgtccacggcgagcggtcttgcccatcttcacatggagattgttggtacccaaggaaagccagccattgctcatagagatttgaaatcaaagaatatcttggtaaagaagaatggaacttgctgtattgcagacttaggactggcagtaagacatgattcagccacagataccattgatattgctccaaaccacagagtgggaacaaaaaggtacatggcccctgaagttctcgatgattccataaatatgaaacattttgaatccttcaaacgtgctgacatctatgcaatgggcttagtattctgggaaattgctcgacgatgttccattggtggaattcatgaagattaccaactgccttattatgatcttgtaccttctgacccatcagttgaagaaatgagaaaagttgtttgtgaacagaagttaaggccaaatatcccaaacagatggcagagctgtgaagccttgagagtaatggctaaaattatgagagaatgttggtatgccaatggagcagctaggcttacagcattgcggattaagaaaacattatcgcaactcagtcaacaggaaggcatcaaaatgtaattctacagctttgcctgaactctccttttttcttcagatctgctcctgggttttaatttgggaggtcaattgttctacctcactgagagggaacagaaggatattgcttccttttgcagcagtgtaataaagtcaattaaaaacttcccaggatttctttggacccaggaaacagccatgtgggtcctttctgtgcactatgaacgcttctttcccaggacagaaaatgtgtagtctacctttattttttattaacaaaacttgttttttaaaaagatgattgctggtcttaactttaggtaactctgctgtgctggagatcatctttaagggcaaaggagttggattgctgaattacaatgaaacatgtcttattactaaagaaagtgatttactcctggttagtacattctcagaggattctgaaccactagagtttccttgattcagactttgaatgtactgttctatagtttttcaggatcttaaaactaacacttataaaactcttatcttgagtctaaaaatgacctcatatagtagtgaggaacataattcatgcaattgtattttgtatactattattgttctttcacttattcagaacattacatgccttcaaaatgggattgtactataccagtaagtgccacttctgtgtctttctaatggaaatgagtagaattgctgaaagtctctatgttaaaacctatagtgtttgaattcaaaaagcttatttatctgggtaacccaaactttttctgttttgtttttggaagggtttttgtggtatgtcatttggtattctattctgaaaatgcctttctcctaccaaaatgtgcttaagccactaaagaaatgaagtggcattaattagtaaattattagcatggtcatgtttgaatattctcacatcaagcttttgcattttaattgtgttgtctaagtatacttttaaaaaatcaagtggcactctagatgcttatagtactttaatatttgtagcatacagactaatttttctaaaagggaaagtctgtctagctgcttgtgaaaagttatgtggtattctgtaagccatttttttctttatctgttcaaagacttattttttaagacatgaattacatttaaaattagaatatggttaatattaaataataggcctttttctaggaaggcgaaggtagttaataatttgaatagataacagatgtgcaagaaagtcacatttgttatgtatgtaggagtaaacgttcggtggatcctctgtctttgtaactgaggttagagctagtgtggttttgaggtctcactacactttgaggaaggcagcttttaattcagtgtttccttatgtgtgcgtacattgcaactgcttacatgtaatttatgtaatgcattcagtgcacccttgttacttgggagaggtggtagctaaagaacattctgagtataggtttttctccatttacagatgtctttggtcaaatattgaaagcaaacttgtcatggtcttcttacattaagttgaaactagcttataataactggtttttacttccaatgctatgaagtctctgcagggcttttacagttttcgaagtccttttatcactgtgatcttattctgaggggagaaaaaactatcatagctctgaggcaagacttcgactttatagtgctatcagttccccgatacagggtcagagtaacccatacagtattttggtcaggaagagaaagtggccatttacactgaatgagttgcattctgataatgtcttatctcttatacgtagaataaatttgaaagactatttgatcttaaaaccaaagtaattttagaatgagtgacatattacataggaatttagtgtcaatttcatgtgtttaaaaacatcatgggaaaaatgcttagaggttactattttgactacaaagttgagtttttttctgtagttaccataatttcattgaagcaaatgaatgagtttgagaggtttgtttttatagttgtgttgtattacttgtttaataataatctctaattctgtgatcaggtactttttttgtgggggttttttttttgtttttttttttttgttgttgtttttgggccatttctaagcctaccagatctgctttatgaaatccaggggaccaatgcattttatcactaaaactatttttatataattttaagaatataccaaaagttgtctgatttaaagttgtaatacatgatttctcactttcatgtaaggttatccacttttgctgaagatattttttattgaatcaaagattgagttacaattatacttttcttacctaagtggataaaatgtacttttgatgaatcagggaatttttttaaagttggagtttagttctaaattgactttacgtattactgcagttaattccttttttggctagggatggtttgataaaccacaattggctgatattgaaaatgaaagaaacttaaaaggtgggatggatcatgattactgtcgataactgcagataaatttgattagagtaataattttgtcatttaaaaacacagttgtttatactgcccatcctaggatgctcaccttccaagattcaacgtggctaaaacatcttctggtaaattgtgcgtccatattcattttgtcagtagccaggagaaatggggatgggggaaatacgacttagtgaggcatagacatccctggtccatcctttctgtctccagctgtttcttggaacctgctctcctgcttgctggtccctgacgcagagaccgttgcctcccccacagccgtttgactgaaggctgctctggagacctagagtaaaacggctgatggaagttgtgggacccacttccatttccttcagtcattagaggtggaagggaggggtctccaagtttggagattgagcagatgaggcttgggatgcccctgctttgacttcagccatggatgaggagtgggatggcagcaaggtggctcctgtggcagtggagttgtgccagaaacagtggccagttgtatcgcctataagacagggtaaggtctgaagagctgagcctgtaattctgctgtaataatgatagtgctcaagaagtgccttgagttggtgtacagtgccatggccatcaagaatcccagatttcaggttttattacaaaatgtaagtggtcacttggcgattttgtagtacatgcatgagttaccttttttctctatgtctgagaactgtcagattaaaacaagatggcaaagagatcgttagagtgcacaacaaaatcactatcccattagacacatcatcaaaagcttatttttattcttgcactggaagaatcgtaagtcaactgtttcttgaccatggcagtgttctggctccaaatggtagtgattccaaataatggttctgttaacactttggcagaaaatgccagctcagatattttgagatactaaggattatctttggacatgtactgcagcttcttgtctctgttttggattactggaatacccatgggccctctcaagagtgctggacttctaggacattaagatgattgtcagtacattaaacttttcaatcccattatgcaatcttgtttgtaaatgtaaacttctaaaaatatggttaataacattcaacctgtttattacaacttaaaaggaacttcagtgaatttgtttttattttttaacaagatttgtgaactgaatatcatgaaccatgttttgatacccctttttcacgttgtgccaacggaatagggtgtttgatatttcttcatatgttaaggagatgcttcaaaatgtcaattgctttaaacttaaattacctctcaagagaccaaggtacatttacctcattgtgtatataatgtttaatatttgtcagagcattctccaggtttgcagttttatttctataaagtatgggtattatgttgctcagttactcaaatggtactgtattgtttatatttgtaccccaaataacatcgtctgtactttctgttttctgtattgtatttgtgcaggattctttaggctttatcagtgtaatctctgccttttaagatatgtacagaaaatgtccatataaatttccattgaagtcgaatgatactgagaagcctgtaaagaggagaaaaaaacataagctgtgtttccccataagtttttttaaattgtatattgtatttgtagtaatattccaaaagaatgtaaataggaaatagaagagtgatgcttatgttaagtcctaacactacagtagaagaatggaagcagtgcaaataaattacatttttcccaa

SEQ ID NO: 48790 - protein, 459 aa, Artificial Sequence
  derived and/or modified sequence
MEPSTCRTMESEEDYVEEKESEKCVKEGVTNPSNSSQQALLKADYKALKNGVPSPIMATKIPKKVIAPVDTGDLEAGRRKRRRKRRSLAINLTNCKYESVRRAAQMCGLKEVGEDEEWTLYWTDCAVSLERVMDMKRFQKINHFPGMTEICRKDLLARNLNRMYKLYPSEYNIFPRTWCLPADYGDFQSYGRQRKARTYICKPDSGCQGRGIFITRNPREIKPGEHMICQQYISKPLLIDGFKFDMRVYVLITSCDPLRIFTYEEGLARFATTPYMEPSHNNLDNVCMHLTNYAINKHNENFVRDGAVGSKRKLSTLNIWLQEHSYNPGELWGDIEDIIIKTIISAHSVLRHNYRTCFPQYLNGGTCACFEILGFDILLDHKLKPWLLEVNHSPSFTTDSCLDQEVKDALLCDAMTLVNLRGCDKRKVMEEDKRRVKERLFQCYRQPRESRCARCLACV

SEQ ID NO: 48791 - protein, 815 aa, Artificial Sequence
  derived and/or modified sequence
MEPSTCRTMESEEDYVEEKESEKCVKEGVTNPSNSSQQALLKADYKALKNGVPSPIMATKIPKKVIAPVDTGDLEAGRRKRRRKRRSLAINLTNCKYESVRRAAQMCGLKEVGEDEEWTLYWTDCAVSLERVMDMKRFQKINHFPGMTEICRKDLLARNLNRMYKLYPSEYNIFPRTWCLPADYGDFQSYGRQRKARTYICKPDSGCQGRGIFITRNPREIKPGEHMICQQYISKPLLIDGFKFDMRVYVLITSCDPLRIFTYEEGLARFATTPYMEPSHNNLDNVCMHLTNYAINKHNENFVRDGAVGSKRKLSTLNIWLQEHSYNPGELWGDIEDIIIKTIISAHSVLRHNYRTCFPQYLNGGTCACFEILGFDILLDHKLKPWLLEVNHSPSFTTDSCLDQEVKDALLCDAMTLVNLRGCDKRKVMEEDKRRVKERLFQCYRQPRESRKEKTESSHVAMLDQERYEDSHLGKYRRIYPGPDTEKYARFFKHNGSLFQETAASKAREECARQQLEEIRLKQEQQETSGTKRQKARDQNQGESAGEKSRPRAGLQSLSTHLAYRNRNWEKELLPGQLDTMRPQEIVEEEELERMKALLQRETLIRSLGIVEQLTRLQHPGPQGQKKLHESRDRLGSQELKSMSLVLLVLLRGAATEQGAPHFLHPVLPHESIPRILGALPSMNAAIPHVPRYHLQPKNFNWTGEPAAINSCSLSMKKAGRCYFSSARIRLTSQGQASRRLEAINRVLAGSVPPTLTPKQGYFLQPERVASDSWTECTLPSMVNSEHRAAKVPLCPASAPMLQRSRALLNINQFR

SEQ ID NO: 48792 - protein, 843 aa, Artificial Sequence
  derived and/or modified sequence
MPQCPTLESQEGENSEEKGDSSKEDPKETVALAFVRENPGAQNGLQNAQQQGKKKRKKKRLVINLSSCRYESVRRAAQQYGFREGGEDDDWTLYWTDYSVSLERVMEMKSYQKINHFPGMSEICRKDLLARNMSRMLKMFPKDFRFFPRTWCLPADWGDLQTYSRSRKNKTYICKPDSGCQGKGIFITRTVKEIKPGEDMICQLYISKPFIIDGFKFDLRIYVLVTSCDPLRIFVYNEGLARFATTSYSRPCTDNLDDICMHLTNYSINKHSSNFSRDAHSGSKRKLSTFSAYLEDHSYNVEQIWRDIEDVIIKTLISAHPIIRHNYHTCFPNHTLNSACFEILGFDILLDHKLKPWLLEVNHSPSFSTDSRLDKEVKDGLLYDTLVLINLESCDKKKVLEEERQRGQFLQQCCSREMRIEEAKGFRAVQLKKTETYEKENCGGFRLIYPSLNSEKYEKFFQDNNSLFQNTVASRAREEYARQLIQELRLKREKKPFQMKKKVEMQGESAGEQVRKKGMRGWQQKQQQKDKAATQASKQYIQPLTLVSYTPDLLLSVRGERKNETDSSLNQEAPTEEASSVFPKLTSAKPFSSLPDLRNINLSSSKLEPSKPNFSIKEAKSASAVNVFTGTVHLTSVETTPESTTQLSISPKSPPTLAVTASSEYSGPETDRVVSFKCKKQQTPPHLTQKKMLKSFLPTKSKSFWESPNTNWTLLKSDMNKPHLISELLTKLQLSGKLSFFPAHYNPKLGMNNLSQNPSLPGECHSRSDSSGEKRQLDVSSLLLQSPQSYNVTLRDLLVIATPAQLDPRPCRSHASAMRDPCMQDQEAYSHCLISGQKGCERS

SEQ ID NO: 48793 - protein, 185 aa, Artificial Sequence
  derived and/or modified sequence
QPMGALLLHPSRRGPAGVVASWTSSPAGRDGGVGIAGAWYFPRASSQAREMPQCPTLESQEGENSEEKGDSSKEDPKETVALAFVRENPGAQNGLQNAQQQGKKKRKKKRMPLKNSRKRRFPCFKKALICPGNLVRLQYDSTILTYQDPTAACAFQFLFNISPCLAPFRLIDEGKLVHFLIHSFP

SEQ ID NO: 48794 - protein, 891 aa, Artificial Sequence
  derived and/or modified sequence
MGALLLHPSRRGPAGVVASWTSSPAGRDGGVGIAGAWYFPRASSQAREMPQCPTLESQEGENSEEKGDSSKEDPKETVALAFVRENPGAQNGLQNAQQQGKKKRKKKRLVINLSSCRYESVRRAAQQYGFREGGEDDDWTLYWTDYSVSLERVMEMKSYQKINHFPGMSEICRKDLLARNMSRMLKMFPKDFRFFPRTWCLPADWGDLQTYSRSRKNKTYICKPDSGCQGKGIFITRTVKEIKPGEDMICQLYISKPFIIDGFKFDLRIYVLVTSCDPLRIFVYNEGLARFATTSYSRPCTDNLDDICMHLTNYSINKHSSNFSRDAHSGSKRKLSTFSAYLEDHSYNVEQIWRDIEDVIIKTLISAHPIIRHNYHTCFPNHTLNSACFEILGFDILLDHKLKPWLLEVNHSPSFSTDSRLDKEVKDGLLYDTLVLINLESCDKKKVLEEERQRGQFLQQCCSREMRIEEAKGFRAVQLKKTETYEKENCGGFRLIYPSLNSEKYEKFFQDNNSLFQNTVASRAREEYARQLIQELRLKREKKPFQMKKKVEMQGESAGEQVRKKGMRGWQQKQQQKDKAATQASKQYIQPLTLVSYTPDLLLSVRGERKNETDSSLNQEAPTEEASSVFPKLTSAKPFSSLPDLRNINLSSSKLEPSKPNFSIKEAKSASAVNVFTGTVHLTSVETTPESTTQLSISPKSPPTLAVTASSEYSGPETDRVVSFKCKKQQTPPHLTQKKMLKSFLPTKSKSFWESPNTNWTLLKSDMNKPHLISELLTKLQLSGKLSFFPAHYNPKLGMNNLSQNPSLPGECHSRSDSSGEKRQLDVSSLLLQSPQSYNVTLRDLLVIATPAQLDPRPCRSHASAMRDPCMQDQEAYSHCLISGQKGCERS

SEQ ID NO: 48795 - protein, 101 aa, Artificial Sequence
  derived and/or modified sequence
MPQCPTLESQEGENSEEKGDSSKEDPKETVALAFVRENPGAQNGLQNAQQQGKKKRKKKRLVINLSSCRYESVRRAAQQYGFREGGEDDDWTLYWTDYSVS

SEQ ID NO: 48796 - DNA, 1380 bp, Artificial Sequence
  derived and/or modified sequence
atggagcccagcacctgcagaaccatggagagcgaggaggactacgtggaggagaaggagagcgagaagtgcgtgaaggagggcgtgaccaaccccagcaacagcagccagcaggccctgctgaaggccgactacaaggccctgaagaacggcgtgcccagccccatcatggccaccaagatccccaagaaggtgatcgcccccgtggacaccggcgacctggaggccggcagaagaaagagaagaagaaagagaagaagcctggccatcaacctgaccaactgcaagtacgagagcgtgagaagagccgcccagatgtgcggcctgaaggaggtgggcgaggacgaggagtggaccctgtactggaccgactgcgccgtgagcctggagagagtgatggacatgaagagattccagaagatcaaccacttccccggcatgaccgagatctgcagaaaggacctgctggccagaaacctgaacagaatgtacaagctgtaccccagcgagtacaacatcttccccagaacctggtgcctgcccgccgactacggcgacttccagagctacggcagacagagaaaggccagaacctacatctgcaagcccgacagcggctgccagggcagaggcatcttcatcaccagaaaccccagagagatcaagcccggcgagcacatgatctgccagcagtacatcagcaagcccctgctgatcgacggcttcaagttcgacatgagagtgtacgtgctgatcaccagctgcgaccccctgagaatcttcacctacgaggagggcctggccagattcgccaccaccccctacatggagcccagccacaacaacctggacaacgtgtgcatgcacctgaccaactacgccatcaacaagcacaacgagaacttcgtgagagacggcgccgtgggcagcaagagaaagctgagcaccctgaacatctggctgcaggagcacagctacaaccccggcgagctgtggggcgacatcgaggacatcatcatcaagaccatcatcagcgcccacagcgtgctgagacacaactacagaacctgcttcccccagtacctgaacggcggcacctgcgcctgcttcgagatcctgggcttcgacatcctgctggaccacaagctgaagccctggctgctggaggtgaaccacagccccagcttcaccaccgacagctgcctggaccaggaggtgaaggacgccctgctgtgcgacgccatgaccctggtgaacctgagaggctgcgacaagagaaaggtgatggaggaggacaagagaagagtgaaggagagactgttccagtgctacagacagcccagagagagcagatgcgccagatgcctggcctgcgtgtag

SEQ ID NO: 48797 - DNA, 2448 bp, Artificial Sequence
  derived and/or modified sequence
atggagcccagcacctgcagaaccatggagagcgaggaggactacgtggaggagaaggagagcgagaagtgcgtgaaggagggcgtgaccaaccccagcaacagcagccagcaggccctgctgaaggccgactacaaggccctgaagaacggcgtgcccagccccatcatggccaccaagatccccaagaaggtgatcgcccccgtggacaccggcgacctggaggccggcagaagaaagagaagaagaaagagaagaagcctggccatcaacctgaccaactgcaagtacgagagcgtgagaagagccgcccagatgtgcggcctgaaggaggtgggcgaggacgaggagtggaccctgtactggaccgactgcgccgtgagcctggagagagtgatggacatgaagagattccagaagatcaaccacttccccggcatgaccgagatctgcagaaaggacctgctggccagaaacctgaacagaatgtacaagctgtaccccagcgagtacaacatcttccccagaacctggtgcctgcccgccgactacggcgacttccagagctacggcagacagagaaaggccagaacctacatctgcaagcccgacagcggctgccagggcagaggcatcttcatcaccagaaaccccagagagatcaagcccggcgagcacatgatctgccagcagtacatcagcaagcccctgctgatcgacggcttcaagttcgacatgagagtgtacgtgctgatcaccagctgcgaccccctgagaatcttcacctacgaggagggcctggccagattcgccaccaccccctacatggagcccagccacaacaacctggacaacgtgtgcatgcacctgaccaactacgccatcaacaagcacaacgagaacttcgtgagagacggcgccgtgggcagcaagagaaagctgagcaccctgaacatctggctgcaggagcacagctacaaccccggcgagctgtggggcgacatcgaggacatcatcatcaagaccatcatcagcgcccacagcgtgctgagacacaactacagaacctgcttcccccagtacctgaacggcggcacctgcgcctgcttcgagatcctgggcttcgacatcctgctggaccacaagctgaagccctggctgctggaggtgaaccacagccccagcttcaccaccgacagctgcctggaccaggaggtgaaggacgccctgctgtgcgacgccatgaccctggtgaacctgagaggctgcgacaagagaaaggtgatggaggaggacaagagaagagtgaaggagagactgttccagtgctacagacagcccagagagagcagaaaggagaagaccgagagcagccacgtggccatgctggaccaggagagatacgaggacagccacctgggcaagtacagaagaatctaccccggccccgacaccgagaagtacgccagattcttcaagcacaacggcagcctgttccaggagaccgccgccagcaaggccagagaggagtgcgccagacagcagctggaggagatcagactgaagcaggagcagcaggagaccagcggcaccaagagacagaaggccagagaccagaaccagggcgagagcgccggcgagaagagcagacccagagccggcctgcagagcctgagcacccacctggcctacagaaacagaaactgggagaaggagctgctgcccggccagctggacaccatgagaccccaggagatcgtggaggaggaggagctggagagaatgaaggccctgctgcagagagagaccctgatcagaagcctgggcatcgtggagcagctgaccagactgcagcaccccggcccccagggccagaagaagctgcacgagagcagagacagactgggcagccaggagctgaagagcatgagcctggtgctgctggtgctgctgagaggcgccgccaccgagcagggcgccccccacttcctgcaccccgtgctgccccacgagagcatccccagaatcctgggcgccctgcccagcatgaacgccgccatcccccacgtgcccagataccacctgcagcccaagaacttcaactggaccggcgagcccgccgccatcaacagctgcagcctgagcatgaagaaggccggcagatgctacttcagcagcgccagaatcagactgaccagccagggccaggccagcagaagactggaggccatcaacagagtgctggccggcagcgtgccccccaccctgacccccaagcagggctacttcctgcagcccgagagagtggccagcgacagctggaccgagtgcaccctgcccagcatggtgaacagcgagcacagagccgccaaggtgcccctgtgccccgccagcgcccccatgctgcagagaagcagagccctgctgaacatcaaccagttcagatag

SEQ ID NO: 48798 - DNA, 1380 bp, Artificial Sequence
  derived and/or modified sequence
atggagccctcgacatgcaggaccatggaatccgaggaggactatgtagaggagaaggagtcagagaaatgtgtgaaagagggggtaacaaacccaagcaacagctcccagcaagcactgctgaaagccgactataaagctttgaagaacggcgtaccttcgcctatcatggccaccaagattccaaaaaaggtcattgcaccggttgacaccggagacctagaagccggaaggagaaaacgccgtcgcaagcgccgctccttggccattaatctcaccaactgcaaatatgaatcggtgcgcagggccgcgcaaatgtgcggacttaaagaggtcggagaggatgaagaatggaccctgtactggacggattgtgcagtctccctcgagcgcgtaatggacatgaagaggtttcaaaagatcaaccactttcccggaatgacggaaatttgccgcaaggacctcctcgctcgaaacctaaaccggatgtataagctgtacccctccgagtacaatatttttccgcggacttggtgtctgccggcggattacggggattttcagagctatgggcggcagcgtaaagcgagaacctacatctgtaaacccgacagcggatgtcagggcagaggcatctttattaccagaaaccctcgtgaaatcaagccaggcgagcatatgatctgccagcagtatatttcaaagcctctgctaattgacggcttcaaattcgacatgagagtctacgtcctgattacctcatgcgatcccttacggatcttcacatatgaggaaggcctggcccgattcgccactacgccttatatggaaccgtcccacaataacttggacaacgtgtgcatgcatttgaccaattatgcaataaacaagcataatgaaaattttgtgcgggacggagctgtggggtctaaaagaaaactctctacactgaatatctggttacaggaacacagctacaatcctggggagttatggggcgatatcgaagatatcataattaagactattatttctgctcattctgtcctccggcacaactatcggacctgctttcctcaatacctgaacggtggcacctgcgcatgttttgagattctcggcttcgacattctactcgaccacaaattgaaaccatggctgttagaggtgaatcactcaccttcctttaccacggactcatgtctcgaccaggaagtcaaagatgctttactgtgcgatgctatgactttagttaaccttcgaggctgtgataagaggaaggtaatggaggaggacaaacggagggttaaggaacgcctgtttcagtgctacaggcagcctagggaatccaggtgtgcacgatgtctagcatgtgtttag

SEQ ID NO: 48799 - DNA, 2448 bp, Artificial Sequence
  derived and/or modified sequence
atggaacctagcacttgccgcactatggagagtgaggaggactacgtcgaggagaaagaatctgaaaaatgcgttaaggaaggagtaaccaatccttctaatagttcacaacaggccctgctgaaagccgactacaaagcactcaagaacggggtgccatctccaatcatggccactaagatcccgaaaaaagtgattgcccctgtggatacaggagacctcgaggccggtcggagaaagaggaggcgaaaacggcgttcgttggctatcaacctcactaattgtaagtacgagtccgtcaggcgggccgcacagatgtgcggcttgaaggaggttggcgaagacgaggagtggacattatactggacagattgcgcggtcagcctcgagagagttatggatatgaagcgcttccagaagattaaccattttccaggcatgaccgaaatttgcaggaaggacttgttagcacgcaacttgaacaggatgtacaaactctacccaagtgagtataacatattccctcgcacttggtgcctgcctgctgattacggagatttccagtcatatggaagacagaggaaggctcggacttatatctgcaagccggatagcgggtgtcagggtcgcggcatctttataactcgcaaccctcgcgaaatcaagccaggagagcatatgatttgccagcagtacatcagcaaacctcttcttattgatggcttcaagtttgatatgagagtttatgtacttatcacatcatgcgatcccttgaggatctttacctacgaggaaggactggcgcggttcgccactacaccttatatggagccctctcacaataacctggacaatgtgtgcatgcatctcacaaactacgcgatcaacaagcataatgaaaattttgtcagggacggcgccgtgggatccaagaggaagctatcaaccctgaatatttggctgcaggaacacagctacaaccctggggaactgtggggcgatatcgaggacattatcatcaagaccatcatcagtgcccatagtgttctgcgtcataattacaggacctgttttccgcagtacctgaatggagggacctgcgcctgctttgaaattctgggatttgacatcctgctggaccataagctgaagccttggctgctcgaggtgaaccattctcctagctttaccacagatagctgtctcgaccaagaggtcaaagatgcgctgctctgtgatgccatgactctagtgaacctgcgaggatgtgataagagaaaggttatggaagaggataaacgaagagtgaaagaacgactgtttcagtgctacagacagccaagagaatcgagaaaggaaaaaactgagtccagccacgtggccatgttagatcaggagcgttacgaagactcacacctcggtaagtatagacgcatttatcccggtcccgacacagagaaatacgcacgattctttaagcataacggaagcttatttcaggagaccgccgcctccaaggccagagaagagtgcgcccggcaacaactagaggagattcgacttaaacaagagcagcaggaaacttccggaaccaaaaggcagaaggcaagggatcaaaatcagggagaaagtgcaggcgaaaagtcacgacctcgcgccggcctacaatccctctcaacccatctggcttaccggaacaggaattgggaaaaagaactgcttcctggacagctggacaccatgagaccccaagagattgtcgaggaagaggaactggagcgcatgaaggctttgcttcagcgagaaactctgatccgcagtctcgggatcgtagaacagctgactagactgcagcatcccggccctcagggacagaaaaagctccatgagtctagggacagactcggaagtcaggagctcaagtccatgtccctcgttcttctggtgctgctgaggggggcggccacagaacagggcgctccacacttcctgcacccggtcctgcctcacgagtcaattcccaggatcctgggggccctgccgtccatgaacgccgctattcctcacgtgccccgataccacctgcagccgaagaacttcaactggacaggtgaacctgccgccattaattcttgctccctctccatgaagaaggccggccggtgctatttttccagcgcccgaatcaggctcacaagccagggtcaggcatcaaggcggctggaggccattaacagggtgctcgctggaagcgtgcctcccacgctgactcccaaacagggctactttttacaacccgagagggtggctagtgattcttggaccgagtgtacccttccatcaatggtgaatagtgagcacagagcggccaaggtgcctctctgtccagctagcgctcctatgctgcagcgaagcagggcacttttgaatatcaaccagtttcgctag

SEQ ID NO: 48800 - DNA, 1380 bp, Artificial Sequence
  derived and/or modified sequence
atggagcccagcacctgcaggaccatggagagtgaagaagattatgtggaggagaaggagagcgagaagtgtgtgaaggagggcgtgaccaaccccagcaacagcagccagcaggccctgctgaaggctgactacaaggccctgaagaatggagtgcccagccccatcatggccaccaagatccccaagaaggtgattgcccctgtggacacaggagacctggaggccggccgcaggaagagaagaaggaagagaagaagcctggccatcaacctgaccaactgcaagtatgaatctgtgagaagagctgcccagatgtgtggcctgaaggaggtgggggaggatgaggagtggaccctgtactggacagactgtgctgtgtccctggagcgggtgatggacatgaagcgcttccagaagatcaaccacttccctggcatgacagagatctgcaggaaggacctgctggccaggaacctgaacaggatgtacaagctgtaccccagcgagtacaacatcttccccaggacctggtgcctgcctgctgactatggagacttccagagctatggccggcagaggaaggcccggacctacatctgcaagccagattctggctgccagggccggggcatcttcatcaccaggaacccccgggagatcaagccaggagagcacatgatctgccagcagtacatcagcaagcccctgctgattgatggcttcaagtttgacatgagggtgtatgtgctgatcaccagctgtgaccccctgcgcatcttcacctatgaggagggcctggccaggtttgccaccaccccctacatggagcccagccacaacaacctggacaacgtgtgcatgcacctgaccaactatgccatcaacaagcacaatgaaaattttgtgagagatggagctgtgggcagcaagaggaagctgagcaccctgaacatctggctgcaggagcacagctacaaccctggagagctgtggggagacatcgaggacatcatcatcaagaccatcatcagcgcccacagcgtgctgcggcacaactaccgcacctgcttcccccagtacctgaatggaggcacctgtgcctgctttgagatcctgggctttgacatcctgctggaccacaagctgaagccctggctgctggaggtgaaccacagccccagcttcaccacagacagctgcctggaccaggaggtgaaggatgccctgctgtgtgatgccatgaccctggtgaacctgcggggctgtgacaagaggaaggtgatggaggaggacaagagaagagtgaaggagcggctcttccagtgctaccggcagccccgggagagccgctgtgcccgctgcctggcctgtgtgtag

SEQ ID NO: 48801 - DNA, 2448 bp, Artificial Sequence
  derived and/or modified sequence
atggagcccagcacctgcaggaccatggagagtgaagaagattatgtggaggagaaggagagcgagaagtgtgtgaaggagggcgtgaccaaccccagcaacagcagccagcaggccctgctgaaggctgactacaaggccctgaagaatggagtgcccagccccatcatggccaccaagatccccaagaaggtgattgcccctgtggacacaggagacctggaggccggccgcaggaagagaagaaggaagagaagaagcctggccatcaacctgaccaactgcaagtatgaatctgtgagaagagctgcccagatgtgtggcctgaaggaggtgggggaggatgaggagtggaccctgtactggacagactgtgctgtgtccctggagcgggtgatggacatgaagcgcttccagaagatcaaccacttccctggcatgacagagatctgcaggaaggacctgctggccaggaacctgaacaggatgtacaagctgtaccccagcgagtacaacatcttccccaggacctggtgcctgcctgctgactatggagacttccagagctatggccggcagaggaaggcccggacctacatctgcaagccagattctggctgccagggccggggcatcttcatcaccaggaacccccgggagatcaagccaggagagcacatgatctgccagcagtacatcagcaagcccctgctgattgatggcttcaagtttgacatgagggtgtatgtgctgatcaccagctgtgaccccctgcgcatcttcacctatgaggagggcctggccaggtttgccaccaccccctacatggagcccagccacaacaacctggacaacgtgtgcatgcacctgaccaactatgccatcaacaagcacaatgaaaattttgtgagagatggagctgtgggcagcaagaggaagctgagcaccctgaacatctggctgcaggagcacagctacaaccctggagagctgtggggagacatcgaggacatcatcatcaagaccatcatcagcgcccacagcgtgctgcggcacaactaccgcacctgcttcccccagtacctgaatggaggcacctgtgcctgctttgagatcctgggctttgacatcctgctggaccacaagctgaagccctggctgctggaggtgaaccacagccccagcttcaccacagacagctgcctggaccaggaggtgaaggatgccctgctgtgtgatgccatgaccctggtgaacctgcggggctgtgacaagaggaaggtgatggaggaggacaagagaagagtgaaggagcggctcttccagtgctaccggcagccccgggagagcaggaaggagaagacagagagcagccacgtggccatgctggaccaggagagatatgaggacagccacctgggcaagtaccgccgcatctacccaggccctgacacagagaagtatgcccgcttcttcaagcacaacggcagcctcttccaggagacagctgccagcaaggcccgggaggagtgtgcccggcagcagctggaggagatccggctgaagcaggagcagcaggagaccagcggcaccaagaggcagaaggcccgggaccagaaccagggcgagagcgctggggagaagagccggcccagggctggcctgcagagcctgagcacccacctggcctacagaaacagaaactgggagaaggagctgctgcccggccagctggacaccatgaggccccaggagatcgtggaggaggaggagctggagaggatgaaggccctgctgcagcgggagaccctcatccgcagcctgggcatcgtggagcagctgacccggctgcagcaccctggcccccagggccagaagaagctgcacgagagccgggaccggctgggcagccaggagctgaagtccatgagcctggtgctgctggtgctgctgcggggggccgccacagagcagggcgccccccacttcctgcaccctgtgctgccccatgagagcatcccccgcatcctgggcgccctgcccagcatgaatgctgccatcccccacgtgccccgctaccacctgcagcccaagaacttcaactggacaggagagcctgctgccatcaacagctgcagcctgtccatgaagaaggccggccgctgctacttcagcagcgcccgcatccggctgaccagccagggccaggccagccggcggctggaggccatcaacagagtgctggccggctctgtgccccccaccctgacccccaagcagggctacttcctgcagcctgagcgggtggccagtgacagctggacagagtgcaccctgcccagcatggtgaacagcgagcacagagctgccaaggtgcccctgtgcccagccagcgcccccatgctgcagaggagccgggccctgctgaacatcaaccagttcagatag

SEQ ID NO: 48802 - DNA, 1380 bp, Artificial Sequence
  derived and/or modified sequence
atggagcccagcacctgccggaccatggagagcgaggaggactacgttgaggagaaggagtctgagaaatgtgtgaaggaaggggttacaaacccctccaattcgagccagcaggctctgctgaaggccgattataaggctctgaaaaatggagtgccttcccctattatggccacgaaaatccccaaaaaggttattgctcccgtggacaccggtgacctcgaagccgggaggagaaagcggcgcagaaaaagacgcagtctggctattaacctgactaactgcaagtatgaaagcgttcggagagcggcccagatgtgcggtctgaaggaagttggcgaagacgaggagtggacactgtattggacagattgtgctgtgtccttggagcgagtgatggacatgaagaggtttcagaaaatcaaccacttcccaggcatgactgaaatctgcagaaaagaccttctggccaggaatctcaaccgcatgtacaaactctatccttctgaatacaacatctttccaagaacgtggtgcttaccagccgattacggcgatttccaatcatacggcaggcagagaaaagccagaacctatatctgcaagccagactcagggtgccaggggcgaggtatatttattacaaggaaccctcgcgaaatcaagccaggggagcacatgatttgtcagcagtacatatctaaaccccttctcattgacggattcaagttcgacatgagggtctacgtgctaataacatcgtgcgatcctctacgcattttcacatatgaagaggggctggcacgcttcgctacaaccccatacatggagccctcccataacaatctcgacaatgtgtgtatgcacctgacaaattatgctattaacaaacacaacgagaattttgtgcgggacggagccgttgggtccaagcgcaagctctcaactctgaacatatggctgcaagagcatagctacaatccaggcgagctgtggggcgatatagaagacataattatcaaaacaattatttctgcacacagcgttcttcgccacaattatcgaacctgcttcccacagtacctgaatggagggacctgtgcttgcttcgaaatcctaggctttgatatcctgttggaccataagcttaaaccatggttgctggaggttaaccactctccttcctttacaactgactcatgcctcgatcaagaagtgaaggatgccctcttatgcgacgccatgacccttgtgaatcttagaggctgtgataagaggaaagttatggaggaagataaacgccgcgtgaaggagcgactctttcagtgttaccgtcaaccacgggaatcccgatgcgcaaggtgcttggcttgtgtttag

SEQ ID NO: 48803 - DNA, 2448 bp, Artificial Sequence
  derived and/or modified sequence
atggagcccagcacctgccggaccatggagagcgaggaggactacgtggaagaaaaagaaagcgagaagtgtgtgaaggagggcgtaaccaatcctagcaacagcagccagcaggccctgctgaaagctgactacaaggccctgaaaaatggagtgccttcacctattatggctacaaaaatcccaaaaaaggtcattgctcccgtggacaccggggacctcgaagcggggcggcgcaaacgacgccggaaacgccgaagcttagcaataaacttaactaattgcaaatacgagtctgtgaggagggctgcacagatgtgcggactcaaggaggtaggcgaggatgaggaatggaccctgtactggacagattgcgctgtaagtctggaaagggtcatggacatgaagagattccagaagattaaccatttcccagggatgaccgaaatatgccgcaaggatctgctcgcccgaaacctcaatcgcatgtataagctctaccccagcgaatacaacatctttccacgaacttggtgcctgcccgccgactacggcgattttcagtcatacggtcgtcagcgcaaagcgagaacctatatatgcaagcccgactcaggatgtcagggtcgcgggatttttattactcgcaatccaagagaaattaaacccggggagcacatgatatgccagcaatacatctctaagcctctcctgattgatggcttcaagttcgatatgcgggtgtacgtgttgattacttcctgcgatccacttaggatcttcacctatgaagaaggtctcgcccgttttgctaccacaccctacatggagccatcccacaataatcttgacaacgtatgcatgcacctaaccaattacgctatcaacaaacacaacgagaacttcgtgagggacggcgccgttggcagcaaaagaaaacttagcacactgaacatttggctccaggagcactcatataacccaggcgagctttggggcgatattgaagatatcatcatcaagaccattatctctgcccactcagtattgcgccacaattatcggacctgcttccctcagtacctgaacggaggaacctgcgcctgtttcgaaattcttggctttgatatcctcctggaccacaagctcaagccttggctgctggaagtgaaccattcgccaagcttcacaacagacagctgcctggatcaggaggtgaaagacgccctgctgtgcgacgccatgactctcgtgaatctgaggggttgcgacaaaagaaaagtgatggaggaggacaaacggcgcgtcaaggagcggctattccagtgttaccgacagccgcgagagagcaggaaggaaaagaccgaaagcagtcacgttgcaatgttggaccaggaacggtatgaggactctcatctgggcaagtaccgccggatctacccagggccagatacagaaaagtatgcccgcttttttaagcacaacggcagcttatttcaggagaccgccgcctcgaaagcacgcgaggaatgtgctaggcaacagctcgaggagattcgcttaaaacaggaacaacaagagacttctgggaccaagaggcagaaagcccgtgatcagaaccagggcgaatctgccggagaaaagtctagacccagagctggcctacagagcttaagcacgcacctggcttatcgaaatcggaactgggaaaaggaactgctgcccgggcagttggatacgatgcgcccacaggaaattgtagaagaggaagaattggaaagaatgaaggccctgttgcagagggagacacttatcaggagtctgggtatcgtggagcaactaactcggttacagcacccggggccacagggacagaagaagttgcacgagtctagagaccgccttggctctcaggagcttaagagtatgtccttggtcctgctggtactgctgaggggtgctgccacagagcaaggggccccacactttttacatcccgtcttgccccatgagagcatacctcggattttgggcgcacttccgtccatgaacgccgccattccacacgtgccaaggtatcacctgcaaccaaaaaatttcaactggacgggggaacctgccgcaatcaattcctgttccctgtctatgaagaaagcggggaggtgttactttagcagcgccagaatccggctgacctctcagggacaagccagtcgaaggctggaagctataaatcgtgtcctggcaggttcagttccacctactctcacacccaagcaaggctattttcttcagcccgagagggtcgcctcagatagctggactgagtgcacattgccttcgatggtgaattcagagcatcgggccgccaaagtgccactctgccctgccagtgcccctatgctccagcgatcccgggctctgttgaacattaatcaatttcgctag

SEQ ID NO: 48804 - DNA, 1380 bp, Artificial Sequence
  derived and/or modified sequence
atggaaccctccacttgcagaactatggaatcagaagaagattatgtcgaggaaaaggagtcggagaaatgcgtcaaggagggagtgactaatcctagtaattctagtcagcaagcattattaaaagccgactacaaagccctcaagaacggagttccatctccaatcatggccacaaagattcctaagaaggtgatcgcccctgtcgatactggggatctggaggccggtcggcgaaaaaggaggagaaaaagaaggagtcttgcgataaatttgaccaactgcaaatatgagagtgtcaggcgggcagcgcagatgtgcggactgaaggaagtgggagaagatgaagaatggactctatactggacggactgcgcagtcagcctggagagagtcatggacatgaaaaggtttcaaaagatcaaccatttcccaggcatgaccgaaatctgtaggaaagatcttctggctagaaacctgaatagaatgtataaactgtatccctcagaatataacatatttccgagaacatggtgtttgcccgcagactacggcgactttcagagctacggcagacagagaaaagctaggacttatatatgtaagcccgattccggttgtcagggaaggggcatatttattacccgtaacccaagggagattaaacccggagaacatatgatttgtcaacagtacataagcaagccactgctaatcgacgggtttaagtttgacatgagggtttatgtacttattacctcatgtgatccactgcgaattttcacatacgaggaaggtctggcacggtttgcaacaacaccatacatggagccaagtcacaacaacttggataatgtgtgcatgcatctgacaaattatgctattaacaagcacaatgagaatttcgtacgggacggggcagtgggtagtaaaaggaaacttagcactcttaatatttggttgcaggaacatagctacaacccaggtgagctgtggggagacattgaagatatcatcatcaagaccattatcagcgcacactctgtgctccgacataactatagaacttgcttccctcagtacctgaatggtggaacttgtgcgtgcttcgagattctgggctttgacattctgctggatcacaaattaaaaccctggcttctggaagtgaatcactcgccgagctttaccacagactcatgtcttgaccaggaggtcaaagacgctttgctgtgtgacgccatgactctagtaaatctgcgcggatgcgataagcggaaggtgatggaggaggacaaacgcagggtgaaggaacggctttttcaatgctatcgccaaccaagggagtcacggtgcgcccgatgcctggcgtgtgtgtag

SEQ ID NO: 48805 - DNA, 2448 bp, Artificial Sequence
  derived and/or modified sequence
atggaaccctcgacgtgcaggactatggagagcgaagaagattacgtggaagagaaggagagcgaaaaatgcgtgaaagaaggcgtcaccaatcctagcaactcttcacagcaagctctccttaaagccgattacaaagctttgaaaaatggggtgccatctccaatcatggccacaaagatcccaaaaaaagtgatagctcccgtggacacgggcgatctcgaagcgggtagacgcaagagacgacgcaagagaagaagtctcgctatcaacctaacaaattgcaagtacgaatccgtcagacgggctgcccaaatgtgtggactgaaagaggttggggaagatgaagagtggaccctgtactggacagattgcgcggtgtcgcttgagagggtcatggatatgaagagattccagaaaattaaccacttcccaggcatgaccgagatttgcagaaaggatctgttggcaaggaatctcaaccgaatgtacaagttatatccctcagaatacaacatttttcccagaacctggtgtctccccgctgactacggcgatttccaaagttacggccgtcaaaggaaggcgaggacctatatctgcaaacccgatagcggatgtcagggcaggggtatctttatcacaaggaaccccagagagattaaacctggggagcatatgatttgccaacagtacattagcaagccactgctgattgatggcttcaagttcgatatgagggtatacgtcctgattaccagctgtgatccactgcgtatttttacttatgaggagggtctggcgagatttgccacaaccccgtacatggagccatcccacaataatctggataatgtatgtatgcacctgacaaactatgcgatcaataaacataatgaaaacttcgtaagagacggggcagtaggatccaagcgaaagctgagcacactcaacatctggttgcaagaacatagctacaaccctggggagctatggggtgacatagaagatattattataaagactatcatcagcgctcactccgtcctgcgccataactacagaacttgtttccctcaataccttaatgggggtacatgcgcatgctttgagatactgggctttgatatcttactcgaccacaagctcaagccttggctgttagaagtcaaccatagtcccagttttacaactgacagttgcctcgatcaggaagttaaggacgcacttttatgcgacgccatgactttggttaacctgaggggctgcgacaagcgaaaagtgatggaggaagacaaaaggcgggtgaaagagcgcctttttcaatgctacagacagcccagggagagcagaaaagagaaaacagaatcttcccacgtggcgatgctcgatcaggagcgctacgaagattcccacctcgggaaatatcgccgaatctaccccggtcctgatactgaaaaatacgccaggttcttcaaacataatgggtcactgttccaggagaccgcggcttccaaagctcgcgaagagtgcgcaaggcagcaactagaggagatcagactcaagcaggagcaacaggaaacctctggaacgaagagacagaaggctagagatcagaaccagggcgaatcagctggagagaaaagtcggcctagggctggactgcagagcctgagtacccatctcgcgtacaggaatcgaaattgggagaaggagctactgccgggacaattggatactatgaggccgcaggaaattgtggaagaggaggaacttgaaagaatgaaggccttactccagcgcgaaaccttgataagatctctgggcatcgtagagcagctcacgcggctgcaacatcccggaccgcaaggccagaaaaaactgcacgagagccgggatagacttggctctcaggagctaaagtccatgagcttggttcttctggtgctgttgcggggtgccgcaacagagcaaggagccccacacttcctgcacccagtgctcccccacgagtctatccccaggatcttgggcgcactgcccagcatgaatgctgccatcccacacgtacctcgctatcatctccagccaaaaaattttaattggacaggcgagccagccgctattaacagttgctccctgtcaatgaaaaaggccggaaggtgctacttttcctccgccagaatccgccttacctcgcagggccaagcatctcgaaggttggaggccataaacagggtgctggccggtagtgttcccccaacactgacacctaagcaaggctacttccttcaacccgagcgggtcgccagcgattcctggaccgagtgtaccctgcctagcatggtgaactctgaacatagggccgctaaggtcccactctgccccgctagcgctcccatgctgcagagaagccgggctctcctcaacatcaatcagttccgttag

SEQ ID NO: 48806 - DNA, 1780 bp, Artificial Sequence
  derived and/or modified sequence
aacggcggcggccacgggcttgctagaggaagcgctgccccggcagccgcagccacggccaccgggagctaggagtgaacccctgcgggggagcagcttccccctcgcgatcgtggggacagccagtcctgtgaaacgaggaggcggttccggacgcccagaaacgcccagggagacctggagccgggggaagaggggacatgagcggccagctgagtccatccccaggcggctaggggcggacccagcagcccctcagctctcctcgtaaccacggaatctgagagaatggagccgagtacctgtaggaccatggaatcagaggaagactatgttgaggaaaaggaatctgagaagtgtgttaaagagggagttaccaacccctctaactcttcacagcaggctctcttaaaagctgactataaggcattaaaaaatggggttccctcacccattatggccacaaaaattccgaagaaagtcatagccccagttgacacaggcgacttagaagctgggaggaggaagagaaggcggaaacgcagatcactggccatcaacctgaccaactgcaagtatgagagtgtgcgtcgggcagcccaaatgtgtggcctgaaggaggtgggggaggatgaagagtggactctgtactggacagactgcgctgtctcactggaacgagtcatggacatgaagaggtttcagaaaatcaaccacttccctggcatgacagaaatctgccgcaaagatctgctggctcggaacctcaaccgcatgtacaaactctatccctctgagtacaacatcttcccccgcacctggtgcctccccgcagactatggggacttccagtcctacggtcgtcagcgaaaagcccgcacatatatctgcaagccagacagtggctgtcagggacgtggcatcttcattacccgaaatccccgggagatcaagccaggagagcatatgatctgccagcaatacatctccaagcccctcctcattgatggcttcaagtttgatatgcgagtctacgtcctgatcacatcctgtgaccctctccggatcttcacatatgaggagggcctagcccgttttgccaccacgccctatatggagcccagccataacaacctggacaatgtctgcatgcacctgaccaactatgctatcaacaaacacaatgagaattttgtccgggatggcgctgtgggcagtaagaggaagctgtcgacactcaacatctggctgcaagagcacagctacaaccctggagagctgtggggggacatcgaggacatcatcatcaaaaccatcatctcagcccattctgttctacgccacaactaccgaacctgttttccccagtatctgaatggaggtacatgtgcctgttttgaaatccttggttttgacatcttgctggaccacaagttgaagccctggctgctagaggtaaaccactctccaagctttaccacggactcatgccttgatcaagaagtaaaggatgcacttctctgtgatgctatgacccttgtcaacctccggggctgtgacaaaaggaaggtgatggaggaggataagcggcgagtcaaggaacggcttttccagtgctaccgacagccacgagaatctaggtgtgctaggtgtctggcatgtgtttagttcttcattattcctgagagtaaaagtcctcctttagatgaagaatgtggcctggggctgatttgctatcaaaaacaactttttgcatagataatatgttcatatttgcatt

SEQ ID NO: 48807 - DNA, 2738 bp, Artificial Sequence
  derived and/or modified sequence
gcaacggcggcggccacgggcttgctagaggaagcgctgccccggcagccgcagccacggccaccgggagctaggagtgaacccctgcgggggagcagcttccccctcgcgatcgtggggacagccagtcctgtgaaacgaggaggcggttccggacgcccagaaacgcccagggagacctggagccgggggaagaggggacatgagcggccagctgagtccatccccaggcggctaggggcggacccagcagcccctcagctctcctcgtaaccacggaatctgagagaatggagccgagtacctgtaggaccatggaatcagaggaagactatgttgaggaaaaggaatctgagaagtgtgttaaagagggagttaccaacccctctaactcttcacagcaggctctcttaaaagctgactataaggcattaaaaaatggggttccctcacccattatggccacaaaaattccgaagaaagtcatagccccagttgacacaggcgacttagaagctgggaggaggaagagaaggcggaaacgcagatcactggccatcaacctgaccaactgcaagtatgagagtgtgcgtcgggcagcccaaatgtgtggcctgaaggaggtgggggaggatgaagagtggactctgtactggacagactgcgctgtctcactggaacgagtcatggacatgaagaggtttcagaaaatcaaccacttccctggcatgacagaaatctgccgcaaagatctgctggctcggaacctcaaccgcatgtacaaactctatccctctgagtacaacatcttcccccgcacctggtgcctccccgcagactatggggacttccagtcctacggtcgtcagcgaaaagcccgcacatatatctgcaagccagacagtggctgtcagggacgtggcatcttcattacccgaaatccccgggagatcaagccaggagagcatatgatctgccagcaatacatctccaagcccctcctcattgatggcttcaagtttgatatgcgagtctacgtcctgatcacatcctgtgaccctctccggatcttcacatatgaggagggcctagcccgttttgccaccacgccctatatggagcccagccataacaacctggacaatgtctgcatgcacctgaccaactatgctatcaacaaacacaatgagaattttgtccgggatggcgctgtgggcagtaagaggaagctgtcgacactcaacatctggctgcaagagcacagctacaaccctggagagctgtggggggacatcgaggacatcatcatcaaaaccatcatctcagcccattctgttctacgccacaactaccgaacctgttttccccagtatctgaatggaggtacatgtgcctgttttgaaatccttggttttgacatcttgctggaccacaagttgaagccctggctgctagaggtaaaccactctccaagctttaccacggactcatgccttgatcaagaagtaaaggatgcacttctctgtgatgctatgacccttgtcaacctccggggctgtgacaaaaggaaggtgatggaggaggataagcggcgagtcaaggaacggcttttccagtgctaccgacagccacgagaatctaggaaagaaaaaactgagtcatcccatgtggcaatgctggaccaggaacgatatgaggattctcacctgggaaaataccggcggatctaccctgggcctgacacagagaagtatgcccgcttcttcaagcacaatggctccctcttccaagagactgctgcttccaaggccagagaggagtgtgccaggcagcaactagaggagatccgccttaagcaggaacagcaggagacctcgggcactaagaggcaaaaggccagggaccagaaccagggtgaatcagctggggagaaaagccgacccagggcagggctccagagcctttccacccacttggcttacaggaaccgcaactgggagaaagagctgctgccgggacagctggacaccatgaggcctcaagaaattgtggaagaggaggagctggagcggatgaaggccctgctacaaagggagactctcatccgaagcctgggtattgtagagcagctcacccgtctgcagcaccctggcccccagggccagaaaaaacttcatgagagtcgggacaggctgggcagtcaagaactgaaatctatgagtctggtcctactggtgctcctaagaggggctgccacagagcagggcgctcctcatttcctgcatccagttctgccccatgaatcaatccccaggatcttaggggcactgccaagcatgaatgctgcaatcccacatgttccccggtaccatctgcagcccaagaacttcaactggacaggagagccggcagccatcaactcctgttcattgtcaatgaagaaggctgggaggtgctatttttccagtgccagaatcaggctcactagccaaggacaagccagcagaaggctagaagccataaaccgagtcctggcaggatcagtgccacccactttaaccccaaagcagggctattttctgcaaccggaaagagtggcatctgactcatggactgaatgcaccttgccctccatggtaaactctgaacacagagcagccaaggttcccctctgccctgcgtctgcacccatgctgcagcgttccagagcactcctcaacatcaatcagttcaggtaa

SEQ ID NO: 48808 - DNA, 2532 bp, Artificial Sequence
  derived and/or modified sequence
atgccccagtgccccaccctggagagccaggagggcgagaacagcgaggagaagggcgacagcagcaaggaggaccccaaggagaccgtggccctggccttcgtgagagagaaccccggcgcccagaacggcctgcagaacgcccagcagcagggcaagaagaagagaaagaagaagagactggtgatcaacctgagcagctgcagatacgagagcgtgagaagagccgcccagcagtacggcttcagagagggcggcgaggacgacgactggaccctgtactggaccgactacagcgtgagcctggagagagtgatggagatgaagagctaccagaagatcaaccacttccccggcatgagcgagatctgcagaaaggacctgctggccagaaacatgagcagaatgctgaagatgttccccaaggacttcagattcttccccagaacctggtgcctgcccgccgactggggcgacctgcagacctacagcagaagcagaaagaacaagacctacatctgcaagcccgacagcggctgccagggcaagggcatcttcatcaccagaaccgtgaaggagatcaagcccggcgaggacatgatctgccagctgtacatcagcaagcccttcatcatcgacggcttcaagttcgacctgagaatctacgtgctggtgaccagctgcgaccccctgagaatcttcgtgtacaacgagggcctggccagattcgccaccaccagctacagcagaccctgcaccgacaacctggacgacatctgcatgcacctgaccaactacagcatcaacaagcacagcagcaacttcagcagagacgcccacagcggcagcaagagaaagctgagcaccttcagcgcctacctggaggaccacagctacaacgtggagcagatctggagagacatcgaggacgtgatcatcaagaccctgatcagcgcccaccccatcatcagacacaactaccacacctgcttccccaaccacaccctgaacagcgcctgcttcgagatcctgggcttcgacatcctgctggaccacaagctgaagccctggctgctggaggtgaaccacagccccagcttcagcaccgacagcagactggacaaggaggtgaaggacggcctgctgtacgacaccctggtgctgatcaacctggagagctgcgacaagaagaaggtgctggaggaggagagacagagaggccagttcctgcagcagtgctgcagcagagagatgagaatcgaggaggccaagggcttcagagccgtgcagctgaagaagaccgagacctacgagaaggagaactgcggcggcttcagactgatctaccccagcctgaacagcgagaagtacgagaagttcttccaggacaacaacagcctgttccagaacaccgtggccagcagagccagagaggagtacgccagacagctgatccaggagctgagactgaagagagagaagaagcccttccagatgaagaagaaggtggagatgcagggcgagagcgccggcgagcaggtgagaaagaagggcatgagaggctggcagcagaagcagcagcagaaggacaaggccgccacccaggccagcaagcagtacatccagcccctgaccctggtgagctacacccccgacctgctgctgagcgtgagaggcgagagaaagaacgagaccgacagcagcctgaaccaggaggcccccaccgaggaggccagcagcgtgttccccaagctgaccagcgccaagcccttcagcagcctgcccgacctgagaaacatcaacctgagcagcagcaagctggagcccagcaagcccaacttcagcatcaaggaggccaagagcgccagcgccgtgaacgtgttcaccggcaccgtgcacctgaccagcgtggagaccacccccgagagcaccacccagctgagcatcagccccaagagcccccccaccctggccgtgaccgccagcagcgagtacagcggccccgagaccgacagagtggtgagcttcaagtgcaagaagcagcagacccccccccacctgacccagaagaagatgctgaagagcttcctgcccaccaagagcaagagcttctgggagagccccaacaccaactggaccctgctgaagagcgacatgaacaagccccacctgatcagcgagctgctgaccaagctgcagctgagcggcaagctgagcttcttccccgcccactacaaccccaagctgggcatgaacaacctgagccagaaccccagcctgcccggcgagtgccacagcagaagcgacagcagcggcgagaagagacagctggacgtgagcagcctgctgctgcagagcccccagagctacaacgtgaccctgagagacctgctggtgatcgccacccccgcccagctggaccccagaccctgcagaagccacgccagcgccatgagagacccctgcatgcaggaccaggaggcctacagccactgcctgatcagcggccagaagggctgcgagagaagctag

SEQ ID NO: 48809 - DNA, 558 bp, Artificial Sequence
  derived and/or modified sequence
cagcccatgggcgccctgctgctgcaccccagcagaagaggccccgccggcgtggtggccagctggaccagcagccccgccggcagagacggcggcgtgggcatcgccggcgcctggtacttccccagagccagcagccaggccagagagatgccccagtgccccaccctggagagccaggagggcgagaacagcgaggagaagggcgacagcagcaaggaggaccccaaggagaccgtggccctggccttcgtgagagagaaccccggcgcccagaacggcctgcagaacgcccagcagcagggcaagaagaagagaaagaagaagagaatgcccctgaagaacagcagaaagagaagattcccctgcttcaagaaggccctgatctgccccggcaacctggtgagactgcagtacgacagcaccatcctgacctaccaggaccccaccgccgcctgcgccttccagttcctgttcaacatcagcccctgcctggcccccttcagactgatcgacgagggcaagctggtgcacttcctgatccacagcttcccctag

SEQ ID NO: 48810 - DNA, 2676 bp, Artificial Sequence
  derived and/or modified sequence
atgggcgccctgctgctgcaccccagcagaagaggccccgccggcgtggtggccagctggaccagcagccccgccggcagagacggcggcgtgggcatcgccggcgcctggtacttccccagagccagcagccaggccagagagatgccccagtgccccaccctggagagccaggagggcgagaacagcgaggagaagggcgacagcagcaaggaggaccccaaggagaccgtggccctggccttcgtgagagagaaccccggcgcccagaacggcctgcagaacgcccagcagcagggcaagaagaagagaaagaagaagagactggtgatcaacctgagcagctgcagatacgagagcgtgagaagagccgcccagcagtacggcttcagagagggcggcgaggacgacgactggaccctgtactggaccgactacagcgtgagcctggagagagtgatggagatgaagagctaccagaagatcaaccacttccccggcatgagcgagatctgcagaaaggacctgctggccagaaacatgagcagaatgctgaagatgttccccaaggacttcagattcttccccagaacctggtgcctgcccgccgactggggcgacctgcagacctacagcagaagcagaaagaacaagacctacatctgcaagcccgacagcggctgccagggcaagggcatcttcatcaccagaaccgtgaaggagatcaagcccggcgaggacatgatctgccagctgtacatcagcaagcccttcatcatcgacggcttcaagttcgacctgagaatctacgtgctggtgaccagctgcgaccccctgagaatcttcgtgtacaacgagggcctggccagattcgccaccaccagctacagcagaccctgcaccgacaacctggacgacatctgcatgcacctgaccaactacagcatcaacaagcacagcagcaacttcagcagagacgcccacagcggcagcaagagaaagctgagcaccttcagcgcctacctggaggaccacagctacaacgtggagcagatctggagagacatcgaggacgtgatcatcaagaccctgatcagcgcccaccccatcatcagacacaactaccacacctgcttccccaaccacaccctgaacagcgcctgcttcgagatcctgggcttcgacatcctgctggaccacaagctgaagccctggctgctggaggtgaaccacagccccagcttcagcaccgacagcagactggacaaggaggtgaaggacggcctgctgtacgacaccctggtgctgatcaacctggagagctgcgacaagaagaaggtgctggaggaggagagacagagaggccagttcctgcagcagtgctgcagcagagagatgagaatcgaggaggccaagggcttcagagccgtgcagctgaagaagaccgagacctacgagaaggagaactgcggcggcttcagactgatctaccccagcctgaacagcgagaagtacgagaagttcttccaggacaacaacagcctgttccagaacaccgtggccagcagagccagagaggagtacgccagacagctgatccaggagctgagactgaagagagagaagaagcccttccagatgaagaagaaggtggagatgcagggcgagagcgccggcgagcaggtgagaaagaagggcatgagaggctggcagcagaagcagcagcagaaggacaaggccgccacccaggccagcaagcagtacatccagcccctgaccctggtgagctacacccccgacctgctgctgagcgtgagaggcgagagaaagaacgagaccgacagcagcctgaaccaggaggcccccaccgaggaggccagcagcgtgttccccaagctgaccagcgccaagcccttcagcagcctgcccgacctgagaaacatcaacctgagcagcagcaagctggagcccagcaagcccaacttcagcatcaaggaggccaagagcgccagcgccgtgaacgtgttcaccggcaccgtgcacctgaccagcgtggagaccacccccgagagcaccacccagctgagcatcagccccaagagcccccccaccctggccgtgaccgccagcagcgagtacagcggccccgagaccgacagagtggtgagcttcaagtgcaagaagcagcagacccccccccacctgacccagaagaagatgctgaagagcttcctgcccaccaagagcaagagcttctgggagagccccaacaccaactggaccctgctgaagagcgacatgaacaagccccacctgatcagcgagctgctgaccaagctgcagctgagcggcaagctgagcttcttccccgcccactacaaccccaagctgggcatgaacaacctgagccagaaccccagcctgcccggcgagtgccacagcagaagcgacagcagcggcgagaagagacagctggacgtgagcagcctgctgctgcagagcccccagagctacaacgtgaccctgagagacctgctggtgatcgccacccccgcccagctggaccccagaccctgcagaagccacgccagcgccatgagagacccctgcatgcaggaccaggaggcctacagccactgcctgatcagcggccagaagggctgcgagagaagctag

SEQ ID NO: 48811 - DNA, 306 bp, Artificial Sequence
  derived and/or modified sequence
atgccccagtgccccaccctggagagccaggagggcgagaacagcgaggagaagggcgacagcagcaaggaggaccccaaggagaccgtggccctggccttcgtgagagagaaccccggcgcccagaacggcctgcagaacgcccagcagcagggcaagaagaagagaaagaagaagagactggtgatcaacctgagcagctgcagatacgagagcgtgagaagagccgcccagcagtacggcttcagagagggcggcgaggacgacgactggaccctgtactggaccgactacagcgtgagctag

SEQ ID NO: 48812 - DNA, 2532 bp, Artificial Sequence
  derived and/or modified sequence
atgcctcaatgtcccacacttgaaagtcaggagggtgaaaatagtgaggaaaaaggcgactcctcgaaggaagatccgaaagaaacagtggccctggccttcgtgagggagaatccaggtgctcagaatggactgcagaatgctcagcagcaggggaagaagaagaggaagaagaagaggctggtcattaacctatcgtcttgcaggtacgagtccgttcgcagagcagcccagcagtatggtttccgcgaaggcggagaggacgatgactggacgctctattggacagattactccgtcagcctggagcgagtgatggagatgaaaagctaccagaagattaatcattttcccggcatgagtgaaatttgtaggaaggacctgctggccagaaatatgagccgcatgctgaaaatgtttcctaaagattttaggttcttcccaagaacctggtgcctgcctgctgactggggagacttgcagacctactcccggagtcggaaaaataaaacttacatctgtaaaccagattcagggtgccaaggaaaggggatcttcatcacaagaactgtaaaggaaatcaagccaggggaagacatgatatgtcagctctacatttccaagccgttcataattgacggtttcaagttcgatcttcgcatttacgtcctggtcacctcatgcgatccactgaggatttttgtgtataatgaaggattggccaggttcgctacgaccagctactcaagaccttgtacagataacctcgacgacatttgtatgcatctgaccaattacagcattaacaagcattcgtccaactttagccgtgacgcccatagtggaagtaaacggaagttgtccacgttcagtgcctacctggaggaccactcttacaatgtcgagcagatctggcgcgatattgaggatgtgatcatcaaaacactgatctcagcacatccaattattcgccataactatcatacgtgctttccaaatcatactctaaacagtgcttgctttgaaatcctcgggtttgacattttactcgatcacaaactgaagccatggcttttggaagtaaaccatagcccttctttttctacagactcccgacttgataaggaagtgaaagatgggctactctacgataccctcgtgctaattaacctggaatcctgcgataagaagaaggtcctagaggaggaaagacagcgaggtcagttcctacaacagtgttgcagccgcgagatgagaattgaggaggctaaaggatttagagcagtgcagctgaagaagactgagacctatgaaaaggagaactgtggaggctttcggctgatctatcccagcctgaactctgagaaatatgagaaattttttcaggacaataactctctgtttcagaacaccgtggcttctagggcaagggaggaatacgctcggcagctcattcaggaattgagactgaagagagaaaagaaaccattccaaatgaaaaaaaaggtcgagatgcaaggagagtcggctggtgaacaagttagaaagaagggcatgcgaggctggcagcagaagcagcagcagaaagataaagccgccactcaggctagtaaacagtacattcagcctcttaccttagtgtcttatactccagatctgctgctcagcgtgagaggcgaacgcaagaacgagaccgactctagcctgaatcaagaagcccctacagaggaagcttctagcgtttttcccaaacttacctccgccaaaccattctctagcctccccgatctccgaaacatcaatttaagctcttcaaagctcgagccatctaagcccaattttagtatcaaagaggccaagtcagcgtctgcagtgaatgttttcaccggtacagtccatctaacatcggtcgaaactactccagaaagcacgacacagctgagcatctctcctaagagccctcctacattggccgtgacagcatcgtccgagtacagtggtcctgaaacagaccgcgtggtgagttttaaatgcaaaaaacagcagacccccccgcatctgactcagaaaaaaatgctgaagagctttctgccgacaaaatctaaaagtttctgggaaagcccgaacacgaactggactctcttgaagtccgacatgaacaagcctcatcttatctccgaactcctgactaagctgcagctatccggcaaactgtcattttttccagcacactacaaccccaaactgggaatgaacaatctgtcgcaaaatccatccttgccaggcgagtgccattcacgctcagatagttccggggaaaagcgtcagctggatgtgtccagcctgctgctgcagtctccgcagagctataatgtcaccttacgggacctgctcgtgatcgccacacccgcccagttggacccaagaccatgccgcagccacgcctcggcaatgagagacccctgtatgcaagatcaggaagcatatagtcactgtctgatcagcggacaaaagggctgcgagaggagctag

SEQ ID NO: 48813 - DNA, 558 bp, Artificial Sequence
  derived and/or modified sequence
cagcccatgggagcgctcctgctgcatcctagtagaagggggcccgccggcgttgtggcgagttggacttcatcacctgctggtagagacgggggcgttggaatcgcaggtgcgtggtatttcccaagggccagcagccaagctcgggaaatgccccagtgtcctacactggaaagccaggagggagagaacagcgaggagaagggagattcttctaaggaggacccaaaggagacagtggctctggcattcgtgagagagaaccccggcgcccagaacggactgcaaaatgctcagcagcagggcaaaaagaagcggaaaaaaaaacggatgcctctcaagaacagtagaaaacggagattcccttgtttcaagaaagcactgatttgcccagggaatctggttcgcctccagtacgactcgaccatattgacgtaccaggatcccacagcggcctgtgctttccagttcctgttcaatatttccccctgtctggcaccctttagactcatcgacgaaggtaagctcgtccattttctgatacatagtttcccatag

SEQ ID NO: 48814 - DNA, 2676 bp, Artificial Sequence
  derived and/or modified sequence
atgggggcactcctgctgcacccctccaggcgtggcccagcaggagtcgtcgctagctggacgtctagcccagccggccgtgatggcggcgtgggcatcgcaggcgcctggtactttccaagagcctcgagtcaggctagggaaatgcctcagtgtccaactctggagtcgcaagagggggagaattcagaggaaaaaggtgactccagcaaggaggaccctaaagaaactgtggcgctggcttttgtgagggaaaatcctggtgcgcagaatggcctgcaaaacgcccagcagcagggaaaaaaaaagcggaaaaagaagcgccttgtgataaacctgtcttcctgtcggtatgaaagcgtcagacgcgctgcacagcagtacggcttccgtgaagggggtgaagatgacgactggacactttactggaccgactacagtgtctctctcgagagagtgatggaaatgaagtcttatcagaagatcaaccacttcccgggcatgtccgagatctgtcgcaaggatctgttggcgaggaacatgagcaggatgttaaaaatgtttccgaaggatttcagattctttcccaggacatggtgtcttcctgccgattggggtgatctacagacctattctaggtcacgcaagaataaaacatacatatgcaaacccgactctggatgtcaggggaaaggcatcttcattactagaacggtcaaagaaattaagcccggtgaggatatgatctgccagctttacatcagtaagcccttcattattgatggcttcaaatttgatctgcgtatctatgtgttagtcacctcttgtgatcctcttcgcattttcgtgtacaacgaggggctggcccggttcgcaaccacctcctactcccgaccctgcacagataacctggacgacatctgcatgcatctcactaattatagtatcaataaacatagcagtaacttttctcgcgatgctcactctggcagtaagaggaagttgtcaaccttctctgcatacctggaagaccactcctacaacgtcgagcaaatttggcgagacattgaggacgtgatcatcaagacgctgatctccgcccatccaatcattagacacaattaccatacgtgcttccctaaccatacacttaattcagcctgttttgagatccttggatttgacatcctattagaccataagctaaaaccatggctgctcgaagtgaaccactctccttcctttagtacggattctcgcctagacaaggaagtgaaagatggtctcctatatgatactctcgtgctgatcaacctggagtcttgtgataaaaagaaggtcctggaagaagaaagacagaggggacagttcctccagcagtgttgttcgcgggagatgaggatcgaggaagctaaaggatttagggccgtgcagctgaagaaaaccgagacatatgaaaaagaaaattgcggcggcttccgcctgatctatcctagtcttaacagtgaaaagtacgagaagttctttcaagacaataatagcctgtttcagaatactgttgcgtcacgggcccgagaagagtacgcacgccagctcatacaggaacttagacttaaaagggaaaagaagccattccaaatgaagaaaaaggtcgagatgcagggcgagagcgccggcgagcaggtgaggaagaaagggatgaggggatggcagcagaagcaacagcaaaaggataaagcagccacccaggcgagtaaacagtacatccagccactcactctagtaagctacactcccgatctgctgctgagcgtacgaggagagcggaaaaacgagaccgattcctcattaaatcaggaagccccaactgaagaggcctcctccgttttcccaaagctcacatccgccaagccgttttctagccttcctgacctgcgcaatatcaacctcagctccagtaaactggaaccatccaagcccaatttttccattaaggaggccaagtccgcctcagctgttaacgtatttaccggtacagtgcacctcacaagtgtcgaaactactccggagagtacgacacagctgtccatcagccccaagtccccccctactttagctgtaacagctagctccgagtattccgggccagaaaccgatcgggtcgtatcctttaaatgcaagaaacagcagaccccaccacacctcacccagaaaaaaatgctcaagagcttcttgcccactaaatccaagtctttttgggagtccccaaacaccaattggactctgttgaagagcgacatgaacaagccccatttgattagcgaactgctaacaaaactgcagctttctggaaagctgagtttttttccagctcattataatcctaagctgggaatgaacaacttgagccagaatccatcccttcctggcgagtgccattcacggtcggactcatctggcgagaaaagacagctggatgtctcctcgctcctcctgcagtcccctcaatcttacaatgtgacgctgcgcgatctgctcgtgattgcaacccccgcccagcttgatccgcggccctgtcgatcgcatgccagcgccatgcgggacccatgtatgcaggatcaggaggcttattctcactgtcttataagcgggcagaagggatgcgagaggtcttag

SEQ ID NO: 48815 - DNA, 306 bp, Artificial Sequence
  derived and/or modified sequence
atgccccaatgtcccacgctcgagagtcaggagggggaaaattccgaggaaaaaggcgattccagcaaggaggatccaaaagaaaccgtggcactcgctttcgttagagaaaaccctggtgcacagaacggtctccagaatgcccagcagcagggcaaaaagaaacggaagaagaaaagattggtgattaatctgtcatcatgtcggtatgaatcagtgagacgagcagcacaacagtacggattcagggaaggtggggaagacgacgactggaccctgtactggactgactacagcgtgagctag

SEQ ID NO: 48816 - DNA, 2532 bp, Artificial Sequence
  derived and/or modified sequence
atgccccagtgccccaccctggagagccaggagggagaaaattctgaggagaagggggacagcagcaaggaggaccccaaggagaccgtggccctggcctttgtgagagaaaatcctggggcccagaatggcctgcagaatgcccagcagcagggcaagaagaagaggaagaagaagaggctggtgatcaacctgagcagctgccgctatgagagcgtgcggcgggccgcccagcagtatggcttccgggagggcggagaagatgatgactggaccctgtactggacagactacagcgtgtccctggagcgggtgatggagatgaagagctaccagaagatcaaccacttccctggcatgtctgagatctgcaggaaggacctgctggccaggaacatgagcaggatgctgaagatgttccccaaggacttccgcttcttccccaggacctggtgcctgcctgctgactggggagacctgcagacctacagccgcagcaggaagaacaagacctacatctgcaagccagacagcggctgccagggcaagggcatcttcatcaccaggacagtgaaggagatcaagccaggagaggacatgatctgccagctgtacatcagcaagcccttcatcattgatggcttcaagtttgacctgcgcatctacgtgctggtgaccagctgtgaccccctgcgcatctttgtgtacaatgaaggcctggccaggtttgccaccaccagctacagccggccctgcacagacaacctggatgacatctgcatgcacctgaccaactacagcatcaacaagcacagcagcaacttcagcagagatgcccacagcggcagcaagaggaagctgagcaccttcagcgcctacctggaggaccacagctacaacgtggagcagatctggagggacattgaagatgtgatcatcaagaccctcatcagcgcccaccccatcatccgccacaactaccacacctgcttccccaaccacaccctgaacagcgcctgctttgagatcctgggctttgacatcctgctggaccacaagctgaagccctggctgctggaggtgaaccacagccccagcttcagcacagacagccggctggacaaggaggtgaaggatggcctgctgtatgacaccctggtgctgatcaacctggagagctgtgacaagaagaaggtgctggaggaggagcggcagaggggccagttcctgcagcagtgctgcagccgggagatgagaattgaggaggccaagggcttccgggctgtgcagctgaagaagacagagacctatgagaaggagaactgtggcggcttccgcctcatctaccccagcctgaacagcgagaagtatgagaagttcttccaggacaacaacagcctcttccagaacacagtggccagccgggcccgggaggagtatgcccggcagctgatccaggagctgcggctgaagcgggagaagaagcccttccagatgaagaagaaggtggagatgcagggcgagagcgctggggagcaggtgaggaagaagggcatgaggggctggcagcagaagcagcagcagaaggacaaggccgccacccaggccagcaagcagtacatccagcccctgaccctggtgtcctacaccccagacctgctgctgtctgtgcggggggagaggaagaatgaaacagacagcagcctgaaccaggaggcccccacagaggaggccagcagcgtcttccccaagctgaccagcgccaagcccttcagcagcctgcctgacctgaggaacatcaacctgagcagcagcaagctggagcccagcaagcccaacttcagcatcaaggaggccaagagcgccagcgctgtgaatgtgttcaccggcaccgtgcacctgacctctgtggagaccaccccagagagcaccacccagctgagcatcagccccaagagcccccccaccctggccgtgacagccagcagcgagtacagcggccctgagacagacagagtggtgtccttcaagtgcaagaagcagcagaccccaccccacctgacccagaagaagatgctgaagagcttcctgcccaccaagagcaagagcttctgggagagccccaacaccaactggaccctgctgaagagtgacatgaacaagccccacctgatcagcgagctgctgaccaagctgcagctgagcggcaagctgtccttcttccctgcccactacaaccccaagctgggcatgaacaacctgagccagaaccccagcctgcctggagagtgccacagcagaagtgacagcagtggagagaagaggcagctggatgtgagcagcctgctgctgcagagcccccagagctacaacgtgaccctgcgggacctgctggtgattgccaccccagcccagctggacccccggccctgccgcagccacgccagcgccatgagggacccctgcatgcaggaccaggaggcctacagccactgcctgatcagcggccagaagggctgtgagaggagctag

SEQ ID NO: 48817 - DNA, 558 bp, Artificial Sequence
  derived and/or modified sequence
cagcccatgggcgccctgctgctgcaccccagccggcggggccctgctggggtggtggcctcctggaccagcagccctgctggaagagatggcggcgtgggcattgctggggcctggtacttcccccgggccagcagccaggcccgggagatgccccagtgccccaccctggagagccaggagggagaaaattctgaggagaagggggacagcagcaaggaggaccccaaggagaccgtggccctggcctttgtgagagaaaatcctggggcccagaatggcctgcagaatgcccagcagcagggcaagaagaagaggaagaagaagaggatgcccctgaagaacagcaggaagaggcgcttcccctgcttcaagaaggccctgatctgccccggcaacctggtgcggctgcagtatgacagcaccatcctgacctaccaggaccccacagctgcctgtgccttccagttcctgttcaacatcagcccctgcctggcccccttccggctgattgatgagggcaagctggtgcacttcctgatccacagcttcccctag

SEQ ID NO: 48818 - DNA, 2676 bp, Artificial Sequence
  derived and/or modified sequence
atgggcgccctgctgctgcaccccagccggcggggccctgctggggtggtggcctcctggaccagcagccctgctggaagagatggcggcgtgggcattgctggggcctggtacttcccccgggccagcagccaggcccgggagatgccccagtgccccaccctggagagccaggagggagaaaattctgaggagaagggggacagcagcaaggaggaccccaaggagaccgtggccctggcctttgtgagagaaaatcctggggcccagaatggcctgcagaatgcccagcagcagggcaagaagaagaggaagaagaagaggctggtgatcaacctgagcagctgccgctatgagagcgtgcggcgggccgcccagcagtatggcttccgggagggcggagaagatgatgactggaccctgtactggacagactacagcgtgtccctggagcgggtgatggagatgaagagctaccagaagatcaaccacttccctggcatgtctgagatctgcaggaaggacctgctggccaggaacatgagcaggatgctgaagatgttccccaaggacttccgcttcttccccaggacctggtgcctgcctgctgactggggagacctgcagacctacagccgcagcaggaagaacaagacctacatctgcaagccagacagcggctgccagggcaagggcatcttcatcaccaggacagtgaaggagatcaagccaggagaggacatgatctgccagctgtacatcagcaagcccttcatcattgatggcttcaagtttgacctgcgcatctacgtgctggtgaccagctgtgaccccctgcgcatctttgtgtacaatgaaggcctggccaggtttgccaccaccagctacagccggccctgcacagacaacctggatgacatctgcatgcacctgaccaactacagcatcaacaagcacagcagcaacttcagcagagatgcccacagcggcagcaagaggaagctgagcaccttcagcgcctacctggaggaccacagctacaacgtggagcagatctggagggacattgaagatgtgatcatcaagaccctcatcagcgcccaccccatcatccgccacaactaccacacctgcttccccaaccacaccctgaacagcgcctgctttgagatcctgggctttgacatcctgctggaccacaagctgaagccctggctgctggaggtgaaccacagccccagcttcagcacagacagccggctggacaaggaggtgaaggatggcctgctgtatgacaccctggtgctgatcaacctggagagctgtgacaagaagaaggtgctggaggaggagcggcagaggggccagttcctgcagcagtgctgcagccgggagatgagaattgaggaggccaagggcttccgggctgtgcagctgaagaagacagagacctatgagaaggagaactgtggcggcttccgcctcatctaccccagcctgaacagcgagaagtatgagaagttcttccaggacaacaacagcctcttccagaacacagtggccagccgggcccgggaggagtatgcccggcagctgatccaggagctgcggctgaagcgggagaagaagcccttccagatgaagaagaaggtggagatgcagggcgagagcgctggggagcaggtgaggaagaagggcatgaggggctggcagcagaagcagcagcagaaggacaaggccgccacccaggccagcaagcagtacatccagcccctgaccctggtgtcctacaccccagacctgctgctgtctgtgcggggggagaggaagaatgaaacagacagcagcctgaaccaggaggcccccacagaggaggccagcagcgtcttccccaagctgaccagcgccaagcccttcagcagcctgcctgacctgaggaacatcaacctgagcagcagcaagctggagcccagcaagcccaacttcagcatcaaggaggccaagagcgccagcgctgtgaatgtgttcaccggcaccgtgcacctgacctctgtggagaccaccccagagagcaccacccagctgagcatcagccccaagagcccccccaccctggccgtgacagccagcagcgagtacagcggccctgagacagacagagtggtgtccttcaagtgcaagaagcagcagaccccaccccacctgacccagaagaagatgctgaagagcttcctgcccaccaagagcaagagcttctgggagagccccaacaccaactggaccctgctgaagagtgacatgaacaagccccacctgatcagcgagctgctgaccaagctgcagctgagcggcaagctgtccttcttccctgcccactacaaccccaagctgggcatgaacaacctgagccagaaccccagcctgcctggagagtgccacagcagaagtgacagcagtggagagaagaggcagctggatgtgagcagcctgctgctgcagagcccccagagctacaacgtgaccctgcgggacctgctggtgattgccaccccagcccagctggacccccggccctgccgcagccacgccagcgccatgagggacccctgcatgcaggaccaggaggcctacagccactgcctgatcagcggccagaagggctgtgagaggagctag

SEQ ID NO: 48819 - DNA, 306 bp, Artificial Sequence
  derived and/or modified sequence
atgccccagtgccccaccctggagagccaggagggagaaaattctgaggagaagggggacagcagcaaggaggaccccaaggagaccgtggccctggcctttgtgagagaaaatcctggggcccagaatggcctgcagaatgcccagcagcagggcaagaagaagaggaagaagaagaggctggtgatcaacctgagcagctgccgctatgagagcgtgcggcgggccgcccagcagtatggcttccgggagggcggagaagatgatgactggaccctgtactggacagactacagcgtgtcctag

SEQ ID NO: 48820 - DNA, 2532 bp, Artificial Sequence
  derived and/or modified sequence
atgccccagtgccccaccctggagagccaggagggcgagaacagcgaggaaaaaggagactcttccaaggaagacccaaaggagacagtggctctggcattcgtgcgtgagaatccgggcgctcagaacggcttacagaacgcacaacagcaaggtaagaagaaacgaaagaagaagcgcctcgtaatcaacttgtccagttgtcgctatgagagtgtgcgtagagccgctcagcagtacggatttagggaaggaggagaagatgacgactggactctctactggactgactatagcgtgtccctagagcgggtaatggaaatgaaatcgtaccagaagatcaatcacttccctggaatgtctgaaatctgccgcaaggatttgcttgccaggaatatgagcagaatgctaaaaatgttcccaaaggactttagatttttcccccggacctggtgtctgccggccgattggggagatctgcaaacatatagtcgtagtcggaaaaataagacctatatttgcaaaccggattcggggtgtcaaggtaaaggcatatttatcacccggaccgtgaaagagatcaaaccaggggaggacatgatctgtcaactgtacatctcaaaacccttcataattgatgggttcaaatttgacctgcgaatctacgttttggtgacttcatgcgatcccctaagaattttcgtttataacgaaggtttagctaggtttgctacaaccagctattcacggccatgcaccgacaatctggatgatatatgcatgcacctcaccaactactccatcaataagcattcatcaaatttcagccgcgacgcgcactccggtagcaagcgaaagctgtctacctttagcgcctacttggaagaccactcctacaacgtggaacagatatggcgcgatatcgaggatgtcatcatcaagaccctcatctctgctcaccccatcattcgccacaattaccatacctgtttccctaaccacaccctgaattctgcttgcttcgagatactgggatttgatatcctattggaccacaaactcaaaccctggctattagaggttaatcatagcccctccttttctacagatagcagactcgataaagaggttaaagacgggttattgtatgatacacttgtactgataaaccttgagagttgcgataagaaaaaggtgctcgaggaggaaagacaacggggccagtttctgcagcagtgctgttcacgggaaatgcgcattgaagaggcaaagggattccgagccgtccagctgaaaaaaaccgaaacgtatgaaaaggaaaactgcggcgggttcaggctgatctacccttctctcaattccgagaagtatgaaaagttcttccaggataacaactccctcttccagaatacggtggcctccagagctagagaggaatatgctaggcagcttattcaggagctgcgtctgaagcgggaaaaaaagccatttcagatgaagaaaaaagtggaaatgcaaggcgaatccgccggagagcaggtgaggaaaaaggggatgcgaggctggcagcagaaacagcaacagaaagataaggcagccactcaggccagcaaacagtacatccagcctctaactctggtgtcatatactccagacctattgctgtcagttcgtggtgagagaaaaaacgagacagactcaagcctgaatcaggaggcaccaacagaagaggccagttctgtgtttcctaaattaaccagcgccaagccatttagctcactccccgatctccggaatatcaaccttagtagctctaaacttgaaccatcaaagcctaatttctccataaaggaggcaaagagcgccagcgcggtcaatgtttttactggaactgttcatttgacaagtgttgaaacgacacctgaaagtaccacacaactctctatttcgccaaaaagcccgccaacactggctgttacagcaagtagcgagtactctggaccagagaccgatcgggttgttagctttaagtgcaagaaacagcagacaccaccccatcttacacagaagaaaatgctgaaaagtttcctccccactaaatccaagagcttttgggagtcgcccaacaccaactggacgttgcttaagtccgacatgaataagccccaccttatctcagagctacttactaaactgcagctcagcggaaagttaagtttctttcctgcccattataaccccaaactgggaatgaacaacctgagccagaatccctctctgccgggcgagtgtcattctagatccgattccagtggagagaagaggcagcttgatgtcagttccttactcttgcagtcaccacagtcttacaacgtgacccttcgggacctccttgtaatagccacgccggctcaactggaccctcgtccttgtcgctcccacgcatctgcgatgcgggacccttgcatgcaggaccaggaggcttacagccattgtctcatctcgggtcagaaggggtgtgagagaagttag

SEQ ID NO: 48821 - DNA, 558 bp, Artificial Sequence
  derived and/or modified sequence
cagcccatgggcgccctgctgctgcaccccagccggcggggccccgccggagtggttgcctcttggactagcagccccgctggcagggatggtggggtggggattgcaggtgcctggtacttccctagggcatcttcacaagcaagagaaatgccccagtgtccgacactggagtctcaagaaggagaaaacagcgaggaaaagggggattcttccaaggaagacccaaaggaaacggtggcactggcatttgtgcgggaaaatcctggggcccagaatggtctgcagaacgcccaacagcagggaaaaaaaaagcgcaagaagaagagaatgccacttaagaactcgagaaagaggcggttcccttgcttcaagaaagctctgatctgtcctggtaacttggtgcgtctgcaatatgattccaccatcctcacataccaggaccccacagcggcatgcgcatttcagttcctgtttaacatttccccttgcctggctcctttcagattgatcgacgaagggaagctggttcattttctgatacactcttttccctag

SEQ ID NO: 48822 - DNA, 2676 bp, Artificial Sequence
  derived and/or modified sequence
atgggcgccctgctgctgcaccccagccggcggggccccgccggcgtagtcgcatcttggacgagctcccccgcaggtagggacgggggcgttggaattgccggggcctggtacttccccagggccagcagtcaagcaagggagatgccgcaatgtccaaccttagagagtcaggaaggcgagaactccgaggaaaaaggcgacagttctaaagaagatccaaaagaaaccgtggccctcgcctttgtgagagagaatccaggtgctcagaacggcctgcagaacgcacagcagcagggaaaaaagaaaaggaaaaagaaacgattggtgatcaatcttagttcctgccgctacgaatccgtgcggcgcgccgcccagcagtacgggtttcgcgagggcggggaagacgacgattggaccctgtactggaccgactactctgtatccctagagcgggtgatggagatgaagagctaccaaaaaatcaaccacttcccaggaatgagcgaaatatgccgaaaagacctcttggcccgtaacatgtcacggatgctaaagatgtttcccaaagacttccgttttttccccaggacgtggtgtctccccgctgattggggcgatctgcagacttactctcggtcccgcaagaataagacttatatttgcaagcccgattcaggttgtcaaggcaaggggatctttatcacccgtaccgtgaaggaaatcaaacccggggaggatatgatatgccagttatatatctcaaagcccttcattatcgatggatttaagttcgatcttaggatctatgttctcgtgacttcctgtgaccccctgagaatttttgtatataacgaaggtctggcgaggttcgcaaccacatcatacagccgtccatgtactgacaacttggatgacatctgcatgcatcttacaaactactctattaacaaacactccagtaacttcagcagggatgctcacagtggctccaagcgcaagctgagtaccttttctgcttatttggaagaccatagctataacgtggagcagatctggagggacattgaagacgtgatcattaaaactctgatctcagcccatcctataatcagacacaactaccatacttgttttccaaatcacacattgaattctgcatgttttgagatcctgggcttcgacattcttcttgatcataagttaaagccctggctacttgaagtgaaccactccccttcatttagcaccgatagtagactagataaggaggttaaagacggtctgttgtatgatactctggttcttattaatttggaatcctgcgataagaagaaggtgctggaagaagagcggcagcgtggacagttcctgcaacagtgctgttctagagagatgaggattgaggaagcgaagggatttcgagctgtgcaactcaaaaagacagagacttacgagaaggaaaactgcggcggatttaggctcatctaccctagcctcaactccgagaagtacgagaagttcttccaggataataacagccttttccaaaataccgttgcctcgagagccagggaagagtatgccagacagttaattcaggaacttcgactaaagcgggaaaaaaaacccttccagatgaagaaaaaggtggaaatgcagggagagtcagcgggcgaacaggtgcgcaagaaagggatgcggggctggcaacagaaacagcagcaaaaagacaaagccgctactcaggcctccaaacaatacattcagcccctgaccctggttagctatactccagacttactgctgtcagtacggggtgagcgtaaaaacgagaccgactccagcttgaaccaggaagctccaactgaggaggcgtcttccgtcttccctaaactgacaagcgccaagcctttctccagcctccccgacctgagaaacataaacctttctagttccaagctagaaccctctaaacctaatttttccattaaggaagctaagtcagcgagcgcggtcaacgtgttcacagggacagtgcacttgacgtctgtggagaccacccccgagtctaccacacagctttccatttctcccaagagccccccaactctagcggtcaccgctagttccgagtactccggcccagagacagacagagttgtgagttttaaatgcaaaaaacagcagaccccgccacatttgacacaaaagaaaatgctgaagagttttctgcccacaaaatccaagtctttctgggagtcgccgaatactaactggacactattaaagagcgatatgaacaagccgcacctgatcagcgagctcttaactaaactccagctcagcgggaaactgtcgttcttccctgcacactataacccaaagttaggcatgaacaatctgtcccagaacccctctctccccggggagtgtcatagtagatctgactccagcggcgagaaacggcaactggacgtgtcctcgctgctcctgcagtcccctcagagttacaatgtaaccctgagggacctattggtgatcgccactcctgctcagctcgacccaagaccctgcaggagtcatgccagtgcaatgcgagatccttgcatgcaagaccaagaagcttatagccactgcctcatcagcggccaaaaagggtgtgaacggagctag

SEQ ID NO: 48823 - DNA, 306 bp, Artificial Sequence
  derived and/or modified sequence
atgccccagtgccccaccctggagagccaggagggcgagaacagcgaggaaaagggggattcttcgaaagaggatcctaaggagacagtggccctggccttcgtacgagaaaatcccggcgcccagaatgggctgcagaatgcccaacaacaaggtaagaagaagcgaaaaaaaaagaggctggtcataaacctgtccagttgtagatacgagagtgtgagacgcgcagcccagcagtacgggttcagggagggcggggaggacgacgattggacgctgtattggaccgattacagtgtctcttag

SEQ ID NO: 48824 - DNA, 2532 bp, Artificial Sequence
  derived and/or modified sequence
atgccacagtgcccaacactcgagagccaggaaggagagaactcagaggagaagggtgattcctctaaggaggaccctaaagagacagtagccctcgccttcgtccgggagaaccccggagcccagaatggcctacagaacgcgcaacagcagggcaagaaaaaacgcaaaaaaaaacgcttggtaattaacctctcttcctgtcgctacgaaagtgtcagacgggctgctcagcaatatggttttcgggagggcggtgaggacgatgattggaccctgtactggactgattacagtgtctcccttgagcgtgtgatggagatgaaaagctatcagaagatcaatcactttcccggaatgtcagagatctgtcggaaagacttacttgccaggaacatgtcgaggatgctgaaaatgttccctaaggatttcaggttcttccctaggacatggtgccttcctgccgattggggcgacctgcaaacttatagccgaagcaggaaaaataaaacctacatttgcaagccagacagcgggtgccaaggcaaaggaatttttatcacacgcacagtgaaggagataaaaccaggggaagacatgatttgccagctgtatatctccaagcccttcatcatcgatgggttcaagttcgatctgaggatctatgtgctggtcaccagctgcgaccctttgcgtatctttgtttataatgagggcctagcccgatttgccaccacaagttattctcggccatgtaccgataatttggatgatatctgtatgcacctgaccaactactccatcaacaagcattctagcaatttctctagagacgcccactccggatccaaaagaaaactgtcaacgttttcagcttatctcgaggatcacagttacaacgtcgaacagatatggcgcgatatcgaagatgtcatcatcaagactctcattagcgcccaccctatcattcggcacaactaccacacctgtttccctaaccacaccctaaactctgcatgtttcgagatcctgggttttgatatcctcttagaccacaaattgaagccatggctgctggaagttaaccatagcccttccttctctacagatagcagattggacaaagaggtcaaggacggtctgctgtacgatactctggtgctcataaacctggagtcttgtgacaaaaaaaaggtcttggaagaggagcgccagcgcggtcagtttcttcagcagtgttgctccagagagatgcgcattgaggaggctaaaggcttcagggctgtacaactcaagaaaaccgagacctacgaaaaggaaaattgcgggggattcagacttatatatcctagcctgaattctgagaaatacgaaaagttttttcaggataacaacagcttgttccaaaacactgtggcttcccgcgcacgagaagagtacgctcgccaactgatccaggaactgcgcctgaagcgtgaaaagaaaccattccagatgaagaaaaaggttgagatgcagggcgaatcagccggtgaacaagtccggaagaagggtatgcggggatggcagcagaagcagcagcagaaggataaggcagcaacacaggccagcaagcagtacattcaacctctgactctggtttcctacacaccagatttactcctgagcgtgaggggcgaaaggaaaaatgagacggactcatccttgaatcaggaggctcctaccgaagaggcatcttccgtattcccaaagctgacctctgccaagccgtttagctctctaccggatctcaggaacattaacctgtcctcaagtaaactagaacccagcaagcctaattttagtatcaaggaggccaaatctgctagcgccgtcaatgtttttacaggtaccgtccatctaaccagcgtagagacgacacccgagagcaccacgcagctgtccatctcccccaagtctccaccgaccctggccgtgaccgctagttcagaatattccggcccagagactgaccgtgtggtcagcttcaagtgtaagaagcaacaaacccctcctcatctaacacagaaaaaaatgttaaagtcgttcctgcccacaaaaagcaaatcattttgggaatccccaaacacaaactggacactgctcaaatccgatatgaacaagcctcacctcatttctgagctgctgacgaaactgcagctctctggaaagctgtcattcttccccgcacattataatcctaagctgggaatgaacaacctctctcagaatccttcactccccggagagtgccactcccgctccgatagttcaggagagaagcgtcaacttgatgtttcatcactgttactgcagtcacctcaatcctataacgttacactccgcgacctgttggtgattgctactccggcacagctcgaccccagaccatgtaggagccacgcgagtgcaatgcgagatccatgtatgcaggaccaagaggcttactctcattgcctcatcagcggtcagaagggctgtgaaagaagttag

SEQ ID NO: 48825 - DNA, 558 bp, Artificial Sequence
  derived and/or modified sequence
cagcccatgggcgcactgcttctgcaccctagtcggagagggcctgctggagtggtcgctagctggaccagcagccccgcaggaagagatgggggtgtgggcatagctggagcgtggtattttcccagggcttctagccaggctcgggaaatgccacagtgtccaaccctagaatctcaggagggtgagaactctgaggaaaaaggcgacagcagcaaggaagatcctaaagaaaccgtagctctggctttcgtccgagaaaaccctggagcccagaatggcctccagaacgcccagcaacagggcaagaaaaaaagaaaaaagaagagaatgcccctgaagaactctagaaaacgccgttttccctgtttcaagaaagcactcatatgtcccggaaatctcgttaggttgcagtacgactcaaccatattgacataccaagatcctacagccgcttgcgcctttcagttcctgttcaacatctcaccctgtctggccccttttcgactcattgatgagggtaaattggtccacttcttgatacatagttttccttag

SEQ ID NO: 48826 - DNA, 2676 bp, Artificial Sequence
  derived and/or modified sequence
atgggcgcactactgctgcacccctccaggcgcggaccagccggagtggtcgcttcatggacgtccagccccgcaggtagggatgggggtgtaggaatcgccggagcttggtatttccctcgggcaagtagccaggcccgtgagatgccccagtgtcccaccctcgagagccaagaaggcgagaatagtgaagagaagggggactccagcaaggaggaccccaaagagaccgtagcactcgctttcgtaagggagaatcccggagcgcagaatgggctgcaaaacgctcagcaacaggggaaaaagaaaaggaaaaaaaagcgtctggtcatcaatctctctagctgtcgttatgagagcgttcggagggcagcccagcaatacgggttcagagaaggcggtgaggacgatgactggaccctctattggactgactatagcgtctcccttgagagagtgatggagatgaagtcgtatcagaagattaaccattttcctggcatgagtgagatctgtcgcaaagacctgttagccaggaacatgtctcgtatgctaaaaatgtttccaaaggactttaggttttttcctcgcacttggtgcctgccagcagactggggcgatctgcagacctacagcaggagcaggaaaaataaaacctacatctgcaagccagattccggctgccagggaaaaggtattttcatcacacgaaccgttaaagaaatcaaaccgggtgaggatatgatatgtcagctgtatatcagcaagccttttataatcgatggattcaagttcgacctccgcatttatgtcctggttactagctgcgatcccctacggatctttgtatacaacgaaggcttggcgcgattcgcgactacttcatactctcggccatgtacggacaatcttgatgacatctgtatgcatctgaccaattattccatcaacaagcactcatcaaatttctcccgggacgcccactctggaagtaaacgaaaactgtctacctttagcgcttatctggaggaccattcgtacaatgttgagcagatctggagagacattgaggacgttattataaaaacacttattagcgctcaccccattatacgacataactatcacacgtgcttcccaaaccatacacttaactcggcctgtttcgaaatcctcggctttgacatactattagatcataagctgaaaccgtggctccttgaggtgaatcactcccccagcttcagtacagattcacggctcgataaagaggtaaaagatggcctgttgtatgacacactcgtactcatcaatctggagtcctgtgataagaagaaagtgctcgaagaggaaaggcagagaggccagttcctgcaacagtgttgttcccgggagatgaggatcgaggaggctaagggattcagagctgttcagctgaagaaaaccgagacgtacgaaaaggagaactgcggaggatttagacttatctacccatcactaaactcggagaagtatgaaaaattctttcaagacaacaattcgctgtttcagaatacggttgcgtctcgagctcgtgaagaatatgccaggcaattaattcaggagcttcgcctaaagcgcgagaagaagccttttcagatgaagaagaaagtagagatgcagggcgaaagtgctggagagcaggttaggaaaaaggggatgaggggatggcagcagaagcagcaacaaaaggataaggctgccactcaggcgtccaagcagtatattcagccccttacgcttgtctcatacactcctgacttactcctcagcgttaggggtgagcgcaaaaacgaaaccgacagtagtcttaatcaggaggccccaaccgaggaggcaagtagcgtgttcccaaagcttacatccgccaagccgtttagctctttgcccgacctacgaaatattaacctctccagcagcaagttagaaccaagtaaaccaaatttttcaataaaagaagctaaaagcgctagcgctgtaaatgtttttactgggaccgtccatctgaccagcgtggagacgacacctgaaagtacaacccagctatcaatatcgcctaagagtccacctaccctggccgtaacagctagctccgagtactccgggccagaaacagacagagtggtaagctttaaatgtaaaaagcagcaaacccctccccacttgacacagaaaaagatgctcaaaagttttctgccaacaaagtccaaatctttttgggaatcccctaacaccaattggacactcctcaaaagcgacatgaataaaccccacttaatatctgagctgctcactaaacttcagctttcaggcaagctgtctttcttccccgctcactataaccctaaattgggcatgaataatctgtcacaaaacccttccctgcctggcgagtgccactcacgtagcgactcatctggagagaaacgtcaactcgatgtgtcgagtctgctgttacagtctcctcaatcttataacgtgactctgagagacctgttggtcatcgctacccctgcccaattagaccctcgcccttgccgatctcacgcctcagccatgcgggatccttgtatgcaggaccaggaggcttactctcattgcctgatatctggccaaaagggatgcgaaagatcatag

SEQ ID NO: 48827 - DNA, 306 bp, Artificial Sequence
  derived and/or modified sequence
atgcctcagtgccctaccctggaatcccaggaaggtgaaaacagtgaggagaagggcgattcctccaaggaagatccgaaagagacagttgctctggcttttgtgagagaaaacccaggcgctcagaacgggttgcagaacgcccagcagcaaggtaagaagaagcggaagaagaagcgcctggtgatcaatctttcttcctgccggtacgagagcgtgcgtagggccgctcagcagtatggatttcgagaagggggtgaagatgacgactggacactgtattggacagattacagcgttagttag

SEQ ID NO: 48828 - DNA, 3551 bp, Artificial Sequence
  derived and/or modified sequence
aattggattcgggagggagggggcatggcagctactgcaggggccaatcgaaggcctagaaggccccgtatgcaaatatgagggccgggcggacccaaagttagggcgagcgcgggttggggttggggctgtctggcagccaatgggagcgttactccttcatccttcgaggagggggccggcaggtgtggttgcaagctggactagcagcccagcggggcgagacgggggagtaggaattgcgggggcctggtatttccccagagcctcctcccaggccagggagatgccacagtgcccgactttggaaagccaggaaggggaaaactccgaagagaagggggacagttccaaagaagatccaaaagaaaccgtcgcgctggcttttgtgagagagaacccaggggcacaaaacggacttcagaatgcccagcagcaaggcaagaagaagaggaagaaaaagagattggtgatcaatctatccagctgccggtatgagagtgtgcgcagggctgcccaacagtacggctttagagagggaggggaagacgatgactggactctctattggacagattactcagtgtcactggagcgggtgatggaaatgaaaagttaccagaagatcaatcacttccccgggatgagtgaaatctgccggaaggacttgctggccaggaacatgagccgcatgttaaagatgttccctaaagatttccgctttttccctaggacctggtgtcttcctgctgactggggagatttgcagacctacagcaggtcaagaaaaaataagacatacatttgtaagccggattcgggctgccaagggaaaggtatattcatcacccggacagtgaaagaaatcaaaccaggggaggatatgatctgtcagctgtatatttcaaagccctttatcattgatgggtttaagtttgacctacggatttatgtactggtgacatcctgtgaccctctcaggatttttgtgtacaatgaaggactggcccgctttgcgacgacctcttactcccgcccttgcacagacaacctggatgatatctgcatgcacctgactaattattccattaataagcacagttcaaatttcagtcgagatgcacactctggcagtaagaggaagctctccaccttcagtgcatacttggaggaccacagctacaacgtggagcagatatggagggatattgaggacgtcatcatcaagaccctcatctcggcccaccccatcatcaggcataactaccacacctgcttccccaaccacacactcaacagcgcctgctttgagatcctgggctttgacattttgttggaccacaaactcaaaccctggctgctggaggtcaaccactctccaagcttctccaccgactctcggttggataaagaggtgaaagatggtctgctgtatgacaccttagtcctgatcaacctggaaagctgtgacaagaagaaagtcttggaggaggagagacaacgggggcagttcctgcagcagtgttgttctcgggagatgaggattgaggaagccaagggtttccgggccgtgcagttaaagaaaactgaaacgtatgagaaggaaaactgtggagggttccgactgatttatcccagtctgaattcggagaagtatgagaagtttttccaggacaacaactccctcttccagaatactgttgcttccagggctcgggaggagtatgcccggcaactgatccaggagctgagactaaaacgggagaaaaagcccttccaaatgaagaagaaggtagagatgcagggggaatcggcaggcgagcaagtgagaaagaagggcatgaggggctggcaacagaaacaacagcagaaagacaaggccgccacccaagcctccaaacagtacatccagccattgacattagtatcctacacacctgacttgctcttgagtgtcagaggtgaaaggaaaaatgaaacagacagcagcctcaaccaggaggctcccacggaggaggccagctctgttttccccaagctgacgtctgcgaagcccttcagttctctacccgatctgaggaatatcaatctcagcagctcgaagttggagcccagtaaacccaacttcagcatcaaggaggccaagtctgcctctgcagtgaacgtattcactggcactgtgcacttaacctccgtagaaaccaccccagaatccaccacccaactctcaatctccccaaagtctccgccaaccctggctgtgaccgccagctctgagtacagtggcccagagacggacagggtggtatcctttaaatgcaagaagcagcagacccctccacacttaacccagaagaaaatgttaaaatcttttctgcccacaaaatccaagagcttctgggagagtccgaacacaaactggactttgctaaagagtgacatgaacaagccacatttgatatccgagctactcaccaagcttcaactgagtgggaagctctccttcttcccagctcactacaaccccaagctggggatgaataacctgtcacaaaacccctccctgcctggggagtgccactcccgcagtgacagctctggcgagaagaggcagctggatgtgtcctccctcctcttgcagagtcctcagagctataatgttactctgagggacctgctggtgattgccactccagcccaactggatccaaggccttgtagaagccacgcaagtgctatgagggacccatgtatgcaggatcaagaagcatacagccattgcctgatctctggccaaaaaggatgtgagaggagctagaatcagactggatctctgccacttttcccttcctacctcttaacttgcaggaaacaatgtgtctcttccgacagtgtctccagtgttcacagaatcaactgaagttttgtttgctcatctagatatactggtcttccattagttcctagtagcagcaatggggccaacagccctgcctctgttccctcccagttagcttacagtgctacaggaccatgatttctggggttggattggtgctgccccaggacacactccagttgccgtaccagtggcacttctctgggttcttcacatggcaccatcatccagaatactcccccagataaagcaacttcgggagtagtgtttcagagaaggactcatgatttccaggagtcaaaagccctcagtccaccaacagaactatgccagttggtcttcgtctccaagataaaagatgaggtcagggatgggcatggtgcataactctgagccctgagtgagagaactgaggcagctgcaacttcacaaggtcaaggcccgacctccgcccatccccaccagcccaaagacttgccacctcagtgcccgagcatcctctggtgacctccctcaccagcccaacttaatctcaccagtgaaaacagaggtgaggcgagagtacccagcctgaagatgcttcttctatcagcctgcagaaatgttacactttcccttcaggcatccattaataaaagaaattgccatgctt

SEQ ID NO: 48829 - DNA, 587 bp, Artificial Sequence
  derived and/or modified sequence
gagcgcgggttggggttggggctgtctggcagccaatgggagcgttactccttcatccttcgaggagggggccggcaggtgtggttgcaagctggactagcagcccagcggggcgagacgggggagtaggaattgcgggggcctggtatttccccagagcctcctcccaggccagggagatgccacagtgcccgactttggaaagccaggaaggggaaaactccgaagagaagggggacagttccaaagaagatccaaaagaaaccgtcgcgctggcttttgtgagagagaacccaggggcacaaaacggacttcagaatgcccagcagcaaggcaagaagaagaggaagaaaaagaggatgcctttaaaaaatagcaggaaaagaagatttccttgttttaagaaggcgctgatttgtcctggaaatttagtacgccttcagtatgatagcaccatactgacttatcaggatccaactgcagcttgtgcattccagttcttgtttaatatttcaccatgccttgctccattcagactgattgatgaaggaaagcttgtccactttcttattcatagcttcccttaa

SEQ ID NO: 48830 - DNA, 3454 bp, Artificial Sequence
  derived and/or modified sequence
gagcgcgggttggggttggggctgtctggcagccaatgggagcgttactccttcatccttcgaggagggggccggcaggtgtggttgcaagctggactagcagcccagcggggcgagacgggggagtaggaattgcgggggcctggtatttccccagagcctcctcccaggccagggagatgccacagtgcccgactttggaaagccaggaaggggaaaactccgaagagaagggggacagttccaaagaagatccaaaagaaaccgtcgcgctggcttttgtgagagagaacccaggggcacaaaacggacttcagaatgcccagcagcaaggcaagaagaagaggaagaaaaagagattggtgatcaatctatccagctgccggtatgagagtgtgcgcagggctgcccaacagtacggctttagagagggaggggaagacgatgactggactctctattggacagattactcagtgtcactggagcgggtgatggaaatgaaaagttaccagaagatcaatcacttccccgggatgagtgaaatctgccggaaggacttgctggccaggaacatgagccgcatgttaaagatgttccctaaagatttccgctttttccctaggacctggtgtcttcctgctgactggggagatttgcagacctacagcaggtcaagaaaaaataagacatacatttgtaagccggattcgggctgccaagggaaaggtatattcatcacccggacagtgaaagaaatcaaaccaggggaggatatgatctgtcagctgtatatttcaaagccctttatcattgatgggtttaagtttgacctacggatttatgtactggtgacatcctgtgaccctctcaggatttttgtgtacaatgaaggactggcccgctttgcgacgacctcttactcccgcccttgcacagacaacctggatgatatctgcatgcacctgactaattattccattaataagcacagttcaaatttcagtcgagatgcacactctggcagtaagaggaagctctccaccttcagtgcatacttggaggaccacagctacaacgtggagcagatatggagggatattgaggacgtcatcatcaagaccctcatctcggcccaccccatcatcaggcataactaccacacctgcttccccaaccacacactcaacagcgcctgctttgagatcctgggctttgacattttgttggaccacaaactcaaaccctggctgctggaggtcaaccactctccaagcttctccaccgactctcggttggataaagaggtgaaagatggtctgctgtatgacaccttagtcctgatcaacctggaaagctgtgacaagaagaaagtcttggaggaggagagacaacgggggcagttcctgcagcagtgttgttctcgggagatgaggattgaggaagccaagggtttccgggccgtgcagttaaagaaaactgaaacgtatgagaaggaaaactgtggagggttccgactgatttatcccagtctgaattcggagaagtatgagaagtttttccaggacaacaactccctcttccagaatactgttgcttccagggctcgggaggagtatgcccggcaactgatccaggagctgagactaaaacgggagaaaaagcccttccaaatgaagaagaaggtagagatgcagggggaatcggcaggcgagcaagtgagaaagaagggcatgaggggctggcaacagaaacaacagcagaaagacaaggccgccacccaagcctccaaacagtacatccagccattgacattagtatcctacacacctgacttgctcttgagtgtcagaggtgaaaggaaaaatgaaacagacagcagcctcaaccaggaggctcccacggaggaggccagctctgttttccccaagctgacgtctgcgaagcccttcagttctctacccgatctgaggaatatcaatctcagcagctcgaagttggagcccagtaaacccaacttcagcatcaaggaggccaagtctgcctctgcagtgaacgtattcactggcactgtgcacttaacctccgtagaaaccaccccagaatccaccacccaactctcaatctccccaaagtctccgccaaccctggctgtgaccgccagctctgagtacagtggcccagagacggacagggtggtatcctttaaatgcaagaagcagcagacccctccacacttaacccagaagaaaatgttaaaatcttttctgcccacaaaatccaagagcttctgggagagtccgaacacaaactggactttgctaaagagtgacatgaacaagccacatttgatatccgagctactcaccaagcttcaactgagtgggaagctctccttcttcccagctcactacaaccccaagctggggatgaataacctgtcacaaaacccctccctgcctggggagtgccactcccgcagtgacagctctggcgagaagaggcagctggatgtgtcctccctcctcttgcagagtcctcagagctataatgttactctgagggacctgctggtgattgccactccagcccaactggatccaaggccttgtagaagccacgcaagtgctatgagggacccatgtatgcaggatcaagaagcatacagccattgcctgatctctggccaaaaaggatgtgagaggagctagaatcagactggatctctgccacttttcccttcctacctcttaacttgcaggaaacaatgtgtctcttccgacagtgtctccagtgttcacagaatcaactgaagttttgtttgctcatctagatatactggtcttccattagttcctagtagcagcaatggggccaacagccctgcctctgttccctcccagttagcttacagtgctacaggaccatgatttctggggttggattggtgctgccccaggacacactccagttgccgtaccagtggcacttctctgggttcttcacatggcaccatcatccagaatactcccccagataaagcaacttcgggagtagtgtttcagagaaggactcatgatttccaggagtcaaaagccctcagtccaccaacagaactatgccagttggtcttcgtctccaagataaaagatgaggtcagggatgggcatggtgcataactctgagccctgagtgagagaactgaggcagctgcaacttcacaaggtcaaggcccgacctccgcccatccccaccagcccaaagacttgccacctcagtgcccgagcatcctctggtgacctccctcaccagcccaacttaatctcaccagtgaaaacagaggtgaggcgagagtacccagcctgaagatgcttcttctatcagcctgcagaaatgttacactttcccttcaggcatccattaataaaagaaattgccatgcttactgccagga

SEQ ID NO: 48831 - DNA, 580 bp, Artificial Sequence
  derived and/or modified sequence
aaatatgagggccgggcggacccaaagttagggcgagcgcgggttggggttggggctgtctggcagccaatgggagcgttactccttcatccttcgaggagggggccggcaggtgtggttgcaagctggactagcagcccagcggggcgagacgggggagtaggaattgcggaaccactggaggccttcagagggatgcttccagtagggaaatgaggaccaaaagatgaaaaggaggggcctggtatttccccagagcctcctcccaggccagggagatgccacagtgcccgactttggaaagccaggaaggggaaaactccgaagagaagggggacagttccaaagaagatccaaaagaaaccgtcgcgctggcttttgtgagagagaacccaggggcacaaaacggacttcagaatgcccagcagcaaggcaagaagaagaggaagaaaaagagattggtgatcaatctatccagctgccggtatgagagtgtgcgcagggctgcccaacagtacggctttagagagggaggggaagacgatgactggactctctattggacagattactcagtgtc

SEQ ID NO: 48832 - protein, 177 aa, Artificial Sequence
  derived and/or modified sequence
MKTVTMMMVVEMQALTQVLRAVLSACTWVSRKGDLQRMKQTHKGKPPSSMAFTGKFEMESEKNYDEFMKLLGISSDVIEKARNFKIVTEVQQDGQDFTWSQHYSGGHTMTNKFTVGKESNIQTMGGKTFKATVQMEGGKLVVNFPNYHQTSEIVGDKLVEVSTIGGVTYERVSKRLA

SEQ ID NO: 48833 - protein, 128 aa, Artificial Sequence
  derived and/or modified sequence
MAFTGKFEMESEKNYDEFMKLLGISSDVIEKARNFKIVTEVQQDGQDFTWSQHYSGGHTMTNKFTVGKESNIQTMGGKTFKATVQMEGGKLVVNFPNYHQTSEIVGDKLVEVSTIGGVTYERVSKRLA

SEQ ID NO: 48834 - DNA, 756 bp, Artificial Sequence
  derived and/or modified sequence
gcgacaacaaaacagattactttgaagggactagaaggaggacacagggtcctggaggaaggcagctggcaagttacagagcagaaagactttgcacctctggctccagggagctcacaggcaggggctggtccagcccagaggcgatgaagacagtgacgatgatgatggtggtggagatgcaggcgctgactcaggttctgagagctgtgttgtctgcgtgcacatgggtgagccggaaaggagacctgcagagaatgaaacagacacataaaggaaagcctcccagcagcatggctttcaccggcaagttcgagatggagagtgagaagaattatgatgagttcatgaagctccttgggatctccagcgatgtaatcgaaaaggcccgcaacttcaagatcgtcacggaggtgcagcaggatgggcaggacttcacttggtcccagcactactccgggggccacaccatgaccaacaagttcactgttggcaaggaaagcaacatacagacaatggggggcaagacgttcaaggccactgtgcagatggagggcgggaagctggtggtgaatttccccaactatcaccagacctcagagatcgtgggtgacaagctggtggaggtctccaccatcggaggcgtgacctatgagcgcgtgagcaagagactggcctaagcagccaggcccggcccagggagctacaaacccaccaataaaactgatataaggacagacgctgctcgctccagaa

SEQ ID NO: 48835 - DNA, 663 bp, Artificial Sequence
  derived and/or modified sequence
cattgcagactttgcacctctggctccagggagctcacaggcaggggctggtccagcccagaggcgatgaagacagtgacgatgatgatggtggtggagatgcaggcgctgactcaggttctgagagctgtgttgtctgcgtgcacatgggtgagccggaaaggagacctgcagagaatgaaacagacacataaaggaaagcctcccagcagcatggctttcaccggcaagttcgagatggagagtgagaagaattatgatgagttcatgaagctccttgggatctccagcgatgtaatcgaaaaggcccgcaacttcaagatcgtcacggaggtgcagcaggatgggcaggacttcacttggtcccagcactactccgggggccacaccatgaccaacaagttcactgttggcaaggaaagcaacatacagacaatggggggcaagacgttcaaggccactgtgcagatggagggcgggaagctggtggtgaatttccccaactatcaccagacctcagagatcgtgggtgacaagctggtggaggtctccaccatcggaggcgtgacctatgagcgcgtgagcaagagactggcctaagcagccaggcccggcccagggagctacaaacccaccaataaaactgatataaggacagacgct

SEQ ID NO: 48836 - DNA, 534 bp, Artificial Sequence
  derived and/or modified sequence
atgaaaaccgttacaatgatgatggtggtggaaatgcaggccctgacgcaggtgttgcgcgcagttctgagtgcatgcacgtgggtctctcgaaaaggagacctgcaaaggatgaagcagactcacaaaggaaagcctccgagcagcatggccttcaccggtaagtttgaaatggagtcagaaaagaattatgacgagtttatgaaattactggggatatcctctgatgtcatcgaaaaagcccggaatttcaaaattgtgaccgaagtccaacaagacggccaggattttacatggagccagcactacagcggcgggcacacgatgacgaacaagttcacagtggggaaggagtccaacattcagactatgggcggaaaaacctttaaagcaacagtccagatggaggggggtaagctggtcgtgaattttcctaactaccaccaaacctcagagattgtcggcgataaactggtcgaggtcagcactataggtggcgttacgtatgagagggtcagcaagcggctggcttag

SEQ ID NO: 48837 - DNA, 534 bp, Artificial Sequence
  derived and/or modified sequence
atgaagactgtaaccatgatgatggtggtcgaaatgcaggcacttacgcaggtgctgcgcgccgtcttgtctgcctgcacttgggtgagccgcaaaggcgacttgcaacggatgaagcagactcataagggcaagccaccctccagtatggctttcaccggcaagttcgaaatggagtctgagaagaattatgacgaattcatgaaactgcttggaatttcctcagatgtcatcgaaaaggcaaggaacttcaaaatagtcaccgaggtccagcaggatgggcaggactttacttggtcgcagcactattctggagggcacacaatgaccaataagttcaccgtcgggaaagagagcaacatccagaccatgggtggaaaaacttttaaggccactgtgcaaatggaagggggaaagctggtggttaactttccaaactatcatcagactagtgaaatcgtaggggacaaactggtggaggtgtctacaataggcggtgtgacctacgagagagtttccaagcgactggcatag

SEQ ID NO: 48838 - DNA, 534 bp, Artificial Sequence
  derived and/or modified sequence
atgaagacagtgaccatgatgatggtggtggagatgcaggccctgacccaggtgctgcgggctgtgctgagcgcctgcacctgggtgtccaggaagggggacctgcagaggatgaagcagacccacaagggcaagccacccagctccatggccttcaccgggaagtttgagatggagagcgagaagaactatgatgagttcatgaagctgctgggcatcagcagtgatgtgattgagaaggccaggaacttcaagatcgtgacagaggtgcagcaggacggccaggacttcacctggagccagcactacagcggcggccacaccatgaccaacaagttcaccgtgggcaaggagagcaacatccagaccatgggcggcaagaccttcaaggccaccgtgcagatggagggcggcaagctggtggtgaacttccccaactaccaccagaccagcgagatcgtgggggacaagctggtggaggtgtccaccatcggcggcgtgacctatgagcgggtgtccaagaggctggcctag

SEQ ID NO: 48839 - DNA, 534 bp, Artificial Sequence
  derived and/or modified sequence
atgaagaccgtgaccatgatgatggtggtggagatgcaggccctgacacaggtcttacgggctgtattgtcagcctgcacctgggtgtcccgaaagggtgatctccagcgcatgaagcagactcataaggggaagcctcctagttccatggcattcaccggaaaattcgagatggaatctgaaaagaactatgacgaattcatgaagcttctggggatcagcagcgatgtgatcgagaaagcgcggaatttcaaaatcgtgaccgaggttcagcaagacgggcaagattttacttggtctcagcactactcaggcggccatacaatgacaaacaagttcactgtgggcaaagaatccaatattcagaccatgggaggaaaaacttttaaagcaaccgtgcaaatggaaggagggaagctggttgtgaattttcctaactatcaccagacctctgagattgttggggacaagttggtggaggtcagcacaatcggcggggtgacgtacgaacgcgtctctaagagattagcctag

SEQ ID NO: 48840 - DNA, 534 bp, Artificial Sequence
  derived and/or modified sequence
atgaagaccgtgaccatgatgatggtggtggagatgcaggccctgacacaggtgctgagggcggttctgtccgcctgtacatgggtcagcaggaagggcgacctgcagcgcatgaagcaaacacacaaaggcaaacctccgagtagcatggcgttcaccggcaagtttgaaatggagtccgaaaaaaactacgatgagttcatgaagctactgggaatttcttcagacgtcatcgagaaggcccgcaacttcaaaatagttacggaggtgcaacaggatgggcaagattttacctggagtcaacactatagcggcgggcacactatgaccaacaaattcaccgtcgggaaagaatccaacattcagactatgggcgggaagacttttaaggcaactgttcagatggagggggggaaacttgttgtgaactttcccaactaccaccagacatctgagatagtaggcgataaattggtagaggtgtcaaccattggaggggtgacttatgaacgcgtgtcaaagaggcttgcctag

SEQ ID NO: 48841 - DNA, 534 bp, Artificial Sequence
  derived and/or modified sequence
atgaaaactgtaacaatgatgatggtagttgagatgcaggctttaacccaggtgctccgggctgttcttagtgcatgcacctgggtcagtagaaaaggtgacctgcagaggatgaagcagacacacaaagggaagccccctagtagcatggcatttaccggcaaattcgaaatggagtccgagaaaaactacgatgagtttatgaagctgctaggcatctcatccgatgtaatagagaaagcacgcaacttcaagattgtcacagaagtccaacaggacggacaggacttcacatggtcacaacattattctggcggtcataccatgaccaacaagttcactgtgggaaaggagtcgaacatccaaacaatgggcggtaaaacctttaaagcaactgtccaaatggaaggagggaaattggtggtgaacttcccaaattaccatcagacatcagaaatagttggtgacaagctcgtggaggtgagtacaataggtggggtgacatatgaaagagtgtcgaagagactggcctag

SEQ ID NO: 48842 - DNA, 534 bp, Artificial Sequence
  derived and/or modified sequence
atgaaaaccgttacgatgatgatggttgtggagatgcaggcgctgacacaggtgctcagagccgtgttgtctgcctgtacttgggtctcccgcaaaggagatctgcaaaggatgaaacaaacacacaaaggtaaacctccttcaagcatggcttttacaggaaaattcgagatggaatctgagaagaactacgacgagttcatgaaactgttgggcatcagctccgacgtgatcgaaaaggcaaggaattttaaaattgtcaccgaggtgcagcaagatggacaggacttcacttggagtcagcattatagcggtggtcataccatgacaaataagtttaccgttggaaaggaaagcaacattcaaacgatgggaggaaaaactttcaaagctaccgtgcaaatggaagggggtaagctggtcgtcaattttcctaattaccaccaaacaagcgaaatagtgggagataagctagtggaagtgtctaccatcggcggtgtcacatacgagcgcgtttcaaagagacttgcgtag

SEQ ID NO: 48843 - DNA, 534 bp, Artificial Sequence
  derived and/or modified sequence
atgaagaccgtgaccatgatgatggtggtggagatgcaggccctgacccaggtgctgagagccgtgctgagcgcctgcacctgggtgagcagaaagggcgacctgcagagaatgaagcagacccacaagggcaagccccccagcagcatggccttcaccggcaagttcgagatggagagcgagaagaactacgacgagttcatgaagctgctgggcatcagcagcgacgtgatcgagaaggccagaaacttcaagatcgtgaccgaggtgcagcaggacggccaggacttcacctggagccagcactacagcggcggccacaccatgaccaacaagttcaccgtgggcaaggagagcaacatccagaccatgggcggcaagaccttcaaggccaccgtgcagatggagggcggcaagctggtggtgaacttccccaactaccaccagaccagcgagatcgtgggcgacaagctggtggaggtgagcaccatcggcggcgtgacctacgagagagtgagcaagagactggcctag

SEQ ID NO: 48844 - protein, 1693 aa, Artificial Sequence
  derived and/or modified sequence
MADLEVYKNLSPEKVERCMSVMQSGTQMIKLKRGTKGLVRLFYLDEHRTRLRWRPSRKSEKAKILIDSIYKVTEGRQSEIFHRQAEGNFDPSCCFTIYHGNHMESLDLITSNPEEARTWITGLKYLMAGISDEDSLAKRQRTHDQWVKQTFEEADKNGDGLLNIEEIHQLMHKLNVNLPRRKVRQMFQEADTDENQGTLTFEEFCVFYKMMSLRRDLYLLLLSYSDKKDHLTVEELAQFLKVEQKMNNVTTDYCLDIIKKFEVSEENKVKNVLGIEGFTNFMRSPACDIFNPLHHEVYQDMDQPLCNYYIASSHNTYLTGDQLLSQSKVDMYARVLQEGCRCVEVDCWDGPDGEPVVHHGYTLTSKILFRDVVETINKHAFVKNEFPVILSIENHCSIQQQRKIAQYLKGIFGDKLDLSSVDTGECKQLPSPQSLKGKILVKGKKLPYHLGDDAEEGEVSDEDSADEIEDECKFKLHYSNGTTEHQVESFIRKKLESLLKESQIRDKEDPDSFTVRALLKATHEGLNAHLKQSPDVKESGKKSHGRSLMTNFGKHKKTTKSRSKSYSTDDEEDTQQSTGKEGGQLYRLGRRRKTMKLCRELSDLVVYTNSVAAQDIVDDGTTGNVLSFSETRAHQVVQQKSEQFMIYNQKQLTRIYPSAYRIDSSNFNPLPYWNAGCQLVALNYQSEGRMMQLNRAKFKANGNCGYVLKPQQMCKGTFNPFSGDPLPANPKKQLILKVISGQQLPKPPDSMFGDRGEIIDPFVEVEIIGLPVDCCKDQTRVVDDNGFNPVWEETLTFTVHMPEIALVRFLVWDHDPIGRDFVGQRTVTFSSLVPGYRHVYLEGLTEASIFVHITINEIYGKWSPLILNPSYTILHFLGATKNRQLQGLKGLFNKNPRHSSSENNSHYVRKRSIGDRILRRTASAPAKGRKKSKMGFQEMVEIKDSVSEATRDQDGVLRRTTRSLQARPVSMPVDRNLLGALSLPVSETAKDIEGKENSLAEDKDGRRKGKASIKDPHFLNFNKKLSSSSSALLHKDTSQGDTIVSTAHMSVTGEQLGMSSPRGGRTTSNATSNCQENPCPSKSLSPKQHLAPDPVVNPTQDLHGVKIKEKGNPEDFVEGKSILSGSVLSHSNLEIKNLEGNRGKGRAATSFSLSDVSMLCSDIPDLHSTAILQESVISHLIDNVTLTNENEPGSSISALIGQFDETNNQALTVVSHLHNTSVMSGHCPLPSLGLKMPIKHGFCKGKSKSSFLCSSPELIALSSSETTKHATNTVYETTCTPISKTKPDDDLSSKAKTAALESNLPGSPNTSRGWLPKSPTKGEDWETLKSCSPASSPDLTLEDVIADPTLCFNSGESSLVEIDGESENLSLTTCEYRREGTSQLASPLKLKYNQGVVEHFQRGLRNGYCKETLRPSVPEIFNNIQDVKTQSISYLAYQGAGFVHNHFSDSDAKMFQTCVPQQSSAQDMHVPVPKQLAHLPLPALKLPSPCKSKSLGDLTSEDIACNFESKYQCISKSFVTTGIRDKKGVTVKTKSLEPIDALTEQLRKLVSFDQEDNCQVLYSKQDANQLPRALVRKLSSRSQSRVRNIASRAKEKQEANKQKVPNPSNGAGVVLRNKPSAPTPAVNRHSTGSYIAGYLKNTKGGGLEGRGIPEGACTALHYGHVDQFCSDNSVLQTEPSSDDKPEIYFLLRL

SEQ ID NO: 48845 - protein, 1002 aa, Artificial Sequence
  derived and/or modified sequence
MADLEVYKNLSPEKVERCMSVMQSGTQMIKLKRGTKGLVRLFYLDEHRTRLRWRPSRKSEKAKILIDSIYKVTEGRQSEIFHRQAEGNFDPSCCFTIYHGNHMESLDLITSNPEEARTWITGLKYLMAGISDEDSLAKRQRTHDQWVKQTFEEADKNGDGLLNIEEIHQLMHKLNVNLPRRKVRQMFQEADTDENQGTLTFEEFCVFYKMMSLRRDLYLLLLSYSDKKDHLTVEELAQFLKVEQKMNNVTTDYCLDIIKKFEVSEENKVKNVLGIEGFTNFMRSPACDIFNPLHHEVYQDMDQPLCNYYIASSHNTYLTGDQLLSQSKVDMYARVLQEGCRCVEVDCWDGPDGEPVVHHGYTLTSKILFRDVVETINKHAFVKNEFPVILSIENHCSIQQQRKIAQYLKGIFGDKLDLSSVDTGECKQLPSPQSLKGKILVKGKKLPYHLGDDAEEGEVSDEDSADEIEDECKFKLHYSNGTTEHQVESFIRKKLESLLKESQIRDKEDPDSFTVRALLKATHEGLNAHLKQSPDVKESGKKSHGRSLMTNFGKHKKTTKSRSKSYSTDDEEDTQQSTGKEGGQLYRLGRRRKTMKLCRELSDLVVYTNSVAAQDIVDDGTTGNVLSFSETRAHQVVQQKSEQFMIYNQKQLTRIYPSAYRIDSSNFNPLPYWNAGCQLVALNYQSEGRMMQLNRAKFKANGNCGYVLKPQQMCKGTFNPFSGDPLPANPKKQLILKVISGQQLPKPPDSMFGDRGEIIDPFVEVEIIGLPVDCCKDQTRVVDDNGFNPVWEETLTFTVHMPEIALVRFLVWDHDPIGRDFVGQRTVTFSSLVPGYRHVYLEGLTEASIFVHITINEIYGKWSPLILNPSYTILHFLGATKNRQLQGLKGLFNKNPRHSSSENNSHYVRKRSIGDRILRRTASAPAKGRKKSKMGFQEMVEIKDSVSEATRDQDGVLRRTTRSLQARPVSMPVDRNLLGALSLPVSETAKDIEGKENSLVQI

SEQ ID NO: 48846 - DNA, 5082 bp, Artificial Sequence
  derived and/or modified sequence
atggccgacctggaggtttataagaacctatccccagagaaggtagaaaggtgcatgtctgtgatgcaaagtggaacccagatgatcaagctgaaacgcggaacaaagggcttggtcaggctattctaccttgacgaacataggaccaggctgcgttggaggcctagcaggaaatctgagaaagcaaaaattttgatcgactccatctataaagtgacggaaggccgtcagagcgagatattccacaggcaggcagaggggaatttcgatccctcctgttgtttcaccatttatcatggaaatcacatggaaagcttggatttaatcacgtccaatccagaggaggcgaggacttggatcaccggactgaaatatctcatggctggcatttctgacgaggactccttggcaaaacggcagcgcactcacgaccaatgggttaagcagacatttgaagaagccgataagaacggagacggacttctgaacatcgaagagatccaccagctcatgcacaaacttaatgtcaacttaccccgcaggaaagtcagacagatgttccaagaagcagatactgatgagaatcagggtactcttacgttcgaggaattttgcgtgttttataagatgatgtctctgaggagagacttgtacctcctgctgctttcatactccgacaaaaaggaccatctgaccgtggaggagctggcccagttccttaaggtggaacagaagatgaacaacgtcaccactgactactgccttgatattattaagaaatttgaggtgtctgaggaaaacaaggttaaaaacgtgctagggattgagggatttacaaatttcatgcgctctcccgcgtgcgacatctttaatccactacaccacgaagtgtatcaggacatggaccagccactgtgtaattattacattgcttcctcccacaacacataccttaccggagatcagttgctcagtcagtcaaaagtcgacatgtatgcccgcgtactgcaggagggttgtagatgcgtcgaggttgactgctgggacgggcctgacggagagcctgttgtgcatcatgggtatactcttacctccaagatcctgttccgcgatgtcgtggaaaccattaacaagcacgccttcgtgaaaaatgaattccctgtgattttatcaatcgagaatcattgctccatccagcagcagagaaagatcgcacagtatttaaaggggatcttcggcgataaactggatctgagtagcgtcgatacaggagagtgtaagcagctgcccagtccacaatccctgaagggcaaaattcttgttaaagggaaaaaattaccctatcatttaggagacgatgctgaggagggtgaggtttccgatgaagacagcgccgatgagattgaggacgaatgtaaattcaagctccattactcaaacggcactacagaacaccaagtggagtctttcattcgaaaaaagctggagtccttattgaaggaaagccagattcgtgataaagaagatccagattcatttacagttcgggcattacttaaggccacacacgagggtctgaatgcccacttgaagcagtctcccgacgtgaaagaaagtgggaagaagagccacgggcgttcactgatgaccaatttcggaaagcacaagaagacaacgaagtcaagatccaaatcttactccactgatgacgaagaagacactcaacagagtactggcaaagagggtggacagctctatcggctcggacggcggcgcaaaaccatgaaactgtgcagagagcttagcgatctcgttgtttatacaaatagcgtagctgctcaagacattgttgacgatggaacaacaggcaatgtgctgagcttctctgaaaccagggcacaccaggtcgtgcagcagaagagtgaacagttcatgatatataatcagaaacaactgacacggatctatccgagcgcctatcgcatagatagctctaacttcaaccccctgccatactggaacgctggctgtcagttagtcgctcttaactaccagagcgagggtcgcatgatgcagctgaacagagccaagttcaaggctaacggcaactgcggttatgttctgaagccccagcaaatgtgtaaggggacgtttaaccctttcagcggagaccctcttccagctaacccaaagaaacagctgatcctgaaggtgatctcggggcaacaattgcctaagcctcctgactcgatgtttggtgaccgcggcgaaattatcgaccccttcgtggaggttgagatcatcgggttacctgtggattgctgtaaagaccaaacacgggtggtagatgacaatgggtttaatccagtttgggaggagactctcactttcactgtgcatatgccagagatcgcactagtgcgcttcctcgtgtgggaccatgatcccattggtcgagatttcgtgggacagcgtacagtgactttttcttctcttgtccccggttatagacatgtttacctggagggccttaccgaggccagcatattcgtccacataaccattaacgaaatctatggtaagtggtcacccctgattctgaatcccagttacactatcctccacttcctgggcgcgaccaaaaaccgccagctgcagggcttgaagggtcttttcaacaaaaaccccagacacagctcctccgagaataatagtcattatgtgagaaagaggtcgatcggcgataggatcctgcgccgcactgcctcggcaccagccaaggggcggaaaaaatcaaaaatggggtttcaggagatggttgaaattaaggacagcgtgtctgaggccacaagagaccaggatggagtgctgaggcggaccacaagaagcttgcaggcacgacctgtcagcatgcctgtggataggaacctcctcggcgcactcagcctgccagtctccgaaaccgctaaggacatcgagggcaaagagaactctctcgccgaggacaaggacggccggaggaagggaaaggctagcattaaggaccctcactttcttaactttaataagaaactgagctctagcagcagcgctctgttacacaaggatacatctcagggggacaccatcgtgagcaccgcccatatgagcgtgacgggggaacagctcggcatgagctcacctcgggggggtagaacaactagtaacgccacaagcaactgccaggaaaacccctgtccaagtaagagtctcagcccaaaacaacacctggcccccgacccggtggtgaatccgactcaagatctgcacggagtgaagatcaaggagaaaggaaatccagaggatttcgtggaagggaaatctattctgtctgggagcgtgctctcgcatagcaacctggagatcaaaaacctggagggcaaccgaggtaaggggcgggccgccactagcttttccctttccgatgtgtctatgctgtgttctgatatccccgatctgcacagcaccgccatactgcaagagtccgtaattagccaccttattgataacgtgacacttacaaacgagaacgaaccaggttcatctattagcgcgctgatcggccaattcgacgaaacaaataaccaggctctgactgttgtttcccacttgcacaacacatccgtgatgagcggacactgccccttgccctctctggggctgaagatgcccattaagcacgggttctgtaagggtaagagtaaaagctcttttctgtgtagcagtcctgaactcatcgctctgtcatcttctgagaccactaagcacgccacaaacacggtatatgagactacatgcacacctatctccaaaaccaagccagatgatgacctctcctccaaagcaaagaccgcggcgctcgaaagcaatttaccaggttcaccgaacaccagtcgagggtggctccccaaaagtccgacaaagggtgaagattgggaaactctcaaatcctgctctcccgcttccagccctgacctgacactcgaagacgttattgccgatccaactctgtgcttcaattcaggagaaagctcactggttgagattgatggggaaagtgagaatctcagcctgactacctgtgagtataggagagaggggacctcacaactcgctagtccccttaaattaaagtacaaccaaggtgttgtcgagcatttccagagggggctccggaacggctactgtaaggagacgctgagaccgagcgtgcccgagatatttaacaatattcaagatgtgaagacccagtctataagttacctggcctatcagggtgccggcttcgtccacaaccattttagcgactcagacgctaagatgtttcagacgtgtgttcctcagcagtctagcgcacaggacatgcacgtaccagtcccgaaacagctggcccatctcccgctcccggcgctgaagctgccatctccatgtaaaagcaaatcactgggcgacctgacgagtgaagatatagcctgcaattttgagtccaaataccagtgtatttccaagagttttgtgaccaccggcatacgagataaaaaaggggtaactgttaaaactaagtctctggagcccatcgacgcactgaccgagcagctgcgtaagttagtgtccttcgaccaggaagataactgccaagttctgtatagtaagcaggacgcaaaccaattgccccgggcccttgtgagaaagttatcctctagatctcagtccagagtccggaacattgccagtcgagctaaagagaagcaggaagcaaataaacaaaaagtgcccaatccaagcaatggcgctggcgtcgtgctaagaaataagccttccgctcccacacccgcagtaaaccggcattcaacggggtcctacattgctggttatctgaagaatactaaaggaggtggactggagggcagagggatccccgaaggcgcttgcaccgccctgcactatggccatgtggatcagttctgcagtgataattcggtgcttcagaccgaacccagtagcgacgataagccggaaatctattttctcctcaggctatag

SEQ ID NO: 48847 - DNA, 5082 bp, Artificial Sequence
  derived and/or modified sequence
atggctgacctggaggtgtacaagaacctgagccctgagaaggtggagcgctgcatgtctgtgatgcagagcggcacccagatgatcaagctgaagaggggcaccaagggcctggtgcggctcttctacctggatgagcacaggacccggctgcgctggaggcccagcaggaagtctgagaaggccaagatcctgattgacagcatctacaaggtgacagagggccggcagagcgagatcttccaccggcaggccgagggcaactttgaccccagctgctgcttcaccatctaccacggcaaccacatggagagcctggacctgatcaccagcaaccctgaggaggcccggacctggatcaccggcctgaagtacctgatggccggcatcagtgatgaggacagcctggccaagaggcagaggacccatgaccagtgggtgaagcagacctttgaggaggccgacaagaatggagatggcctgctgaacatcgaggagatccaccagctgatgcacaagctgaatgtgaacctgcccaggaggaaggtgcggcagatgttccaggaggccgacacagatgagaaccagggcaccctgacctttgaggagttctgtgtgttctacaagatgatgagcctgcggcgggacctgtacctgctgctgctgagctacagcgacaagaaggaccacctgactgtggaggagctggcccagttcctgaaggtggagcagaagatgaacaacgtgaccacagactactgcctggacatcatcaagaagtttgaggtgtctgaggagaacaaggtgaagaatgtgctgggcatcgagggcttcaccaacttcatgaggagccctgcctgtgacatcttcaaccccctgcaccacgaggtgtaccaggacatggaccagcccctgtgcaactactacatcgccagcagccacaacacctacctgactggagaccagctgctgagccagagcaaggtggacatgtatgcccgggtgctgcaggagggctgccgctgtgtggaggtggactgctgggatggcccagatggagagcctgtggtgcaccacggctacaccctgaccagcaagatcctcttcagagatgtggtggagaccatcaacaagcacgcctttgtgaagaatgagttccctgtgatcctgagcattgagaaccactgcagcatccagcagcagaggaagatcgcccagtacctgaagggcatctttggagacaagctggacctgagctctgtggacacaggagagtgcaagcagctgcccagcccccagagcctgaagggcaagatcctggtgaagggcaagaagctgccctaccacctgggagatgatgctgaggagggggaggtgtctgatgaggacagcgcagatgaaattgaagatgagtgcaagttcaagctgcactacagcaatggcaccacagagcaccaggtggagagcttcatcaggaagaagctggagagcctgctgaaggagagccagatccgggacaaggaggaccctgacagcttcaccgtgcgggccctgctgaaggccacccatgagggcctgaatgcccacctgaagcagagcccagatgtgaaggagagcggcaagaagagccacggccgcagcctgatgaccaactttgggaagcacaagaagaccaccaagagccgcagcaagagctacagcacagatgatgaggaggacacccagcagagcacaggcaaggagggcggccagctgtaccgcctgggcagaagaaggaagaccatgaagctgtgccgggagctgagtgacctggtggtgtacaccaacagcgtggccgcccaggacatcgtggatgatggcaccactggaaatgtgctgtccttcagcgagacccgggcccaccaggtggtgcagcagaagtctgagcagttcatgatctacaaccagaagcagctgacccgcatctaccccagcgcctacagaattgacagcagcaacttcaaccccctgccctactggaatgccggctgccagctggtggccctgaactaccagagcgagggccgcatgatgcagctgaacagagccaagttcaaggccaatggaaactgtggctacgtgctgaagccccagcagatgtgcaagggcaccttcaaccccttcagcggggaccccctgcctgccaaccccaagaagcagctgatcctgaaggtgatcagcggccagcagctgcccaagcccccagacagcatgtttggagacagaggagagatcatcgacccctttgtggaggtggagatcatcggcctgcctgtggactgctgcaaggaccagaccagggtggtggatgacaatggcttcaaccctgtgtgggaggagaccctgaccttcaccgtgcacatgcctgagatcgccctggtgcgcttcctggtgtgggaccatgaccccatcggccgggactttgtgggccagaggacagtgaccttcagcagcctggtgcccggctaccgccacgtgtacctggagggcctgacagaggccagcatctttgtgcacatcaccatcaatgagatctacggcaagtggagccccctcatcctgaaccccagctacaccatcctgcacttcctgggcgccaccaagaaccggcagctgcagggcctgaagggcctcttcaacaagaaccccaggcacagcagcagcgagaacaacagccactacgtgaggaagaggagcattggagaccgcatcctgcggaggacagccagcgccccagccaagggcaggaagaagagcaagatgggcttccaggagatggtggagatcaaggacagcgtgtctgaggccacccgggaccaggatggagtgctgcggaggaccaccaggagcctgcaggcccggcctgtgtccatgcctgtggacaggaacctgctgggcgccctgagcctgcctgtgtctgaaacagccaaggacatcgagggcaaggagaacagcctggccgaggacaaggatggccgcaggaagggcaaggccagcatcaaggacccccacttcctgaacttcaacaagaagctgagcagcagcagcagcgccctgctgcacaaggacaccagccagggcgacaccatcgtgtccacagcccacatgtctgtgactggagagcagctgggcatgagcagcccccggggcggccgcaccaccagcaatgccaccagcaactgccaggagaacccctgccccagcaagagcctgagccccaagcagcacctggccccagaccctgtggtgaaccccacccaggacctgcatggagtgaagatcaaggagaagggcaaccctgaggactttgtggagggcaagagcatcctgagcggctctgtgctgagccacagcaacctggagatcaagaacctggagggcaacagaggcaagggccgggccgccaccagcttcagcctgagtgatgtgtccatgctgtgcagcgacatcccagacctgcacagcacagccatcctgcaggagagcgtcatcagccacctgattgacaacgtgaccctgaccaatgaaaatgagcccggcagcagcatcagcgccctgattggccagtttgatgagaccaacaaccaggccctgactgtggtgagccacctgcacaacacctctgtgatgagcggccactgccccctgcccagcctgggcctgaagatgcccatcaagcacggcttctgcaagggcaagagcaagagcagcttcctgtgcagcagccctgagctgattgccctgagcagcagcgagaccaccaagcacgccaccaacacagtgtatgagaccacctgcacccccatcagcaagaccaagccagatgatgacctgagcagcaaggccaagacagctgccctggagagcaacctgcccggcagccccaacaccagccggggctggctgcccaagagccccaccaagggggaggactgggagaccctgaagagctgcagccctgccagcagcccagacctgaccctggaggatgtgattgctgaccccaccctgtgcttcaacagcggggagagcagcctggtggagattgatggagagagcgagaacctgagcctgaccacctgtgagtacagaagagagggcaccagccagctggccagccccctgaagctgaagtacaaccagggcgtggtggagcacttccagaggggcctgagaaatggctactgcaaggagaccctgcggcccagcgtgcctgagatcttcaacaacatccaggatgtgaagacccagagcatctcctacctggcctaccagggcgccggctttgtgcacaaccacttcagtgacagtgatgccaagatgttccagacctgtgtgccccagcagagcagcgcccaggacatgcacgtgcctgtgcccaagcagctggcccacctgcccctgcctgccctgaagctgcccagcccctgcaagagcaagagcctgggggacctgaccagtgaagatattgcctgcaactttgagagcaagtaccagtgcatcagcaagagctttgtgaccaccggcatccgggacaagaagggcgtgacagtgaagaccaagagcctggagcccattgatgccctgacagagcagctgaggaagctggtgtcctttgaccaggaggacaactgccaggtgctgtacagcaagcaggatgccaaccagctgccccgggccctggtgaggaagctgagcagccgcagccagagccgggtgagaaatattgccagccgggccaaggagaagcaggaggccaacaagcagaaggtgcccaaccccagcaatggagctggggtggtgctgaggaacaagcccagcgcccccaccccagctgtgaacagacacagcacaggcagctacatcgccggctacctgaagaacaccaagggcggcggcctggagggccggggcatccctgagggcgcctgcacagccctgcactacggccacgtggaccagttctgcagcgacaacagcgtgctgcagacagagcccagcagtgatgacaagccagagatctacttcctgctgcggctgtag

SEQ ID NO: 48848 - DNA, 5082 bp, Artificial Sequence
  derived and/or modified sequence
atggccgacctggaggtgtacaagaacctgagccccgagaaggtggagaggtgtatgagtgtaatgcagtctggcacgcaaatgatcaagctgaaaaggggtaccaaagggctcgttaggctattctatctcgacgagcatcggacccggttaaggtggaggccaagccgcaagtccgagaaggcaaagatccttatcgactccatttataaggttaccgagggaaggcagtcagagatcttccacaggcaggccgaggggaacttcgatcccagctgttgcttcacaatatatcatggaaaccatatggagtcactggacctgatcacaagcaatcctgaagaggctcgcacgtggattacagggctgaagtatctcatggccgggataagtgacgaggatagcctagcaaagcggcaaagaactcacgaccaatgggtaaaacagacattcgaggaagctgacaaaaacggggacgggctgctcaacatcgaagaaatccaccaactgatgcataagttgaatgtgaaccttccgagaagaaaagtgaggcagatgttccaggaagccgataccgatgaaaatcagggcaccctaacctttgaggaattttgcgtcttttacaaaatgatgagcctgcgccgagatctctacctgctgctgctctcctactcagacaagaaggaccaccttaccgtcgaagagctggcccagtttctaaaagtcgaacagaagatgaacaatgttactacggattactgcctggacatcatcaaaaagttcgaggtgtcagaagaaaataaagtgaaaaatgtcctcgggatcgagggctttaccaacttcatgagatcgcccgcttgtgatatttttaatcccctgcatcacgaggtgtatcaggacatggatcagccactgtgcaactactatatcgcgtcgtcccataatacctacctaaccggcgatcaactgctgtcccaatcaaaggtggacatgtatgctagggtgctccaggaagggtgccgctgtgttgaggtagattgttgggatggccctgacggcgaaccagtggtgcaccacggatacacactgacttccaaaatactgttccgcgacgtagtggagaccataaacaaacatgccttcgtaaaaaatgagttccctgtcatcttgtccattgagaatcactgcagcatacagcagcaaaggaaaattgcgcagtatttgaaggggatctttggcgacaagctcgacctgtctagtgtggataccggggagtgtaaacagctcccctctcctcaaagtcttaagggcaagatcttagttaagggaaagaaactgccataccatctgggggacgatgcagaggaaggagaggtcagcgacgaggactcagccgatgaaatcgaggatgaatgcaagttcaagctccattacagcaacggcacaacagaacatcaggtggaatctttcatcagaaagaagcttgaatctctcttaaaagagtcccagattcgggataaggaagacccagactcattcacagttcgagcgctcctcaaagctacacacgaagggttgaatgcccatcttaaacagtcccccgatgttaaggagagtgggaagaaatcccacggtcggagcctgatgactaactttggcaaacacaaaaagaccacaaagtctaggtcgaaatcatactccaccgatgatgaggaggacacgcagcagagtactggcaaggagggtggtcagctttacagattggggcgccgcaggaaaaccatgaagctttgcagagaactgtcagacctggtggtgtatacaaactccgtggccgctcaagacatcgtcgatgacggaacaactggaaacgtgctgtccttctccgaaacccgagcacaccaggtggtccagcaaaagtccgagcaatttatgatatataatcagaagcagctcacgaggatttatccttccgcatatagaatagattctagtaattttaatccccttccatactggaatgcagggtgtcagttagtcgccttgaattaccaatcagaaggtcgtatgatgcagctgaacagagcaaaatttaaggcaaatggcaactgcggctatgtactgaaacctcagcagatgtgcaagggcaccttcaatcctttctccggtgacccacttccagcaaatccaaagaaacagcttattctcaaggtgataagcggccagcaactgccaaaacccccggattctatgttcggcgaccgcggggaaattattgacccctttgtcgaggtggaaatcattggcctgcctgttgactgctgcaaggatcaaacccgcgtcgtcgacgacaatggcttcaatccagtgtgggaagagactctgacctttacagtccatatgccagagattgcccttgtgcgatttcttgtgtgggaccatgacccaattgggagggatttcgtgggacaacgcacggtgacctttagcagtctggtgcccgggtatagacacgtgtacctggaagggttgacggaagcatccatctttgtgcatattaccatcaatgagatttacggcaagtggagccccctgatcctgaatcccagctataccatcctgcattttctcggcgcgaccaaaaatcgccaattgcagggcctcaaaggtctgtttaacaaaaatccccgccacagcagttcagagaacaactctcactatgtccgtaaaaggagtatcggcgatcgcatcctgcgccggactgcctccgcaccagccaagggaaggaaaaagtctaaaatgggcttccaggaaatggtcgagattaaagatagtgtgagcgaggcaacacgggaccaagacggggtgctgagacggaccactagatcgctgcaggcccgtcctgtcagtatgcctgtggacaggaacctgctgggggcacttagcctccccgtttcagagaccgctaaagatatcgagggtaaggagaattccctcgccgaagacaaggacggcagacgcaagggaaaggcaagcattaaggacccgcactttctcaacttcaacaagaagctcagcagcagctcaagcgccctgcttcacaaggacacctctcagggagatacaatagtgtccacagcccatatgtctgtgacaggggagcaactgggcatgagctccccgaggggaggaaggaccaccagtaatgccacctcaaactgtcaggagaacccatgtccttccaaatccctcagcccaaagcagcacctggctcctgacccggtagtgaaccctacccaggacctccatggagtcaagatcaaggagaaagggaacccggaggatttcgtggagggcaaatcaatactgagcggatctgtgttgtcccacagtaacttggagattaagaatctcgagggcaaccgaggtaaggggcgcgccgccacctctttttccctttccgacgtctctatgctatgtagcgatatccccgacttgcactccactgctatcctccaggagtccgtgatcagtcatctgattgataacgttactttgaccaatgagaatgaacccggcagcagtatcagcgcattaatcggacagtttgatgagaccaataatcaggccctgacggtggtgtcgcacctacataacaccagcgtgatgagcggacactgtccgttgcctagcctcggcctcaaaatgcccattaagcatgggttctgtaaaggaaaatcgaagtcttctttcctgtgttcgtctcccgaattgatcgccctatcctcctccgagacaacaaaacacgccacaaataccgtgtacgaaactacatgtaccccaatttccaagacaaagcccgacgatgacctgtcttctaaggccaagaccgccgccctcgagtccaatctccccgggtcccccaacacatcccgcgggtggctgccgaagagtccaactaagggagaggactgggagaccctgaaaagttgttctcccgcttcaagccccgatctaactcttgaagatgttatcgctgatcctacgctttgcttcaacagcggagagtcatctctcgtggagatcgacggcgagtctgagaatctgtctctcaccacctgtgaatatcgccgagaagggacaagtcaactggcttccccgctcaaacttaagtataaccaaggagtcgtcgaacattttcagagaggcctgagaaacggatactgtaaagagacactcagaccatccgtcccagagattttcaataatattcaagacgtgaagacacagtctatctcatatctcgcctaccagggcgccgggtttgtccacaaccacttttcagacagcgacgccaagatgttccagacttgtgtcccacagcagagctctgctcaagatatgcatgtgcctgtccccaaacagctggctcacctgcccctgccggccttaaagctcccatcaccctgtaagtctaagtccctcggtgaccttacgtcagaggacattgcatgcaattttgagtccaaataccagtgcatttccaagtctttcgtgaccaccggcattagggacaaaaaaggggtcactgtcaaaacgaaatctctcgaaccaattgatgccctaactgagcagctccggaagctcgtgtcttttgaccaggaagacaattgtcaggtgctttacagtaaacaggatgcaaaccaactgcctcgcgcattggtccggaagttgagctctcgctcccaatcacgtgtgcgaaacatcgcctctcgagctaaagaaaagcaagaggcaaacaaacagaaagtgcctaacccctcaaacggagcaggcgtcgtcctgaggaacaaaccctccgcccctaccccagccgtcaatcgacactctactggaagttacatagcaggttacctcaaaaacaccaagggaggaggcctcgagggcagaggcataccagaaggtgcgtgcacagctttgcactacggacacgtggaccagttttgttccgacaactctgtactccagacggagcccagcagtgatgataagccggagatttatttcctcctgaggctgtag

SEQ ID NO: 48849 - DNA, 6168 bp, Artificial Sequence
  derived and/or modified sequence
atggcagaccttgaagtgtataaaaacttaagtccagaaaaagttgaaagatgcatgagtgtgatgcagtccgggacacagatgatcaagctgaaacgtggaaccaaagggcttgtccgcctcttttacctggatgagcaccggacacgcctccgatggcgaccctctaggaagagtgagaaggcaaaaatacttattgattccatttacaaagtgactgagggccggcagtctgaaatattccacagacaagctgaggggaacttcgaccccagctgctgcttcaccatctaccatggcaaccacatggagtccctggacctcatcacctccaaccccgaggaggcccgcacctggatcacaggcctcaagtacctgatggctggcatcagtgatgaagactcccttgccaaaaggcagaggacccatgaccaatgggtgaagcagacctttgaggaagctgataagaatggtgacggcttgctgaatattgaagagatacatcagctgatgcataaactgaatgttaatctgccccgaagaaaagtcagacaaatgtttcaggaagccgacacagatgagaatcagggaactttgacatttgaagagttctgtgttttttacaaaatgatgtctttgagacgagacctttatttgttacttttgagctacagtgacaagaaagatcacctaactgtggaagaactggctcagtttttgaaggtggagcaaaagatgaataatgtgacaacggactattgtcttgacatcataaagaagtttgaagtttcagaagaaaataaggtgaaaaatgttcttggcatagaaggcttcacgaacttcatgcgtagtcctgcctgtgacatatttaacccattgcaccatgaagtgtaccaagacatggatcagcccctctgcaactactacattgcttcctctcacaatacatacctgactggagaccagctcctttctcagtccaaagtggatatgtatgcacgggtgctgcaagagggctgtcgctgtgtggaagttgactgttgggatggcccagatggagagccagtagtacatcatggttacactctcacttcaaaaattctcttcagagatgttgtggagaccatcaacaagcatgcctttgtgaagaatgagtttcctgttatattgtctatcgagaatcactgcagtatccagcagcaaaggaagattgctcagtacctgaaaggaatattcggagacaaactggacctgtcatctgttgatacaggggagtgcaagcagcttccaagccctcaaagtttgaaaggcaaaattctagtgaagggtaagaagttgccttatcaccttggggatgatgcagaggaaggggaagtttctgatgaggacagtgcagatgaaattgaagacgagtgcaaattcaagctccattatagtaatgggaccactgagcatcaggtggaatctttcataaggaaaaaactggagtcactgttaaaagaatctcaaattcgagataaagaagatcctgatagtttcacagtgcgggcactactgaaggccacgcatgaaggcttaaatgcacacctgaagcagagtccagatgtaaaggaaagtggaaagaaatcacatggacgatccctcatgaccaactttggaaaacataagaaaactacaaaatcacggtctaaatcttacagtactgatgatgaggaagacacacagcagagtactggcaaggagggtggccagctgtacagattgggtcgccgaaggaaaaccatgaagctctgccgagaactctctgatttggttgtgtacacaaactccgtggccgctcaggacattgtggatgacggaaccacaggaaatgtgttatcattcagtgaaacaagagcacatcaggttgttcagcaaaaatcagagcagttcatgatttataatcaaaagcaactcacgaggatttacccctctgcctaccgcattgattccagtaacttcaaccctctcccctactggaacgcaggctgccagctagtggcactgaattatcaatctgaaggacgaatgatgcagttaaaccgagccaaattcaaggcaaatggcaattgtggctatgtcctcaaaccccagcaaatgtgcaaaggtactttcaaccctttctctggtgaccctcttcctgccaaccccaaaaagcagctcatcctgaaagttatcagtggacagcaactccccaaacctccagactccatgtttggagatcgaggcgagatcattgacccttttgttgaagttgaaattattggattgccagtagattgttgtaaagatcaaacccgtgtggtagatgacaatggatttaaccctgtgtgggaagaaacactgacatttacagtacacatgccagaaatagctttggttcggttccttgtgtgggatcacgatcccattggacgagactttgttggacaaagaactgtgaccttcagcagcttagtgcctggctaccggcatgtctatttggaaggactgacagaagcatccatatttgtacacataaccatcaatgaaatctatggaaagtggagccctttaatactcaaccccagttatactatattgcactttctaggagctacaaagaacagacaactccagggtctgaagggactgttcaataagaatcctaggcacagttcttcagaaaacaattcccattatgtacggaagcgatccattggagatagaattctgcgacgcacagctagcgccccagccaaaggcaggaaaaagagcaaaatgggcttccaagaaatggtggagataaaggattctgtgtccgaggccacaagagatcaagatggcgtgctgaggaggaccacacgcagtttgcaagcacgccctgtctctatgcctgttgacagaaaccttctgggagctttgtcgctgcctgtatctgaaacagcaaaagacattgaaggaaaagaaaactctctagcagaagataaagatggcagaagaaaagggaaagcaagtataaaagatccacattttctaaatttcaacaaaaagttatcatcctcctccagtgctctgctccacaaagataccagccaaggggacaccattgtatctactgcccacatgtcagtcacaggagaacagctgggcatgtcaagtcctaggggtgggagaaccacatcaaatgccacaagcaattgccaggaaaacccctgtcccagcaagtctctctccccaaagcagcatttggctcccgatcctgtagttaaccccacacaagatctgcatggtgtgaaaatcaaggaaaagggtaatcctgaggactttgtggaagggaaaagcatcttgtcaggaagcgtcctttctcatagcaacctagaaattaagaacctggaaggtaataggggtaagggccgagctgcaacatccttttctttgtcagacgtctccatgctctgttctgacatacctgacctacattcaactgcaattctgcaggagagtgtaatttcccatcttattgacaatgtcactttaacaaatgagaatgagccgggcagttccatctcagccctgattggccagtttgatgagaccaacaatcaggctctcacagttgtttctcatcttcataataccagtgtgatgtcaggccattgtcccttgcctagcctgggcctaaaaatgcccatcaagcatggtttttgcaagggaaaatccaagtcttccttcctgtgctcatctccggagctgatagcactctcgagttctgagaccaccaaacatgcaacgaacacagtttatgaaactacctgcactcccatctctaaaaccaaaccagatgatgacctttctagtaaggccaagacagcggccttagaaagcaacctgcctggatcccctaatacttctcgtggctggttaccaaaaagtcctaccaagggagaagactgggaaacactgaagagctgcagccctgcctcttcccctgatttgaccctggaggatgtaatagctgatcccactctctgtttcaattctggggagagcagccttgtggaaattgatggagaatcagaaaatctttctctaacaacctgtgaatataggagagagggcacaagtcaacttgcttctcctttaaaactcaagtacaatcagggtgtggtagaacactttcaaagaggtttgagaaacggctactgtaaagagaccctccgcccttctgtccctgaaatattcaacaatattcaagatgtcaaaactcaaagtatttcttatctagcctatcagggtgctggctttgtgcataatcatttctcagattcagatgcaaaaatgttccagacctgtgtgccccagcaatctagtgctcaagatatgcatgtccctgtacccaagcagttggcacatcttcctttgcctgctctgaaactgcctagtccttgcaaatccaaaagtctgggggacttaacatcagaggacattgcctgcaattttgagagcaagtaccagtgtattagtaagagttttgttacaactggcattagagacaagaagggcgtgactgtgaagacaaagtcgttagagcctatagatgccctgaccgagcagcttcggaagcttgtgtcctttgaccaggaagacaactgccaagtgctatattcaaagcaggatgccaatcagctcccccgggcactggtcaggaagttgtcatccagaagtcagagcagagtgcgcaatattgctagtcgtgccaaggagaaacaggaagccaacaagcagaaagttccaaaccccagcaatggggcaggagtggttcttagaaacaaaccctcagcacccacccctgcagtgaatcgccactccaccggctcctacatcgcaggctacctgaagaacacgaaagggggtggccttgaaggccggggcatcccagagggggcatgcacggctcttcactatggccacgttgaccagttttgttcagataattctgttttgcagactgagccaagcagtgatgataaaccagaaatttattttcttttgagactgtgaattatttaaaactgcattcttaaggttttcaaggtattctgtagaatgtcagagttttcagtaaataagttccttggctttggaatgattttcaaatgtatttttaaacttgtatttgggtctccctttgacttcatgtgttctccctgttaatgcgtttgtatatagatttggtgacatttcccatgtacctattatgatctttctcccttgagttgttgtaaactgtatcagtatgaaatatgtgcatgccctagatgtgaaactcctcagcagctcgggttataatgtgtgtgtgtttcaccaagatgtcctttactgtgtcctcagattgcagtcacaaatgtagtcatttttactctctaactgttgagttgattaagagactttgcaaacgacaaagggatgaattccttactttaatctgttatcatttttcctatgtttccctctttgttcagaagcccagatgcatttttataactcagttttaaaaactttaaaatagttaccttgccttttaggatgttcttatcccacccataatgagagttgaaaggggatggatagctgctccccatgcccttcccactttttggaataggccgtgagggtgtgaggaagaaggctgtcttttgtacataaggacaaaattgtttgttttacataaattttgttacatatttttgctaatggctttgtatgtaacaagaagcgagttgccaaactacctgttgtacttttgaattttctgattgaattacagactgcgaacaacggctttcagaatgagggacttccatcagactctaatgataatagtagcacaaattgaaaacttccccaaagctttcacagaatattttctcataataaaatccaagtgaacagataattagaagaaacccttttccttcagggaaccaagcaactctattttagtactgacatgcattattttcactgtgaattcacttttttattgcatgttcagatgtccctctttgttttttttttttgtaacattaactgcaatgatgttcttcctggaattcatgaaaatataattaaaacacatttttaaac

SEQ ID NO: 48850 - DNA, 5081 bp, Artificial Sequence
  derived and/or modified sequence
atggcagacctggaggtctacaagaatctgtcgcccgagaaggttgagagatgcatgtcagttatgcaatctggaactcaaatgattaaactcaaaaggggtaccaagggccttgtgcggctgttttaccttgatgagcatcgaacaagactcagatggaggccttctagaaagtctgagaaagccaagatcctgattgattcaatttacaaggtcacagaaggacgtcaatcggaaatctttcatcgacaggccgagggcaattttgatccaagctgttgttttacaatttatcacggcaatcacatggaatcattggatcttatcacttcaaacccagaggaagccaggacctggattactggcctaaagtatctcatggctggaatttcagatgaagattccctggctaaacgccagagaacccatgaccagtgggtgaaacagacctttgaagaagcagacaaaaatggcgatggcctcctaaatatcgaagagatccaccagctgatgcacaaactgaatgttaacctgccacggagaaaggttcgccagatgttccaagaggcagacacagacgagaaccagggtactctcacttttgaggagttctgtgtgttctacaaaatgatgtcactacgcagagacctgtacttacttttactttcctactcagataaaaaagatcatctcaccgtggaggaacttgcccaatttctaaaggtagaacagaagatgaacaatgttaccacagactattgtctggatatcatcaagaaattcgaggtgagcgaagagaacaaggtcaaaaacgtcctaggtatcgaagggttcactaacttcatgcgctcacccgcttgcgatatatttaatcctctgcatcacgaggtctaccaggacatggaccaaccattgtgcaactactacatcgcttcctcccataatacttacctcacgggcgaccaactgttgtctcagagtaaggtggatatgtatgcacgcgttttgcaagaaggctgccgttgtgtagaagtggactgttgggacggcccagatggggagcctgtcgtgcatcacggctacaccctgactagcaagattctgtttcgtgacgtagtggagactattaataaacacgcttttgtcaagaacgaattccctgttattctgagcatcgagaatcactgtagtattcaacagcagagaaaaattgcacaatacctgaaggggatcttcggcgacaagctggatctctcttcggtggacacaggcgaatgtaagcagttgccatccccacagagtctaaagggcaagattctggtcaaaggaaagaagctgccttaccacctcggcgatgatgccgaggagggtgaggtttcagatgaggactctgccgacgaaattgaggatgaatgcaagttcaagttgcactactcaaacggtaccaccgaacaccaggttgaaagctttattcggaaaaagctcgaaagtctgttgaaggagtcccaaatcagagataaagaagatccagactccttcactgttagggccctgctaaaagctacgcatgagggcttgaatgcccacctcaaacagagtcctgacgtgaaagagtctggcaaaaaaagccacgggaggagtttgatgactaattttggaaagcacaaaaagaccaccaagagcagaagtaagagttattccaccgatgacgaggaagacactcagcaatctacaggaaaggagggagggcagctgtacaggctcggccgacggaggaaaacaatgaaactgtgccgggagctgagcgatttggtagtatataccaatagcgtggcggctcaggacatcgtcgacgatggcacaaccggtaacgttctgtccttcagtgagacaagagctcaccaggtggtgcaacaaaagtccgagcagtttatgatatataaccagaaacaactcacccggatatatccttccgcctacaggatcgattccagcaacttcaaccccttaccttactggaacgcaggttgccagttagtcgctctgaactaccagtcggaaggaaggatgatgcagctaaatagggctaagttcaaagccaatggcaactgcggctacgtgctaaaacctcagcagatgtgtaaaggtaccttcaacccgttctctggagatcccctgcccgcaaatcctaaaaaacagttaattctgaaagtgatttctggccagcaactgccgaagcctccggacagcatgttcggagatagaggcgaaatcatcgatccattcgttgaggtcgagatcatcggtctgcccgtggattgctgtaaagaccagaccagggtagttgacgacaacggttttaaccccgtctgggaagaaacactaaccttcacagttcacatgccggaaatcgccctagtgagatttctggtctgggaccatgatcccatcggtagagactttgttggacaacgaacggttaccttttcctcactggttccaggatataggcatgtttatctagaagggctcacagaggctagtatttttgtgcatattaccatcaacgagatctatggcaaatggagccctcttattctcaatccaagctacaccatcctgcatttcctgggtgcaactaaaaatcgccagcttcaagggctcaagggcctgtttaataaaaatcctaggcactcgtcatctgaaaacaacagccactatgtacgaaaacgaagcattggggatagaatcctgcgaaggactgccagcgccccagcaaaggggcgaaaaaaatccaagatggggttccaggaaatggtagagatcaaggattctgtatcagaagcaacccgcgaccaagacggagtactgcggcgtaccaccaggagccttcaggcgagaccggtgtcaatgcccgtagacagaaatctgctgggagccctttcactcccagtgagcgaaaccgcgaaagatattgaagggaaagagaattcactagctgaggacaaggacggtcgccgtaaaggcaaagcaagtatcaaggacccgcacttcctgaactttaacaagaagttaagctccagcagctctgcccttttacacaaggatacttcccagggagacaccattgtgagcaccgcccacatgagcgtcacaggggagcagcttggcatgtcatcgcctcggggaggcagaactacgtctaacgccacaagtaattgccaggaaaacccatgtccctccaagtctctgagccctaagcagcatttggcacctgaccccgtggtgaacccaactcaagatctgcacggcgtgaagattaaggagaagggcaatcccgaagactttgtggaggggaagtctatcctgagcggctctgtcctgtctcacagcaatttggagattaagaacttagaggggaacagggggaagggtcgagccgctacatcatttagcctctcagatgtgagtatgctgtgctctgacatcccagaccttcattctactgccatcctgcaggagtccgtcatctcccacctgatagacaatgtgacactgaccaacgaaaacgagccaggaagttccatttctgcgttaattgggcagttcgacgagacgaacaatcaagcgctgaccgtggtgagccacttacataacacatcagtcatgtccggccattgcccactgcccagtttgggccttaaaatgccgatcaagcacggattctgcaaaggaaagtcgaagtcttcattcctctgttcatcaccagaactgatcgcgttgtcgtcttcagaaaccacaaagcatgctaccaacacagtttatgaaaccacttgtacccctattagtaagactaaaccggatgacgacctctcatctaaagctaagactgcggcacttgaatcaaatctgccaggatcaccaaacacctcccgaggctggttacctaagtctcctaccaaaggcgaggattgggagacactgaagagttgttcccccgcttcaagccctgatctgacactcgaggacgtgattgcagacccaacgctgtgtttcaattctggagaatctagtctggtggagatcgatggggagtcagaaaacctttcattgaccacttgtgaataccgcagggaggggacctcacagctggcttcgccactgaaattgaaatacaatcagggcgtggtcgagcatttccagagaggcttgcggaacggatattgtaaggagactcttcggccatctgtcccagagatttttaacaatatccaagacgttaagacacagtcaatctcatatctggcttatcagggagccggttttgtgcataaccacttcagcgacagcgatgcaaaaatgtttcaaacgtgcgtcccccaacagtccagcgcccaggatatgcatgttccagtcccgaagcaacttgcccaccttcccctgcccgctctcaagcttccctcgccttgtaagagcaagagcttgggcgatctcacctctgaggacatcgcctgtaattttgaatcaaaatatcaatgcattagcaagtcattcgtcacaacaggcattcgcgataagaaaggggtaaccgtgaaaaccaagtcacttgaacccatcgacgctttgactgagcaattgaggaaactggtcagtttcgatcaggaagacaactgtcaagtgctttattccaaacaggatgcgaaccaactccctagggcattggtacggaagctgtcgtcccggtcccagagtagagtgcggaatatcgcatcccgcgcaaaggaaaaacaggaagcgaataaacaaaaggtgcctaacccctccaacggcgcaggcgtggtccttcgcaataaacccagtgcacccactccagcggtcaaccgccactctactggctcgtacattgcaggttacctcaagaataccaagggcggaggcctcgagggaaggggtattcctgagggggcttgtaccgcactgcactacggccacgtagatcaattttgctccgataactctgtgctgcagaccgagcctagttccgacgataagcctgagatttacttcttgctgcgcctgta

SEQ ID NO: 48851 - DNA, 5082 bp, Artificial Sequence
  derived and/or modified sequence
atggccgacctggaggtgtacaagaacctgagccccgagaaggtggagagatgcatgagcgtgatgcagagcggcacccagatgatcaagctgaagagaggcaccaagggcctggtgagactgttctacctggacgagcacagaaccagactgagatggagacccagcagaaagagcgagaaggccaagatcctgatcgacagcatctacaaggtgaccgagggcagacagagcgagatcttccacagacaggccgagggcaacttcgaccccagctgctgcttcaccatctaccacggcaaccacatggagagcctggacctgatcaccagcaaccccgaggaggccagaacctggatcaccggcctgaagtacctgatggccggcatcagcgacgaggacagcctggccaagagacagagaacccacgaccagtgggtgaagcagaccttcgaggaggccgacaagaacggcgacggcctgctgaacatcgaggagatccaccagctgatgcacaagctgaacgtgaacctgcccagaagaaaggtgagacagatgttccaggaggccgacaccgacgagaaccagggcaccctgaccttcgaggagttctgcgtgttctacaagatgatgagcctgagaagagacctgtacctgctgctgctgagctacagcgacaagaaggaccacctgaccgtggaggagctggcccagttcctgaaggtggagcagaagatgaacaacgtgaccaccgactactgcctggacatcatcaagaagttcgaggtgagcgaggagaacaaggtgaagaacgtgctgggcatcgagggcttcaccaacttcatgagaagccccgcctgcgacatcttcaaccccctgcaccacgaggtgtaccaggacatggaccagcccctgtgcaactactacatcgccagcagccacaacacctacctgaccggcgaccagctgctgagccagagcaaggtggacatgtacgccagagtgctgcaggagggctgcagatgcgtggaggtggactgctgggacggccccgacggcgagcccgtggtgcaccacggctacaccctgaccagcaagatcctgttcagagacgtggtggagaccatcaacaagcacgccttcgtgaagaacgagttccccgtgatcctgagcatcgagaaccactgcagcatccagcagcagagaaagatcgcccagtacctgaagggcatcttcggcgacaagctggacctgagcagcgtggacaccggcgagtgcaagcagctgcccagcccccagagcctgaagggcaagatcctggtgaagggcaagaagctgccctaccacctgggcgacgacgccgaggagggcgaggtgagcgacgaggacagcgccgacgagatcgaggacgagtgcaagttcaagctgcactacagcaacggcaccaccgagcaccaggtggagagcttcatcagaaagaagctggagagcctgctgaaggagagccagatcagagacaaggaggaccccgacagcttcaccgtgagagccctgctgaaggccacccacgagggcctgaacgcccacctgaagcagagccccgacgtgaaggagagcggcaagaagagccacggcagaagcctgatgaccaacttcggcaagcacaagaagaccaccaagagcagaagcaagagctacagcaccgacgacgaggaggacacccagcagagcaccggcaaggagggcggccagctgtacagactgggcagaagaagaaagaccatgaagctgtgcagagagctgagcgacctggtggtgtacaccaacagcgtggccgcccaggacatcgtggacgacggcaccaccggcaacgtgctgagcttcagcgagaccagagcccaccaggtggtgcagcagaagagcgagcagttcatgatctacaaccagaagcagctgaccagaatctaccccagcgcctacagaatcgacagcagcaacttcaaccccctgccctactggaacgccggctgccagctggtggccctgaactaccagagcgagggcagaatgatgcagctgaacagagccaagttcaaggccaacggcaactgcggctacgtgctgaagccccagcagatgtgcaagggcaccttcaaccccttcagcggcgaccccctgcccgccaaccccaagaagcagctgatcctgaaggtgatcagcggccagcagctgcccaagccccccgacagcatgttcggcgacagaggcgagatcatcgaccccttcgtggaggtggagatcatcggcctgcccgtggactgctgcaaggaccagaccagagtggtggacgacaacggcttcaaccccgtgtgggaggagaccctgaccttcaccgtgcacatgcccgagatcgccctggtgagattcctggtgtgggaccacgaccccatcggcagagacttcgtgggccagagaaccgtgaccttcagcagcctggtgcccggctacagacacgtgtacctggagggcctgaccgaggccagcatcttcgtgcacatcaccatcaacgagatctacggcaagtggagccccctgatcctgaaccccagctacaccatcctgcacttcctgggcgccaccaagaacagacagctgcagggcctgaagggcctgttcaacaagaaccccagacacagcagcagcgagaacaacagccactacgtgagaaagagaagcatcggcgacagaatcctgagaagaaccgccagcgcccccgccaagggcagaaagaagagcaagatgggcttccaggagatggtggagatcaaggacagcgtgagcgaggccaccagagaccaggacggcgtgctgagaagaaccaccagaagcctgcaggccagacccgtgagcatgcccgtggacagaaacctgctgggcgccctgagcctgcccgtgagcgagaccgccaaggacatcgagggcaaggagaacagcctggccgaggacaaggacggcagaagaaagggcaaggccagcatcaaggacccccacttcctgaacttcaacaagaagctgagcagcagcagcagcgccctgctgcacaaggacaccagccagggcgacaccatcgtgagcaccgcccacatgagcgtgaccggcgagcagctgggcatgagcagccccagaggcggcagaaccaccagcaacgccaccagcaactgccaggagaacccctgccccagcaagagcctgagccccaagcagcacctggcccccgaccccgtggtgaaccccacccaggacctgcacggcgtgaagatcaaggagaagggcaaccccgaggacttcgtggagggcaagagcatcctgagcggcagcgtgctgagccacagcaacctggagatcaagaacctggagggcaacagaggcaagggcagagccgccaccagcttcagcctgagcgacgtgagcatgctgtgcagcgacatccccgacctgcacagcaccgccatcctgcaggagagcgtgatcagccacctgatcgacaacgtgaccctgaccaacgagaacgagcccggcagcagcatcagcgccctgatcggccagttcgacgagaccaacaaccaggccctgaccgtggtgagccacctgcacaacaccagcgtgatgagcggccactgccccctgcccagcctgggcctgaagatgcccatcaagcacggcttctgcaagggcaagagcaagagcagcttcctgtgcagcagccccgagctgatcgccctgagcagcagcgagaccaccaagcacgccaccaacaccgtgtacgagaccacctgcacccccatcagcaagaccaagcccgacgacgacctgagcagcaaggccaagaccgccgccctggagagcaacctgcccggcagccccaacaccagcagaggctggctgcccaagagccccaccaagggcgaggactgggagaccctgaagagctgcagccccgccagcagccccgacctgaccctggaggacgtgatcgccgaccccaccctgtgcttcaacagcggcgagagcagcctggtggagatcgacggcgagagcgagaacctgagcctgaccacctgcgagtacagaagagagggcaccagccagctggccagccccctgaagctgaagtacaaccagggcgtggtggagcacttccagagaggcctgagaaacggctactgcaaggagaccctgagacccagcgtgcccgagatcttcaacaacatccaggacgtgaagacccagagcatcagctacctggcctaccagggcgccggcttcgtgcacaaccacttcagcgacagcgacgccaagatgttccagacctgcgtgccccagcagagcagcgcccaggacatgcacgtgcccgtgcccaagcagctggcccacctgcccctgcccgccctgaagctgcccagcccctgcaagagcaagagcctgggcgacctgaccagcgaggacatcgcctgcaacttcgagagcaagtaccagtgcatcagcaagagcttcgtgaccaccggcatcagagacaagaagggcgtgaccgtgaagaccaagagcctggagcccatcgacgccctgaccgagcagctgagaaagctggtgagcttcgaccaggaggacaactgccaggtgctgtacagcaagcaggacgccaaccagctgcccagagccctggtgagaaagctgagcagcagaagccagagcagagtgagaaacatcgccagcagagccaaggagaagcaggaggccaacaagcagaaggtgcccaaccccagcaacggcgccggcgtggtgctgagaaacaagcccagcgcccccacccccgccgtgaacagacacagcaccggcagctacatcgccggctacctgaagaacaccaagggcggcggcctggagggcagaggcatccccgagggcgcctgcaccgccctgcactacggccacgtggaccagttctgcagcgacaacagcgtgctgcagaccgagcccagcagcgacgacaagcccgagatctacttcctgctgagactgtag

SEQ ID NO: 48852 - DNA, 3009 bp, Artificial Sequence
  derived and/or modified sequence
atggccgatctggaggtctacaagaatctgtcccccgagaaagtcgaacggtgcatgtccgtgatgcaaagcggcacacaaatgattaaattgaagcgcggcacaaaaggattagtcagactcttctacctcgatgaacaccgcaccagactacgatggaggcccagcaggaagtctgagaaggccaaaatccttatcgatagcatatacaaggtgaccgagggtaggcagtcagagatattccataggcaggctgagggtaatttcgacccgtcatgctgttttacaatctaccacggaaatcatatggagagtctcgatcttattacatctaaccccgaggaagccaggacgtggataaccggccttaagtatctgatggcaggcatcagcgacgaagattccctcgctaagcgtcagcggacgcacgaccagtgggtaaagcaaacatttgaggaggctgacaaaaatggagatggcttgcttaacattgaggagatccatcaattaatgcacaagctgaacgtgaatctgcctcgccgcaaggtccggcagatgttccaggaagctgacaccgatgaaaatcaagggacactaacctttgaagaattctgtgtcttttacaagatgatgtctctcaggcgcgacctgtaccttttgctcctctcttacagcgataagaaagaccatctgaccgtagaagagcttgcccaatttctaaaggtcgagcagaaaatgaataatgttactaccgactattgccttgatattatcaagaagtttgaggttagcgaagagaacaaggtgaaaaatgttctcggcattgaggggtttacaaacttcatgcggagccctgcatgtgatatcttcaacccgctccaccacgaagtttatcaggacatggatcagccgctctgcaactattacattgccagctctcacaacacttatctgacaggggaccagctgctgagccagtcaaaggtcgacatgtacgctcgcgtcctgcaagagggctgtaggtgcgtcgaggttgactgctgggacggcccggacggcgaaccagtcgtccatcacgggtataccttaacctcaaaaatcttgttcagagatgtagtggagactatcaataagcacgcttttgtaaaaaacgagttccccgtgattctgagcatcgagaaccactgctccattcaacagcaaagaaaaatcgcgcagtacctgaagggtatctttggggacaaattagacctgtccagtgtggatacgggggaatgcaagcagctgcccagcccacagtcactaaaaggaaaaatccttgtgaaaggaaagaagctcccctaccacctaggggacgacgccgaagagggcgaggtgtctgatgaggattccgccgacgagatagaggacgagtgtaagttcaagctccactactctaacggtacaacggaacatcaggtcgagagttttatccgcaagaaactggaaagcctgttaaaagagagccaaatccgagataaagaggacccagactcatttacagtaagagccctgttgaaggccacacacgaaggcctgaatgcccatctgaagcaatcccctgatgtcaaggaatcaggcaagaagagccatggtcgatccctgatgacaaattttggcaagcacaagaaaactacgaagagccgctccaagagttactccactgacgacgaggaggatactcaacaaagtacaggcaaggaagggggccagctgtacagattgggcaggcgacgtaaaaccatgaaactatgccgagaactctcagatctggtggtgtataccaatagtgtagccgctcaggacatcgtggacgatggtacgaccggaaatgtcctgtctttcagtgagacacgggcgcaccaggtggtgcagcagaagtcagagcaatttatgatttacaaccagaaacaactgaccagaatataccctagtgcttatagaatcgactccagtaatttcaatccccttccctattggaatgctggatgccaactggtcgccctaaattaccagtctgagggaaggatgatgcagctgaatcgcgccaagtttaaagctaacggaaactgtggatacgtattaaagcctcagcagatgtgcaagggcactttcaatccgttctcaggcgatccactgcccgccaaccccaagaaacaattgatcttgaaagtcataagcggccaacagctgccaaaaccaccagactctatgttcggcgaccgcggggagatcatcgaccctttcgtggaagtagaaattataggtctcccggtggattgctgtaaggaccagactcgtgtcgtggacgacaatggcttcaatcccgtctgggaggaaactctaactttcaccgtgcacatgcctgagattgctctcgtcaggttcctagtgtgggaccatgaccctattggccgggattttgtgggtcaacggacagtgacgttctcttccttggtcccgggctaccggcacgtttacttggaagggctaaccgaagccagtatttttgtccatataaccatcaacgagatttacggcaaatggagtccacttatcctgaatccatcctacactatcttgcacttcctgggcgcgacgaaaaatcggcagttgcagggtctaaaaggactgttcaacaaaaacccgagacactcttcttccgagaataattctcattatgtgcggaagcgttcaatcggcgatcggattttgcgtcggacagccagtgcccccgccaagggccggaaaaaatcgaagatgggatttcaagagatggtcgaaatcaaggacagcgtctccgaggccacgcgagatcaggatggcgtgctgcgccgtacgactagaagtctgcaggcccgccccgtgtcgatgccagtcgatagaaacttgttaggagctctgtcactgccggtgagtgagaccgccaaggacatagaaggaaaagagaattctttggtccaaatctag

SEQ ID NO: 48853 - DNA, 3009 bp, Artificial Sequence
  derived and/or modified sequence
atggctgacctggaggtgtacaagaacctgagccctgagaaggtggagcgctgcatgtctgtgatgcagagcggcacccagatgatcaagctgaagaggggcaccaagggcctggtgcggctcttctacctggatgagcacaggacccggctgcgctggaggcccagcaggaagtctgagaaggccaagatcctgattgacagcatctacaaggtgacagagggccggcagagcgagatcttccaccggcaggccgagggcaactttgaccccagctgctgcttcaccatctaccacggcaaccacatggagagcctggacctgatcaccagcaaccctgaggaggcccggacctggatcaccggcctgaagtacctgatggccggcatcagtgatgaggacagcctggccaagaggcagaggacccatgaccagtgggtgaagcagacctttgaggaggccgacaagaatggagatggcctgctgaacatcgaggagatccaccagctgatgcacaagctgaatgtgaacctgcccaggaggaaggtgcggcagatgttccaggaggccgacacagatgagaaccagggcaccctgacctttgaggagttctgtgtgttctacaagatgatgagcctgcggcgggacctgtacctgctgctgctgagctacagcgacaagaaggaccacctgactgtggaggagctggcccagttcctgaaggtggagcagaagatgaacaacgtgaccacagactactgcctggacatcatcaagaagtttgaggtgtctgaggagaacaaggtgaagaatgtgctgggcatcgagggcttcaccaacttcatgaggagccctgcctgtgacatcttcaaccccctgcaccacgaggtgtaccaggacatggaccagcccctgtgcaactactacatcgccagcagccacaacacctacctgactggagaccagctgctgagccagagcaaggtggacatgtatgcccgggtgctgcaggagggctgccgctgtgtggaggtggactgctgggatggcccagatggagagcctgtggtgcaccacggctacaccctgaccagcaagatcctcttcagagatgtggtggagaccatcaacaagcacgcctttgtgaagaatgagttccctgtgatcctgagcattgagaaccactgcagcatccagcagcagaggaagatcgcccagtacctgaagggcatctttggagacaagctggacctgagctctgtggacacaggagagtgcaagcagctgcccagcccccagagcctgaagggcaagatcctggtgaagggcaagaagctgccctaccacctgggagatgatgctgaggagggggaggtgtctgatgaggacagcgcagatgaaattgaagatgagtgcaagttcaagctgcactacagcaatggcaccacagagcaccaggtggagagcttcatcaggaagaagctggagagcctgctgaaggagagccagatccgggacaaggaggaccctgacagcttcaccgtgcgggccctgctgaaggccacccatgagggcctgaatgcccacctgaagcagagcccagatgtgaaggagagcggcaagaagagccacggccgcagcctgatgaccaactttgggaagcacaagaagaccaccaagagccgcagcaagagctacagcacagatgatgaggaggacacccagcagagcacaggcaaggagggcggccagctgtaccgcctgggcagaagaaggaagaccatgaagctgtgccgggagctgagtgacctggtggtgtacaccaacagcgtggccgcccaggacatcgtggatgatggcaccactggaaatgtgctgtccttcagcgagacccgggcccaccaggtggtgcagcagaagtctgagcagttcatgatctacaaccagaagcagctgacccgcatctaccccagcgcctacagaattgacagcagcaacttcaaccccctgccctactggaatgccggctgccagctggtggccctgaactaccagagcgagggccgcatgatgcagctgaacagagccaagttcaaggccaatggaaactgtggctacgtgctgaagccccagcagatgtgcaagggcaccttcaaccccttcagcggggaccccctgcctgccaaccccaagaagcagctgatcctgaaggtgatcagcggccagcagctgcccaagcccccagacagcatgtttggagacagaggagagatcatcgacccctttgtggaggtggagatcatcggcctgcctgtggactgctgcaaggaccagaccagggtggtggatgacaatggcttcaaccctgtgtgggaggagaccctgaccttcaccgtgcacatgcctgagatcgccctggtgcgcttcctggtgtgggaccatgaccccatcggccgggactttgtgggccagaggacagtgaccttcagcagcctggtgcccggctaccgccacgtgtacctggagggcctgacagaggccagcatctttgtgcacatcaccatcaatgagatctacggcaagtggagccccctcatcctgaaccccagctacaccatcctgcacttcctgggcgccaccaagaaccggcagctgcagggcctgaagggcctcttcaacaagaaccccaggcacagcagcagcgagaacaacagccactacgtgaggaagaggagcattggagaccgcatcctgcggaggacagccagcgccccagccaagggcaggaagaagagcaagatgggcttccaggagatggtggagatcaaggacagcgtgtctgaggccacccgggaccaggatggagtgctgcggaggaccaccaggagcctgcaggcccggcctgtgtccatgcctgtggacaggaacctgctgggcgccctgagcctgcctgtgtctgaaacagccaaggacatcgagggcaaggagaacagcctggtgcagatctag

SEQ ID NO: 48854 - DNA, 3009 bp, Artificial Sequence
  derived and/or modified sequence
atggccgacctggaggtgtacaagaacctgagccccgagaaggtggagcggtgcatgagtgttatgcaatcaggcacccagatgattaagcttaagagggggacaaaaggactagttcgacttttttacctggacgagcatcgcacccggttgcggtggagaccatcccgcaaaagcgaaaaggcaaaaatcctgattgattccatttataaagtaactgagggcaggcagtccgagatcttccaccggcaagctgagggaaactttgatccaagttgctgcttcactatataccacgggaatcacatggagagtctagatcttattacttccaatccggaggaggcccggacgtggatcaccgggctcaagtacctgatggctggcatttcagacgaagattccctcgccaagcggcagaggacgcacgatcagtgggttaaacagacgtttgaggaagccgataagaatggcgacgggctactgaacatcgaggaaatccatcagctgatgcacaaactgaacgtcaacctccctaggcgcaaagtgcgacagatgtttcaggaggcggacaccgatgaaaatcaaggtacccttacctttgaggagttctgtgtgttctacaaaatgatgtccctccgaagagacttgtatttgctacttctgagctactccgataaaaaggatcacctgactgtggaggaactggcccagtttttgaaagtcgagcaaaaaatgaataacgtgaccacagactattgtctggacattattaagaaattcgaggtctcagaagaaaacaaggtaaagaacgttctgggcatcgaaggttttaccaacttcatgagatctcccgcttgtgatatttttaatccactgcaccacgaggtgtatcaggatatggaccagccactgtgtaattattacatcgccagttctcacaatacgtatcttaccggggatcagttgctgtctcagtcgaaggtggatatgtacgcccgcgtgctccaggaagggtgcaggtgtgtggaagtggactgttgggatgggcccgatggcgagccagtggtccatcacggctataccctgactagtaagatcctgtttagggatgttgtggagacaatcaacaagcacgcctttgtgaaaaatgaattccccgtcattctgtctatagagaaccattgttccatccagcagcagagaaagatcgcccaatatcttaaagggatattcggcgacaaactggatctctcctctgtcgacacaggggagtgcaagcagctgccaagccctcagtcactcaaaggcaagatactcgtgaaagggaaaaaattgccctatcatctgggggatgacgccgaagagggcgaggtgtccgatgaggactcagccgacgaaatcgaagatgaatgtaaattcaagctgcattattctaacggtacaacagaacaccaggtggagagcttcattcgaaagaagcttgaaagtttactaaaggaatcccagatcagggacaaggaggacccagatagttttactgtgcgagcgctccttaaagcgacacatgagggccttaacgctcaccttaaacagagcccagacgtgaaagaatcgggaaagaagagtcacggccgatcactgatgactaattttggaaaacataagaaaactacgaaatctcgatctaagagctactctactgatgatgaggaggacacgcaacagagcaccggcaaggagggaggccaactttatcggttaggtcgacggcggaaaaccatgaagttatgcagggagttaagtgacctagtggtgtacacaaacagtgtagccgcccaggacattgtcgatgatggcacaacaggaaacgtgttgagtttcagtgaaaccagagcccatcaagtggttcaacaaaagtccgagcagtttatgatttataaccagaaacagctcacaaggatctacccttcagcctatagaattgactctagcaatttcaatcctctgccctattggaacgcaggatgtcaactagtggccctcaactaccagtcagaggggaggatgatgcagcttaatcgggccaagttcaaggcaaacggcaattgcggctacgtgctgaagccacagcaaatgtgtaaggggacattcaatccctttagtggcgatcctctcccagccaatcctaagaagcagctgatcttaaaagtgatctccggccagcaattgccaaagccccctgactctatgttcggcgacagaggagagatcattgatccctttgtggaggtcgaaataatcggtctacctgtggattgctgcaaggatcagaccagagtcgttgatgataatggcttcaaccccgtgtgggaggaaaccctgacctttaccgtccacatgccagaaattgccctggtgagattcctggtgtgggatcacgatcccatcggccgcgattttgtgggccagcgcacagtgacattcagttctttagtccccggatatcgccacgtgtacctcgaggggcttaccgaggcctccatcttcgtgcacattacgattaacgaaatttacgggaagtggtcacccctaatcctgaatccttcctataccatattgcatttcttgggagctacaaagaaccggcagctgcagggcctgaagggactgtttaacaagaaccctagacatagttcttcagaaaacaacagccactacgtacggaaacgatcaattggggacagaattttgcgccgcacagctagtgcaccagcgaagggacggaagaaaagtaagatgggtttccaggaaatggttgaaatcaaagatagtgtgtccgaagctacccgggatcaggacggggtcctgcggaggactaccaggtccttgcaggcgcgacctgtgtcaatgcccgttgaccgaaacctgttaggcgcgctgtcattgccagtctctgagaccgccaaagatatagaggggaaagaaaatagtctggtccagatatag

SEQ ID NO: 48855 - DNA, 6196 bp, Artificial Sequence
  derived and/or modified sequence
atggcagaccttgaagtgtataaaaacttaagtccagaaaaagttgaaagatgcatgagtgtgatgcagtccgggacacagatgatcaagctgaaacgtggaaccaaagggcttgtccgcctcttttacctggatgagcaccggacacgcctccgatggcgaccctctaggaagagtgagaaggcaaaaatacttattgattccatttacaaagtgactgagggccggcagtctgaaatattccacagacaagctgaggggaacttcgaccccagctgctgcttcaccatctaccatggcaaccacatggagtccctggacctcatcacctccaaccccgaggaggcccgcacctggatcacaggcctcaagtacctgatggctggcatcagtgatgaagactcccttgccaaaaggcagaggacccatgaccaatgggtgaagcagacctttgaggaagctgataagaatggtgacggcttgctgaatattgaagagatacatcagctgatgcataaactgaatgttaatctgccccgaagaaaagtcagacaaatgtttcaggaagccgacacagatgagaatcagggaactttgacatttgaagagttctgtgttttttacaaaatgatgtctttgagacgagacctttatttgttacttttgagctacagtgacaagaaagatcacctaactgtggaagaactggctcagtttttgaaggtggagcaaaagatgaataatgtgacaacggactattgtcttgacatcataaagaagtttgaagtttcagaagaaaataaggtgaaaaatgttcttggcatagaaggcttcacgaacttcatgcgtagtcctgcctgtgacatatttaacccattgcaccatgaagtgtaccaagacatggatcagcccctctgcaactactacattgcttcctctcacaatacatacctgactggagaccagctcctttctcagtccaaagtggatatgtatgcacgggtgctgcaagagggctgtcgctgtgtggaagttgactgttgggatggcccagatggagagccagtagtacatcatggttacactctcacttcaaaaattctcttcagagatgttgtggagaccatcaacaagcatgcctttgtgaagaatgagtttcctgttatattgtctatcgagaatcactgcagtatccagcagcaaaggaagattgctcagtacctgaaaggaatattcggagacaaactggacctgtcatctgttgatacaggggagtgcaagcagcttccaagccctcaaagtttgaaaggcaaaattctagtgaagggtaagaagttgccttatcaccttggggatgatgcagaggaaggggaagtttctgatgaggacagtgcagatgaaattgaagacgagtgcaaattcaagctccattatagtaatgggaccactgagcatcaggtggaatctttcataaggaaaaaactggagtcactgttaaaagaatctcaaattcgagataaagaagatcctgatagtttcacagtgcgggcactactgaaggccacgcatgaaggcttaaatgcacacctgaagcagagtccagatgtaaaggaaagtggaaagaaatcacatggacgatccctcatgaccaactttggaaaacataagaaaactacaaaatcacggtctaaatcttacagtactgatgatgaggaagacacacagcagagtactggcaaggagggtggccagctgtacagattgggtcgccgaaggaaaaccatgaagctctgccgagaactctctgatttggttgtgtacacaaactccgtggccgctcaggacattgtggatgacggaaccacaggaaatgtgttatcattcagtgaaacaagagcacatcaggttgttcagcaaaaatcagagcagttcatgatttataatcaaaagcaactcacgaggatttacccctctgcctaccgcattgattccagtaacttcaaccctctcccctactggaacgcaggctgccagctagtggcactgaattatcaatctgaaggacgaatgatgcagttaaaccgagccaaattcaaggcaaatggcaattgtggctatgtcctcaaaccccagcaaatgtgcaaaggtactttcaaccctttctctggtgaccctcttcctgccaaccccaaaaagcagctcatcctgaaagttatcagtggacagcaactccccaaacctccagactccatgtttggagatcgaggcgagatcattgacccttttgttgaagttgaaattattggattgccagtagattgttgtaaagatcaaacccgtgtggtagatgacaatggatttaaccctgtgtgggaagaaacactgacatttacagtacacatgccagaaatagctttggttcggttccttgtgtgggatcacgatcccattggacgagactttgttggacaaagaactgtgaccttcagcagcttagtgcctggctaccggcatgtctatttggaaggactgacagaagcatccatatttgtacacataaccatcaatgaaatctatggaaagtggagccctttaatactcaaccccagttatactatattgcactttctaggagctacaaagaacagacaactccagggtctgaagggactgttcaataagaatcctaggcacagttcttcagaaaacaattcccattatgtacggaagcgatccattggagatagaattctgcgacgcacagctagcgccccagccaaaggcaggaaaaagagcaaaatgggcttccaagaaatggtggagataaaggattctgtgtccgaggccacaagagatcaagatggcgtgctgaggaggaccacacgcagtttgcaagcacgccctgtctctatgcctgttgacagaaaccttctgggagctttgtcgctgcctgtatctgaaacagcaaaagacattgaaggaaaagaaaactctctagtacaaatctgaataggaaacaacttaagcagaagataaagatggcagaagaaaagggaaagcaagtataaaagatccacattttctaaatttcaacaaaaagttatcatcctcctccagtgctctgctccacaaagataccagccaaggggacaccattgtatctactgcccacatgtcagtcacaggagaacagctgggcatgtcaagtcctaggggtgggagaaccacatcaaatgccacaagcaattgccaggaaaacccctgtcccagcaagtctctctccccaaagcagcatttggctcccgatcctgtagttaaccccacacaagatctgcatggtgtgaaaatcaaggaaaagggtaatcctgaggactttgtggaagggaaaagcatcttgtcaggaagcgtcctttctcatagcaacctagaaattaagaacctggaaggtaataggggtaagggccgagctgcaacatccttttctttgtcagacgtctccatgctctgttctgacatacctgacctacattcaactgcaattctgcaggagagtgtaatttcccatcttattgacaatgtcactttaacaaatgagaatgagccgggcagttccatctcagccctgattggccagtttgatgagaccaacaatcaggctctcacagttgtttctcatcttcataataccagtgtgatgtcaggccattgtcccttgcctagcctgggcctaaaaatgcccatcaagcatggtttttgcaagggaaaatccaagtcttccttcctgtgctcatctccggagctgatagcactctcgagttctgagaccaccaaacatgcaacgaacacagtttatgaaactacctgcactcccatctctaaaaccaaaccagatgatgacctttctagtaaggccaagacagcggccttagaaagcaacctgcctggatcccctaatacttctcgtggctggttaccaaaaagtcctaccaagggagaagactgggaaacactgaagagctgcagccctgcctcttcccctgatttgaccctggaggatgtaatagctgatcccactctctgtttcaattctggggagagcagccttgtggaaattgatggagaatcagaaaatctttctctaacaacctgtgaatataggagagagggcacaagtcaacttgcttctcctttaaaactcaagtacaatcagggtgtggtagaacactttcaaagaggtttgagaaacggctactgtaaagagaccctccgcccttctgtccctgaaatattcaacaatattcaagatgtcaaaactcaaagtatttcttatctagcctatcagggtgctggctttgtgcataatcatttctcagattcagatgcaaaaatgttccagacctgtgtgccccagcaatctagtgctcaagatatgcatgtccctgtacccaagcagttggcacatcttcctttgcctgctctgaaactgcctagtccttgcaaatccaaaagtctgggggacttaacatcagaggacattgcctgcaattttgagagcaagtaccagtgtattagtaagagttttgttacaactggcattagagacaagaagggcgtgactgtgaagacaaagtcgttagagcctatagatgccctgaccgagcagcttcggaagcttgtgtcctttgaccaggaagacaactgccaagtgctatattcaaagcaggatgccaatcagctcccccgggcactggtcaggaagttgtcatccagaagtcagagcagagtgcgcaatattgctagtcgtgccaaggagaaacaggaagccaacaagcagaaagttccaaaccccagcaatggggcaggagtggttcttagaaacaaaccctcagcacccacccctgcagtgaatcgccactccaccggctcctacatcgcaggctacctgaagaacacgaaagggggtggccttgaaggccggggcatcccagagggggcatgcacggctcttcactatggccacgttgaccagttttgttcagataattctgttttgcagactgagccaagcagtgatgataaaccagaaatttattttcttttgagactgtgaattatttaaaactgcattcttaaggttttcaaggtattctgtagaatgtcagagttttcagtaaataagttccttggctttggaatgattttcaaatgtatttttaaacttgtatttgggtctccctttgacttcatgtgttctccctgttaatgcgtttgtatatagatttggtgacatttcccatgtacctattatgatctttctcccttgagttgttgtaaactgtatcagtatgaaatatgtgcatgccctagatgtgaaactcctcagcagctcgggttataatgtgtgtgtgtttcaccaagatgtcctttactgtgtcctcagattgcagtcacaaatgtagtcatttttactctctaactgttgagttgattaagagactttgcaaacgacaaagggatgaattccttactttaatctgttatcatttttcctatgtttccctctttgttcagaagcccagatgcatttttataactcagttttaaaaactttaaaatagttaccttgccttttaggatgttcttatcccacccataatgagagttgaaaggggatggatagctgctccccatgcccttcccactttttggaataggccgtgagggtgtgaggaagaaggctgtcttttgtacataaggacaaaattgtttgttttacataaattttgttacatatttttgctaatggctttgtatgtaacaagaagcgagttgccaaactacctgttgtacttttgaattttctgattgaattacagactgcgaacaacggctttcagaatgagggacttccatcagactctaatgataatagtagcacaaattgaaaacttccccaaagctttcacagaatattttctcataataaaatccaagtgaacagataattagaagaaacccttttccttcagggaaccaagcaactctattttagtactgacatgcattattttcactgtgaattcacttttttattgcatgttcagatgtccctctttgttttttttttttgtaacattaactgcaatgatgttcttcctggaattcatgaaaatataattaaaacacatttttaaac

SEQ ID NO: 48856 - DNA, 3009 bp, Artificial Sequence
  derived and/or modified sequence
atggccgacctggaagtatataagaaccttagcccggaaaaagtggaacggtgcatgagcgtgatgcaaagcggaacccaaatgatcaaacttaagcggggtactaagggcctggtcagactgttctatctggacgaacatagaactaggctgaggtggaggccatcccgcaaaagtgaaaaggcaaaaatcctgattgatagcatatataaggttactgagggtcgccaaagcgagatttttcacagacaagctgaaggaaactttgacccgtcgtgctgttttactatttaccacggtaaccatatggagtctctggatctgatcacatccaatcctgaggaagcgaggacatggataaccggcctcaagtatcttatggcaggtatctctgatgaagactcactggccaaaagacagaggacacacgaccaatgggtgaaacaaacgtttgaagaggcagacaagaatggggatggactcctgaacatcgaagagattcaccagctgatgcataagcttaacgtgaacctgccgcgaagaaaggtgcggcaaatgttccaggaagccgacaccgatgagaaccaaggcacacttacttttgaggaattttgtgtgttctataaaatgatgagtctgcggagggatctctacttgctcttgctctcgtatagcgacaaaaaggatcatctcacagtggaagagctggcccagttccttaaggttgagcaaaagatgaacaatgtgaccacagactactgtctggatattattaagaagtttgaagtaagcgaagagaacaaagtgaaaaacgtgctgggaatagaggggtttaccaactttatgcgttcaccagcctgtgacatatttaacccgctgcatcatgaggtgtatcaggacatggaccagcctttgtgcaattactatatcgcatcatctcacaacacttatctgacaggcgaccagctgctgtctcaaagtaaagttgacatgtatgccagagtcttacaggaagggtgtcggtgcgtagaggtcgactgctgggatggacccgatggtgagcctgtggtgcatcatggctacactctgacatcgaagatactttttagggatgtggtggaaaccataaacaaacatgcttttgtgaagaacgaattcccagtcatattgagcatagaaaatcactgctcaattcagcaacagagaaagatcgcccagtacctgaagggaatcttcggcgacaagctggatctgagctccgtggataccggggaatgtaagcagctcccctctccccagtccctcaaagggaagattttggtgaaaggtaaaaaactgccgtatcatctgggagatgatgccgaagagggtgaagtctccgatgaggactcagcggatgagattgaggatgagtgcaagtttaagctgcactatagcaatgggacaaccgaacaccaggtggaatccttcatccggaagaagctcgaaagcttactgaaagagtctcagatacgcgataaagaagaccctgattccttcaccgtacgggctctgctcaaggcgacacatgagggactcaatgcacatctgaaacagagcccggatgtcaaggaaagtggtaaaaagtcccacggaaggagtcttatgacaaattttgggaagcacaagaaaactacaaagtcccggtccaaaagctatagcaccgatgatgaggaggatacacagcagtcaacagggaaggaaggcggacaactgtacaggcttggaaggagacggaaaacgatgaagctgtgcagagaactctcagacctcgtggtgtataccaattcggtggcggcacaagacatcgtggacgatggaactaccggtaacgtgctgtctttcagcgagaccagggctcaccaggtagtacagcagaaaagtgaacagttcatgatctataaccagaaacagcttacccggatttacccgtcagcatacaggatcgatagtagcaacttcaaccctctgccttactggaatgcaggctgccagctcgtcgcactcaattaccaatccgaaggccgaatgatgcagctgaacagagcgaagtttaaagccaacggtaattgcggttacgtccttaaacctcagcagatgtgtaagggaacattcaaccccttctctggggaccctttacccgcaaatcctaagaagcaactgatcctaaaagtgatttcagggcagcaattgcctaaacccccagatagcatgttcggcgacaggggcgaaatcattgacccgttcgtcgaggtcgagatcataggccttccggtggactgttgcaaggaccagacaagggtagtcgatgataatggctttaaccccgtgtgggaagagactctcacattcactgtccacatgcctgagattgctctggtccgcttcttagtctgggaccatgatcctatcgggagggatttcgtcggccagagaactgttaccttcagcagcctcgttccaggctaccgtcacgtgtatcttgaaggactgaccgaagcctctatctttgtgcacataaccatcaacgagatctacggcaaatggtctcccctcattcttaacccgtcctatacaattttgcatttcttgggcgcaaccaaaaatcgacagctgcagggcctgaagggccttttcaataagaatcctcggcattcgtcgtctgagaataatagccactacgtaagaaaaaggagcataggggaccgaattttacggagaaccgccagcgcccctgccaagggtcgtaaaaaaagcaaaatgggctttcaggagatggtagaaatcaaagattccgtttctgaggctacacgggaccaggatggcgtcttacgcagaactacacgatctcttcaggcccgacctgtgtcaatgccggttgatcgtaacctccttggcgcactgtccctccccgtcagtgaaaccgctaaggatattgaaggcaaagaaaacagcttggttcagatatag

SEQ ID NO: 48857 - DNA, 3009 bp, Artificial Sequence
  derived and/or modified sequence
atggccgacctggaggtgtacaagaacctgagccccgagaaggtggagagatgcatgagcgtgatgcagagcggcacccagatgatcaagctgaagagaggcaccaagggcctggtgagactgttctacctggacgagcacagaaccagactgagatggagacccagcagaaagagcgagaaggccaagatcctgatcgacagcatctacaaggtgaccgagggcagacagagcgagatcttccacagacaggccgagggcaacttcgaccccagctgctgcttcaccatctaccacggcaaccacatggagagcctggacctgatcaccagcaaccccgaggaggccagaacctggatcaccggcctgaagtacctgatggccggcatcagcgacgaggacagcctggccaagagacagagaacccacgaccagtgggtgaagcagaccttcgaggaggccgacaagaacggcgacggcctgctgaacatcgaggagatccaccagctgatgcacaagctgaacgtgaacctgcccagaagaaaggtgagacagatgttccaggaggccgacaccgacgagaaccagggcaccctgaccttcgaggagttctgcgtgttctacaagatgatgagcctgagaagagacctgtacctgctgctgctgagctacagcgacaagaaggaccacctgaccgtggaggagctggcccagttcctgaaggtggagcagaagatgaacaacgtgaccaccgactactgcctggacatcatcaagaagttcgaggtgagcgaggagaacaaggtgaagaacgtgctgggcatcgagggcttcaccaacttcatgagaagccccgcctgcgacatcttcaaccccctgcaccacgaggtgtaccaggacatggaccagcccctgtgcaactactacatcgccagcagccacaacacctacctgaccggcgaccagctgctgagccagagcaaggtggacatgtacgccagagtgctgcaggagggctgcagatgcgtggaggtggactgctgggacggccccgacggcgagcccgtggtgcaccacggctacaccctgaccagcaagatcctgttcagagacgtggtggagaccatcaacaagcacgccttcgtgaagaacgagttccccgtgatcctgagcatcgagaaccactgcagcatccagcagcagagaaagatcgcccagtacctgaagggcatcttcggcgacaagctggacctgagcagcgtggacaccggcgagtgcaagcagctgcccagcccccagagcctgaagggcaagatcctggtgaagggcaagaagctgccctaccacctgggcgacgacgccgaggagggcgaggtgagcgacgaggacagcgccgacgagatcgaggacgagtgcaagttcaagctgcactacagcaacggcaccaccgagcaccaggtggagagcttcatcagaaagaagctggagagcctgctgaaggagagccagatcagagacaaggaggaccccgacagcttcaccgtgagagccctgctgaaggccacccacgagggcctgaacgcccacctgaagcagagccccgacgtgaaggagagcggcaagaagagccacggcagaagcctgatgaccaacttcggcaagcacaagaagaccaccaagagcagaagcaagagctacagcaccgacgacgaggaggacacccagcagagcaccggcaaggagggcggccagctgtacagactgggcagaagaagaaagaccatgaagctgtgcagagagctgagcgacctggtggtgtacaccaacagcgtggccgcccaggacatcgtggacgacggcaccaccggcaacgtgctgagcttcagcgagaccagagcccaccaggtggtgcagcagaagagcgagcagttcatgatctacaaccagaagcagctgaccagaatctaccccagcgcctacagaatcgacagcagcaacttcaaccccctgccctactggaacgccggctgccagctggtggccctgaactaccagagcgagggcagaatgatgcagctgaacagagccaagttcaaggccaacggcaactgcggctacgtgctgaagccccagcagatgtgcaagggcaccttcaaccccttcagcggcgaccccctgcccgccaaccccaagaagcagctgatcctgaaggtgatcagcggccagcagctgcccaagccccccgacagcatgttcggcgacagaggcgagatcatcgaccccttcgtggaggtggagatcatcggcctgcccgtggactgctgcaaggaccagaccagagtggtggacgacaacggcttcaaccccgtgtgggaggagaccctgaccttcaccgtgcacatgcccgagatcgccctggtgagattcctggtgtgggaccacgaccccatcggcagagacttcgtgggccagagaaccgtgaccttcagcagcctggtgcccggctacagacacgtgtacctggagggcctgaccgaggccagcatcttcgtgcacatcaccatcaacgagatctacggcaagtggagccccctgatcctgaaccccagctacaccatcctgcacttcctgggcgccaccaagaacagacagctgcagggcctgaagggcctgttcaacaagaaccccagacacagcagcagcgagaacaacagccactacgtgagaaagagaagcatcggcgacagaatcctgagaagaaccgccagcgcccccgccaagggcagaaagaagagcaagatgggcttccaggagatggtggagatcaaggacagcgtgagcgaggccaccagagaccaggacggcgtgctgagaagaaccaccagaagcctgcaggccagacccgtgagcatgcccgtggacagaaacctgctgggcgccctgagcctgcccgtgagcgagaccgccaaggacatcgagggcaaggagaacagcctggtgcagatctag

SEQ ID NO: 48858 - protein, 777 aa, Artificial Sequence
  derived and/or modified sequence
MQCLGIRSRSRSRELYLQERSLKVAALNGRRLGLQDDEDLQALLKGSQLLKVKSSSWRRERFYKLQEDCKTIWQESRKVMRTPESQLFSIEDIQEVRMGHRTEGLEKFARDVPEDRCFSIVFKDQRNTLDLIAPSPADAQHWVLGLHKIIHHSGSMDQRQKLQHWIHSCLRKADKNKDNKMSFKELQNFLKELNIQVDDSYARKIFRECDHSQTDSLEDEEIEAFYKMLTQRVEIDRTFAEAAGSGETLSVDQLVTFLQHQQREEAAGPALALSLIERYEPSETAKAQRQMTKDGFLMYLLSADGSAFSLAHRRVYQDMGQPLSHYLVSSSHNTYLLEDQLAGPSSTEAYIRALCKGCRCLELDCWDGPNQEPIIYHGYTFTSKILFCDVLRAIRDYAFKASPYPVILSLENHCTLEQQRVMARHLHAILGPMLLNRPLDGVTNSLPSPEQLKGKILLKGKKLGGLLPPGGEGGPEATVVSDEDEAAEMEDEAVRSRVQHKPKEDKLRLAQELSDMVIYCKSVHFGGFSSPGTPGQAFYEMASFSENRALRLLQESGNGFVRHNVGHLSRIYPAGWRTDSSNYSPVEMWNGGCQIVALNFQTPGPEMDVYQGRFQDNGACGYVLKPAFLRDPNGTFNPRALAQGPWWARKRLNIRVISGQQLPKVNKNKNSIVDPKVTVEIHGVSRDVASRQTAVITNNGFNPWWDTEFAFEVVVPDLALIRFLVEDYDASSKNDFIGQSTIPLNSLKQGYRHVHLMSKNGDQHPSATLFVKISLQD

SEQ ID NO: 48859 - DNA, 2334 bp, Artificial Sequence
  derived and/or modified sequence
atgcaatgcttgggaattcgcagcaggtcaaggtccagggagctctatctccaggaaaggtcactcaaggtcgcggcactaaatggccggaggcttggactgcaagacgatgaggatctccaagccctactgaagggcagccagttgctgaaggtcaagagctcttcatggcggagagagaggttctataagctgcaggaggattgtaagaccatttggcaggaatcacggaaggtcatgcgaaccccagaatcacagctgttttccatagaagacatccaggaagtccgtatgggtcaccgcacagagggtctggaaaagttcgcgcgcgatgtgcctgaagatagatgcttttcaattgtgtttaaggaccagcgcaacacacttgatctgatcgctccaagtccagctgatgcccagcattgggttcttggccttcacaagattatccatcattctgggtcgatggatcagcgtcagaaattgcaacactggatccattcatgcttacgcaaggctgacaaaaataaagacaacaagatgtcttttaaggagctgcagaatttcttgaaagaactgaacattcaagttgatgatagctacgcccgcaaaatctttcgagagtgtgaccactcccaaacagacagtctggaggatgaagagatcgaagccttctacaaaatgctgacacagagggtggagatcgatagaacatttgcagaagcggccggaagtggcgaaacactgtcggtggaccaactcgttacatttctgcagcaccaacagagggaggaggcagcagggcctgccctggcactgtccctcatcgaacgttacgaaccaagcgaaacagctaaggcacagagacaaatgaccaaagatggctttctcatgtatttgctgtctgcagacgggtctgccttctctcttgcccatcggcgcgtataccaggatatgggccagccactgtcccattatctcgttagttcctcgcacaacacttatctgctagaggatcagctagccggccccagttccaccgaagcctatatcagggcactttgtaagggatgtaggtgcctggagttggattgctgggacggacccaaccaggagcccatcatctatcatggttacacgtttacgtctaaaatcctgttttgtgacgttcttcgcgctattcgcgattatgcctttaaggcctccccctaccctgtgattctttcactcgagaaccattgtacattggagcaacaacgagtcatggcgaggcaccttcacgcaatactcggcccaatgctcctgaatcgcccattagacggtgtaacaaactccctgcccagtccggaacagttgaagggtaagatactgctcaaggggaaaaagcttggcggcttgctcccacccggcggtgaaggtggaccagaagccaccgtggtgtctgatgaggatgaggctgcagagatggaagacgaagctgtacgatcccgtgtgcagcacaagccgaaggaggacaagctgcggctagcccaggagctgtccgatatggtaatctattgcaaatcagttcactttggcggattcagctctcccggaacacctggccaggcgttttatgaaatggcctccttctctgagaatagagccctccgtctcctccaggaatccgggaatggattcgtaaggcataacgttggacatctttcccgtatctatcccgccggctggcgcacggactcaagtaactattcacctgtagaaatgtggaatggtggatgtcagattgtggcactcaacttccaaactccaggcccagagatggatgtgtaccagggccggttccaggacaatggggcttgcggctatgtattaaaaccagcattcctccgcgaccccaacgggaccttcaatccaagagctctagcccaaggcccttggtgggcaaggaagcggctaaacattagggtgatttccgggcaacagctgcccaaagtgaacaaaaataaaaatagcattgtggaccccaaagtcacagtggagatacatggggttagtcgtgatgtggccagtagacagacagcggttatcacaaacaacgggttcaacccctggtgggacaccgagttcgcatttgaggtagtggtaccagaccttgccctgattagatttttagtggaagactatgacgcctcttccaaaaacgattttattgggcagtcaaccatacccctcaactctctgaagcagggttacagacacgtgcacctcatgagcaaaaatggcgatcagcatccctcggctacactgttcgtcaagatctcattgcaggactag

SEQ ID NO: 48860 - DNA, 2334 bp, Artificial Sequence
  derived and/or modified sequence
atgcagtgcctgggcatccgcagccgcagccgcagccgggagctgtacctgcaggagaggagcctgaaggtggccgccctgaatggccggcggctgggcctgcaggatgatgaggacctgcaggccctgctgaagggcagccagctgctgaaggtgaagagcagctcctggaggcgggagcgcttctacaagctgcaggaggactgcaagaccatctggcaggagagcaggaaggtgatgaggaccccagagagccagctgttcagcattgaggacatccaggaggtgaggatgggccacaggacagagggcctggagaagtttgccagagatgtgcctgaggaccgctgcttcagcatcgtgttcaaggaccagaggaacaccctggacctgattgcccccagccctgcagatgcccagcactgggtgctgggcctgcacaagatcatccaccacagcggctccatggaccagaggcagaagctgcagcactggatccacagctgcctgaggaaggctgacaagaacaaggacaacaagatgtccttcaaggagctgcagaacttcctgaaggagctgaacatccaggtggatgacagctatgccaggaagatcttccgggagtgtgaccacagccagacagacagcctggaggatgaggagattgaggccttctacaagatgctgacccagagggtggagattgacaggacctttgctgaggccgccggcagcggggagaccctgtctgtggaccagctggtgaccttcctgcagcaccagcagcgggaggaggccgccggccctgccctggccctgagcctcatcgagagatatgagcccagcgagacagccaaggcccagaggcagatgaccaaggatggcttcctgatgtacctgctgtctgcagatggcagcgccttcagcctggcccacagaagagtgtaccaggacatgggccagcccctgagccactacctggtgagcagcagccacaacacctacctgctggaggaccagctggccggccccagcagcacagaggcctacatccgggccctgtgcaagggctgccgctgcctggagctggactgctgggatggccccaaccaggagcccatcatctaccacggctacaccttcaccagcaagatcctcttctgtgatgtgctgcgggccatccgggactatgccttcaaggccagcccctaccctgtgatcctgagcctggagaaccactgcaccctggagcagcagagggtgatggcccggcacctgcacgccatcctgggccccatgctgctgaaccggcccctggatggagtgaccaacagcctgcccagccctgagcagctgaagggcaagatcctgctgaagggcaagaagctgggcggcctgctgcccccaggaggagagggcggccctgaggccaccgtggtgtctgatgaagatgaggccgctgagatggaggatgaagctgtgcgcagccgggtgcagcacaagcccaaggaggacaagctgcggctggcccaggagctgagtgacatggtgatctactgcaagtctgtgcactttggaggcttcagcagccctggcaccccaggccaggccttctatgagatggccagcttcagcgagaacagagccctgcggctgctgcaggagagcggaaatggatttgtgcgccacaacgtgggccacctgagccgcatctacccagctggctggaggacagacagcagcaactacagccctgtggagatgtggaatggaggctgccagatcgtggccctgaacttccagaccccaggccctgagatggatgtgtaccagggccgcttccaggacaatggagcctgtggctacgtgctgaagccagccttcctgcgggaccccaacggcaccttcaacccccgggccctggcccagggcccctggtgggccaggaagaggctgaacatccgggtcatcagcggccagcagctgcccaaggtgaacaagaacaagaacagcatcgtggaccccaaggtgacagtggagatccacggcgtgtccagagatgtggccagccggcagacagctgtgatcaccaacaacggcttcaacccctggtgggacacagaatttgcctttgaggtggtggtgcctgacctggccctgatccgcttcctggtggaggactatgatgccagcagcaagaatgacttcatcggccagagcaccatccccctgaacagcctgaagcagggctacagacatgtgcacctgatgagcaagaatggagaccagcaccccagcgccaccctgtttgtgaagatcagcctgcaggactag

SEQ ID NO: 48861 - DNA, 2334 bp, Artificial Sequence
  derived and/or modified sequence
atgcagtgcctgggcatccggagccggagccggagccgggagctgtacttacaagaaagatctctgaaagtcgcagcactgaacggaagaaggctagggctacaggatgatgaggatctccaggcgctgttaaagggctctcagctcctcaaagttaagtcttccagctggaggagagagcggttctataagctacaggaagattgcaagacaatatggcaggaaagccggaaggtaatgcggacacccgagagccagctgttctctatcgaggacatccaagaagttagaatgggccaccgtacggaaggccttgaaaaattcgccagagatgtgcctgaggaccgctgcttttcaattgtcttcaaagatcaacgcaatacgctggaccttattgctccatcccccgctgacgcccaacactgggttctgggacttcataaaatcatccaccactcggggagcatggaccagaggcagaagcttcaacactggatccacagctgcctgaggaaagctgacaaaaataaggataataagatgtcctttaaggagcttcagaactttcttaaggagctgaacattcaggtagatgacagttacgcgcgcaagatcttcagagagtgtgatcactcacagactgatagtctggaggacgaggaaatagaggcgttctataaaatgctcactcagcgcgtggagattgacagaacgttcgctgaggctgccggcagtggggaaaccttatctgttgaccagctggtcacgttcttgcagcatcaacagcgggaagaagcagctggccccgctcttgctttatcactcattgaaaggtacgagcccagcgaaactgccaaggctcagcgtcagatgacaaaggatggtttcctaatgtacctgctctctgccgacggaagcgctttttctctcgcccacaggcgcgtctatcaagacatgggccagcccctctctcattatctggtgtctagcagtcacaacacctatctcctcgaggaccagttggccggcccaagttccaccgaggcttatattcgggcactttgtaaaggctgtcgctgcctcgagctagactgctgggatggccccaaccaagagccaattatctatcatggctacacctttacctccaaaattctgttctgtgacgtattgagggccatcagggactatgcttttaaggcaagtccctaccctgttatcctgtccctggaaaaccactgcaccctcgagcagcagcgcgtaatggcaagacacctgcatgcgatcttgggccccatgctcctgaacagaccacttgatggagtgaccaattctctcccaagtcccgagcagctgaaaggcaagatactacttaagggaaaaaagttaggcgggctgctgcctcctggaggagagggtgggcccgaagccaccgtagtaagcgacgaggatgaggcagctgaaatggaagacgaggccgtcagatctagggttcagcacaagcccaaagaagacaagttgagactcgcccaggagttgtccgatatggtgatctattgcaagtcagtgcacttcgggggtttttcaagtccagggacccctggtcaggctttttacgaaatggccagtttttcagagaaccgagctttacgcctattacaggaatctggtaatgggtttgtgcggcacaacgtgggccatttgtcacgcatatacccggctggatggaggactgactcatctaattattctcctgtcgaaatgtggaatggcgggtgccagatcgtggctctgaatttccagacccccggcccggaaatggacgtttatcagggacgttttcaggacaacggagcctgcggctatgtgctcaagcccgccttcttgagagatcctaatggcacgttcaaccctcgggcccttgctcaggggccttggtgggccaggaaacgcctaaacattcgggttatctctggtcagcagctgccaaaggttaacaaaaacaagaacagcatagtggatccaaaagtgacggtcgagatacacggtgtatctcgggacgtcgccagccgacagacggccgttatcacaaacaatggctttaacccttggtgggataccgagttcgcttttgaagtggtggttcccgacctcgctttaatcaggttcctcgtggaggattacgatgcatcttccaaaaacgatttcatcggccagtctacgattcccttaaactctttgaagcaggggtatcggcatgtgcatctcatgtctaagaatggagaccagcatccctctgccactctcttcgttaaaattagccttcaggactag

SEQ ID NO: 48862 - DNA, 2963 bp, Artificial Sequence
  derived and/or modified sequence
ttcttctcgtcccgcctcctgtattctgactccccccactcatttactttgcctcggtttcgctctcgcctcaccttcagggggcataggtcccgccgctcgtggactagctccgcctcctagcgtctgactaccccctcagcccagatttccctctcgtcccgcccctccgaagtgcgcccctcctctcgaactctagctcctccctcccattcctggactccgcccctgctcccctccaagggcgacagttccgccccccggaccagagcagagggtgttgtgagcataaaacactggaggcggcactgccccggacccggctccgcgcaggcaggggcactgtggagggccatgcagtgcctggggatccggagccggagccgctccagggagctctacctgcaggagcggagccttaaggtggcggcgctcaatggacggaggctgggcctacaggatgatgaggatctacaggcgctgctgaagggcagccagctcctgaaggtgaagtccagctcatggaggagagagcgcttctacaagttgcaggaggactgcaagaccatctggcaggagtcccgcaaggtcatgcggaccccggagtcccagctgttctccatcgaggacattcaggaggtgcgaatggggcaccgcacggagggtctggagaagttcgcccgtgatgtgcccgaggaccgctgcttctccattgtcttcaaggaccagcgcaatacactagacctcatcgccccatcgccagctgatgcccagcactgggtgctggggctgcacaagatcatccaccactcaggctccatggaccagcgtcagaagctacagcactggattcactcctgcttgcgaaaagctgacaaaaacaaggacaacaagatgagcttcaaggagctgcagaacttcctgaaggagctcaacatccaggtggacgacagctatgcccggaagatcttcagggagtgtgaccactcccagacagactccctggaggacgaggagattgaggccttctacaagatgctgacccagcgggtggagatcgaccgcaccttcgccgaggccgcgggctcaggggagactctgtcggtggatcagttagtgacgttcctgcagcaccagcagcgggaggaggcggcagggcctgcgctggccctctccctcattgagcgctacgagcccagcgagactgccaaggcgcagcggcagatgaccaaggacggcttcctcatgtacttactgtcggctgacggcagcgccttcagcctggcacaccgccgtgtctaccaggacatgggccagccacttagccactacctggtgtcctcttcacacaacacctacctgctggaggaccagctagccgggcccagcagcactgaagcctacatccgggcactgtgcaaaggctgccgatgcctggagcttgactgctgggacgggcccaaccaggaaccaatcatctaccacggctatactttcacttccaagatcctcttctgcgatgtgctcagggccatccgggactatgccttcaaggcgtccccctaccctgtcatcctatccctggagaaccactgcacactggagcagcagcgcgtgatggcgcggcacctgcatgccatcctgggccccatgctgttgaaccgaccactggatggggtcaccaacagcctgccctcccctgagcaactgaaggggaagatcctgctgaaggggaagaagctcggggggctcctgccccctggaggggagggtggccctgaggccactgtggtgtcagacgaagacgaggctgctgagatggaggatgaggcagtgaggagccgtgtgcagcacaagcccaaggaggacaagctcaggctagcacaggagctctctgacatggtcatttactgcaagagtgtccactttgggggcttctccagtcctggcacccctggacaggccttctacgagatggcgtccttctctgagaaccgtgcccttcgactgctccaagaatcaggaaacggctttgtccgccacaacgtggggcacctgagcagaatctacccggctggatggagaacagactcctccaactacagccccgtggagatgtggaatgggggctgccagatcgtggccctgaatttccagacacctgggccagagatggacgtgtaccagggccgcttccaggacaacggggcctgtgggtacgtgctgaagcccgccttcctgcgagaccccaacggcacctttaacccccgcgccctggctcaggggccctggtgggcacggaagcggctcaacatcagggtcatttcggggcagcagctgccaaaagtcaacaagaataagaattcaattgtggaccccaaagtgacagtggagatccatggcgtgagccgggacgtggccagccgccagactgctgtcatcaccaacaatggtttcaacccatggtgggacacggagtttgcgtttgaggtagttgtgcctgaccttgccctcatccgcttcttggtggaagattatgatgcctcctccaagaatgacttcattggccagagtaccatccccttgaacagcctcaagcaaggataccgccatgtccacctcatgtctaagaacggggaccagcatccatcagccaccctctttgtgaagatctccctccaggactaggctggaggaagccagtggggtcccccctgagtgggctgggccctctgtccacatgtggggacagggctggtgtggctgctcccagcctcttgctcagagctaggcccccaaattgccttcagccctaacatagtgtctgctgctgcctccctggggaccaggagctagcccagtccctggagctgtccttcattccgttaggaataacactgcagccctctccaccctccggccagcgagtggtcaaggatttttataaaaatcacgataagatt

SEQ ID NO: 48863 - DNA, 2334 bp, Artificial Sequence
  derived and/or modified sequence
atgcagtgtctggggatacgtagtaggtctagatctagggagctctatctgcaggagagatccctgaaagtcgccgctttaaatggtcggaggctgggactgcaagacgatgaagacctgcaggctttgctcaaagggagtcaactgctgaaggtaaagtcttcctcatggcggcgtgaacgcttctacaaattgcaggaggactgcaagaccatttggcaggaaagccggaaggttatgcggaccccagagagccaactgttctcaattgaggatatacaggaggtgaggatgggacacagaaccgaaggactcgagaaatttgccagagacgttcccgaagacagatgcttcagcatagtcttcaaagaccaacgcaatacattagatttaatcgccccttctccggcagacgcccagcattgggtgctgggattacacaaaattattcaccacagcgggagcatggaccaaaggcagaaactgcagcactggatccacagttgtcttagaaaagcagacaaaaataaggacaataagatgtcctttaaggaactgcaaaatttcctgaaagagttgaatatccaggtcgatgactcatacgccagaaagatattcagggagtgtgaccattctcaaacggacagcctagaggatgaagagatagaggcattctacaagatgctgacacaaagagttgagatagacaggacattcgccgaggctgccggatccggtgagaccctctcagtagatcagcttgtaactttcctgcaacatcagcagcgcgaggaggcagccggtccggctctggctttaagcctgatcgaacgttacgaaccatcagaaaccgctaaagcccagaggcagatgaccaaagacggatttctcatgtatctgctcagcgccgatggctccgcattttcactggcccaccgccgtgtctatcaggacatgggccaacctctcagtcattacctggtaagctcatcccataacacttatctgctcgaggatcagctggccggaccctccagtacagaagcttacatcagagcactgtgcaagggttgcaggtgtctggagctggactgttgggatggcccaaaccaggagcctataatttaccacggttatacttttacgtcaaaaatccttttttgcgatgtccttcgcgcaattcgggattacgcctttaaagcatctccctatccagtgatcctctccttggagaatcactgcaccctggaacagcagcgggtgatggcccgtcatttacacgctattttaggtcccatgctcctaaaccgccctctcgatggcgtaaccaatagtttgccatctccagagcagctgaagggaaagatcctcctgaaaggcaagaagttgggaggccttttaccacccggaggcgagggcggacctgaggccacagtggtttccgacgaggacgaagccgcagagatggaagatgaagccgtacggagtcgagtgcagcacaaacctaaggaggataaactgcggctcgcacaggagctttccgacatggtcatatactgcaaatctgtacatttcgggggtttttcttcaccaggaacgccagggcaggcattttatgaaatggcttccttctccgaaaatcgtgcactgagactcttgcaggaatctggaaatgggtttgtgaggcataatgttggccacttgagcagaatctaccctgcaggatggagaacagactcatctaattattctcctgtggagatgtggaatggaggatgtcagatcgtagcactcaacttccaaacacccggtcccgagatggatgtttatcagggcaggtttcaggacaacggcgcatgtgggtatgttttaaaaccagcctttctgcgcgacccgaatggcaccttcaatcccagagccctggcccaagggccttggtgggccagaaaacgcctcaatatccgagtgatctctgggcagcagctgcctaaagtcaacaagaataagaattcgatcgtggatccgaaggtgactgtcgaaatccacggagtgagtagggacgtggcaagcagacagaccgcggtgattaccaacaacggatttaacccatggtgggatacagagttcgccttcgaagtggttgtccctgacctggccctaatccggttcctggtagaagactacgacgcgtcctctaagaatgatttcattggacagtctaccatccctctaaacagtctgaagcagggctaccggcacgtacacctcatgagcaaaaacggcgatcagcacccctccgccacgctgtttgttaagatctccttgcaggattag

SEQ ID NO: 48864 - DNA, 2334 bp, Artificial Sequence
  derived and/or modified sequence
atgcagtgcctgggcatcagaagcagaagcagaagcagagagctgtacctgcaggagagaagcctgaaggtggccgccctgaacggcagaagactgggcctgcaggacgacgaggacctgcaggccctgctgaagggcagccagctgctgaaggtgaagagcagcagctggagaagagagagattctacaagctgcaggaggactgcaagaccatctggcaggagagcagaaaggtgatgagaacccccgagagccagctgttcagcatcgaggacatccaggaggtgagaatgggccacagaaccgagggcctggagaagttcgccagagacgtgcccgaggacagatgcttcagcatcgtgttcaaggaccagagaaacaccctggacctgatcgcccccagccccgccgacgcccagcactgggtgctgggcctgcacaagatcatccaccacagcggcagcatggaccagagacagaagctgcagcactggatccacagctgcctgagaaaggccgacaagaacaaggacaacaagatgagcttcaaggagctgcagaacttcctgaaggagctgaacatccaggtggacgacagctacgccagaaagatcttcagagagtgcgaccacagccagaccgacagcctggaggacgaggagatcgaggccttctacaagatgctgacccagagagtggagatcgacagaaccttcgccgaggccgccggcagcggcgagaccctgagcgtggaccagctggtgaccttcctgcagcaccagcagagagaggaggccgccggccccgccctggccctgagcctgatcgagagatacgagcccagcgagaccgccaaggcccagagacagatgaccaaggacggcttcctgatgtacctgctgagcgccgacggcagcgccttcagcctggcccacagaagagtgtaccaggacatgggccagcccctgagccactacctggtgagcagcagccacaacacctacctgctggaggaccagctggccggccccagcagcaccgaggcctacatcagagccctgtgcaagggctgcagatgcctggagctggactgctgggacggccccaaccaggagcccatcatctaccacggctacaccttcaccagcaagatcctgttctgcgacgtgctgagagccatcagagactacgccttcaaggccagcccctaccccgtgatcctgagcctggagaaccactgcaccctggagcagcagagagtgatggccagacacctgcacgccatcctgggccccatgctgctgaacagacccctggacggcgtgaccaacagcctgcccagccccgagcagctgaagggcaagatcctgctgaagggcaagaagctgggcggcctgctgccccccggcggcgagggcggccccgaggccaccgtggtgagcgacgaggacgaggccgccgagatggaggacgaggccgtgagaagcagagtgcagcacaagcccaaggaggacaagctgagactggcccaggagctgagcgacatggtgatctactgcaagagcgtgcacttcggcggcttcagcagccccggcacccccggccaggccttctacgagatggccagcttcagcgagaacagagccctgagactgctgcaggagagcggcaacggcttcgtgagacacaacgtgggccacctgagcagaatctaccccgccggctggagaaccgacagcagcaactacagccccgtggagatgtggaacggcggctgccagatcgtggccctgaacttccagacccccggccccgagatggacgtgtaccagggcagattccaggacaacggcgcctgcggctacgtgctgaagcccgccttcctgagagaccccaacggcaccttcaaccccagagccctggcccagggcccctggtgggccagaaagagactgaacatcagagtgatcagcggccagcagctgcccaaggtgaacaagaacaagaacagcatcgtggaccccaaggtgaccgtggagatccacggcgtgagcagagacgtggccagcagacagaccgccgtgatcaccaacaacggcttcaacccctggtgggacaccgagttcgccttcgaggtggtggtgcccgacctggccctgatcagattcctggtggaggactacgacgccagcagcaagaacgacttcatcggccagagcaccatccccctgaacagcctgaagcagggctacagacacgtgcacctgatgagcaagaacggcgaccagcaccccagcgccaccctgttcgtgaagatcagcctgcaggactag

SEQ ID NO: 48865 - protein, 812 aa, Artificial Sequence
  derived and/or modified sequence
MDFSRLHMYSPPQCVPENTGYTYALSSSYSSDALDFETEHKLDPVFDSPRMSRRSLRLATTACTLGDGEAVGADSGTSSAVSLKNRAARTTKQRRSTNKSAFSINHVSRQVTSSGVSHGGTVSLQDAVTRRPPVLDESWIREQTTVDHFWGLDDDGDLKGGNKAAIQGNGDVGAAAATAHNGFSCSNCSMLSERKDVLTAHPAAPGPVSRVYSRDRNQKCDDCKGKRHLDAHPGRAGTLWHIWACAGYFLLQILRRIGAVGQAVSRTAWSALWLAVVAPGKAASGVFWWLGIGWYQFVTLISWLNVFLLTRCLRNICKFLVLLIPLFLLLAGLSLRGQGNFFSFLPVLNWASMHRTQRVDDPQDVFKPTTSRLKQPLQGDSEAFPWHWMSGVEQQVASLSGQCHHHGENLRELTTLLQKLQARVDQMEGGAAGPSASVRDAVGQPPRETDFMAFHQEHEVRMSHLEDILGKLREKSEAIQKELEQTKQKTISAVGEQLLPTVEHLQLELDQLKSELSSWRHVKTGCETVDAVQERVDVQVREMVKLLFSEDQQGGSLEQLLQRFSSQFVSKGDLQTMLRDLQLQILRNVTHHVSVTKQLPTSEAVVSAVSEAGASGITEAQARAIVNSALKLYSQDKTGMVDFALESGGGSILSTRCSETYETKTALMSLFGIPLWYFSQSPRVVIQPDIYPGNCWAFKGSQGYLVVRLSMMIHPAAFTLEHIPKTLSPTGNISSAPKDFAVYGLENEYQEEGQLLGQFTYDQDGESLQMFQALKRPDDTAFQIVELRIFSNWGHPEYTCLYRFRVHGEPVK

SEQ ID NO: 48866 - protein, 785 aa, Artificial Sequence
  derived and/or modified sequence
MDFSRLHMYSPPQCVPENTGYTYALSSSYSSDALDFETEHKLDPVFDSPRMSRRSLRLATTACTLGDGEAVGADSGTSSAVSLKNRAARTTKQRRSTNKSAFSINHVSRQVTSSGVSHGGTVSLQDAVTRRPPVLDESWIREQTTVDHFWGLDDDGDLKGGNKAAIQGNGDVGAAAATAHNGFSCSNCSMLSERKDVLTAHPAAPGPVSRVYSRDRNQKCYFLLQILRRIGAVGQAVSRTAWSALWLAVVAPGKAASGVFWWLGIGWYQFVTLISWLNVFLLTRCLRNICKFLVLLIPLFLLLAGLSLRGQGNFFSFLPVLNWASMHRTQRVDDPQDVFKPTTSRLKQPLQGDSEAFPWHWMSGVEQQVASLSGQCHHHGENLRELTTLLQKLQARVDQMEGGAAGPSASVRDAVGQPPRETDFMAFHQEHEVRMSHLEDILGKLREKSEAIQKELEQTKQKTISAVGEQLLPTVEHLQLELDQLKSELSSWRHVKTGCETVDAVQERVDVQVREMVKLLFSEDQQGGSLEQLLQRFSSQFVSKGDLQTMLRDLQLQILRNVTHHVSVTKQLPTSEAVVSAVSEAGASGITEAQARAIVNSALKLYSQDKTGMVDFALESGGGSILSTRCSETYETKTALMSLFGIPLWYFSQSPRVVIQPDIYPGNCWAFKGSQGYLVVRLSMMIHPAAFTLEHIPKTLSPTGNISSAPKDFAVYGLENEYQEEGQLLGQFTYDQDGESLQMFQALKRPDDTAFQIVELRIFSNWGHPEYTCLYRFRVHGEPVK

SEQ ID NO: 48867 - protein, 822 aa, Artificial Sequence
  derived and/or modified sequence
MDFSRLHMYSPPQCVPENTGYTYALSSSYSSDALDFETEHKLDPVFDSPRMSRRSLRLATTACTLGDGEAVGADSGTSSAVSLKNRAARTTKQRRSTNKSAFSINHVSRQVTSSGVSHGGTVSLQDAVTRRPPVLDESWIREQTTVDHFWGLDDDGDLKGGNKAAIQGNGDVGAAAATAHNGFSCSNCSMLSERKDVLTAHPAAPGPVSRVYSRDRNQKCDDCKGKRHLDAHTAAHSQSPRLPGRAGTLWHIWACAGYFLLQILRRIGAVGQAVSRTAWSALWLAVVAPGKAASGVFWWLGIGWYQFVTLISWLNVFLLTRCLRNICKFLVLLIPLFLLLAGLSLRGQGNFFSFLPVLNWASMHRTQRVDDPQDVFKPTTSRLKQPLQGDSEAFPWHWMSGVEQQVASLSGQCHHHGENLRELTTLLQKLQARVDQMEGGAAGPSASVRDAVGQPPRETDFMAFHQEHEVRMSHLEDILGKLREKSEAIQKELEQTKQKTISAVGEQLLPTVEHLQLELDQLKSELSSWRHVKTGCETVDAVQERVDVQVREMVKLLFSEDQQGGSLEQLLQRFSSQFVSKGDLQTMLRDLQLQILRNVTHHVSVTKQLPTSEAVVSAVSEAGASGITEAQARAIVNSALKLYSQDKTGMVDFALESGGGSILSTRCSETYETKTALMSLFGIPLWYFSQSPRVVIQPDIYPGNCWAFKGSQGYLVVRLSMMIHPAAFTLEHIPKTLSPTGNISSAPKDFAVYGLENEYQEEGQLLGQFTYDQDGESLQMFQALKRPDDTAFQIVELRIFSNWGHPEYTCLYRFRVHGEPVK

SEQ ID NO: 48868 - protein, 174 aa, Artificial Sequence
  derived and/or modified sequence
MDFSRLHMYSPPQCVPENTGYTYALSSSYSSDALDFETEHKLDPVFDSPRMSRRSLRLATTACTLGDGEAVGADSGTSSAVSLKNRAARTTKQRRSTNKSAFSINHVSRQVTSSGVSHGGTVSLQDAVTRRPPVLDESWIREQTTVDHFWGLDDDGDLKGGNKAAIQGNGDVGA

SEQ ID NO: 48869 - protein, 974 aa, Artificial Sequence
  derived and/or modified sequence
MGDVRKAKEALAEVQIPPPDAGPSPRCKPPPAERLLGPGRRRRGLRRRREAVWFEVVNMDFSRLHMYSPPQCVPENTGYTYALSSSYSSDALDFETEHKLDPVFDSPRMSRRSLRLATTACTLGDGEAVGADSGTSSAVSLKNRAARTTKQRRSTNKSAFSINHVSRQVTSSGVSHGGTVSLQDAVTRRPPVLDESWIREQTTVDHFWGLDDDGDLKGGNKAAIQGNGDVGAAAATAHNGFSCSNCSMLSERKDVLTAHPAAPGPVSRVYSRDRNQKCGASFYVNRILWLARYTASSFSSFLVQLFQVVLMKLSYESENYKLKTHESKDCESESYKSKSHESKAHASYYGRMNVREVLREDGHLSVNGEALCDDCKGKRHLDAHTAAHSQSPRLPGRAGTLWHIWACAGYFLLQILRRIGAVGQAVSRTAWSALWLAVVAPGKAASGVFWWLGIGWYQFVTLISWLNVFLLTRCLRNICKFLVLLIPLFLLLAGLSLRGQGNFFSFLPVLNWASMHRTQRVDDPQDVFKPTTSRLKQPLQGDSEAFPWHWMSGVEQQVASLSGQCHHHGENLRELTTLLQKLQARVDQMEGGAAGPSASVRDAVGQPPRETDFMAFHQEHEVRMSHLEDILGKLREKSEAIQKELEQTKQKTISAVGEQLLPTVEHLQLELDQLKSELSSWRHVKTGCETVDAVQERVDVQVREMVKLLFSEDQQGGSLEQLLQRFSSQFVSKGDLQTMLRDLQLQILRNVTHHVSVTKQLPTSEAVVSAVSEAGASGITEAQARAIVNSALKLYSQDKTGMVDFALESGGGSILSTRCSETYETKTALMSLFGIPLWYFSQSPRVVIQPDIYPGNCWAFKGSQGYLVVRLSMMIHPAAFTLEHIPKTLSPTGNISSAPKDFAVYGLENEYQEEGQLLGQFTYDQDGESLQMFQALKRPDDTAFQIVELRIFSNWGHPEYTCLYRFRVHGEPVK

SEQ ID NO: 48870 - DNA, 2439 bp, Artificial Sequence
  derived and/or modified sequence
atggacttcagcagactgcacatgtacagccccccccagtgcgtgcccgagaacaccggctacacctacgccctgagcagcagctacagcagcgacgccctggacttcgagaccgagcacaagctggaccccgtgttcgacagccccagaatgagcagaagaagcctgagactggccaccaccgcctgcaccctgggcgacggcgaggccgtgggcgccgacagcggcaccagcagcgccgtgagcctgaagaacagagccgccagaaccaccaagcagagaagaagcaccaacaagagcgccttcagcatcaaccacgtgagcagacaggtgaccagcagcggcgtgagccacggcggcaccgtgagcctgcaggacgccgtgaccagaagaccccccgtgctggacgagagctggatcagagagcagaccaccgtggaccacttctggggcctggacgacgacggcgacctgaagggcggcaacaaggccgccatccagggcaacggcgacgtgggcgccgccgccgccaccgcccacaacggcttcagctgcagcaactgcagcatgctgagcgagagaaaggacgtgctgaccgcccaccccgccgcccccggccccgtgagcagagtgtacagcagagacagaaaccagaagtgcgacgactgcaagggcaagagacacctggacgcccaccccggcagagccggcaccctgtggcacatctgggcctgcgccggctacttcctgctgcagatcctgagaagaatcggcgccgtgggccaggccgtgagcagaaccgcctggagcgccctgtggctggccgtggtggcccccggcaaggccgccagcggcgtgttctggtggctgggcatcggctggtaccagttcgtgaccctgatcagctggctgaacgtgttcctgctgaccagatgcctgagaaacatctgcaagttcctggtgctgctgatccccctgttcctgctgctggccggcctgagcctgagaggccagggcaacttcttcagcttcctgcccgtgctgaactgggccagcatgcacagaacccagagagtggacgacccccaggacgtgttcaagcccaccaccagcagactgaagcagcccctgcagggcgacagcgaggccttcccctggcactggatgagcggcgtggagcagcaggtggccagcctgagcggccagtgccaccaccacggcgagaacctgagagagctgaccaccctgctgcagaagctgcaggccagagtggaccagatggagggcggcgccgccggccccagcgccagcgtgagagacgccgtgggccagccccccagagagaccgacttcatggccttccaccaggagcacgaggtgagaatgagccacctggaggacatcctgggcaagctgagagagaagagcgaggccatccagaaggagctggagcagaccaagcagaagaccatcagcgccgtgggcgagcagctgctgcccaccgtggagcacctgcagctggagctggaccagctgaagagcgagctgagcagctggagacacgtgaagaccggctgcgagaccgtggacgccgtgcaggagagagtggacgtgcaggtgagagagatggtgaagctgctgttcagcgaggaccagcagggcggcagcctggagcagctgctgcagagattcagcagccagttcgtgagcaagggcgacctgcagaccatgctgagagacctgcagctgcagatcctgagaaacgtgacccaccacgtgagcgtgaccaagcagctgcccaccagcgaggccgtggtgagcgccgtgagcgaggccggcgccagcggcatcaccgaggcccaggccagagccatcgtgaacagcgccctgaagctgtacagccaggacaagaccggcatggtggacttcgccctggagagcggcggcggcagcatcctgagcaccagatgcagcgagacctacgagaccaagaccgccctgatgagcctgttcggcatccccctgtggtacttcagccagagccccagagtggtgatccagcccgacatctaccccggcaactgctgggccttcaagggcagccagggctacctggtggtgagactgagcatgatgatccaccccgccgccttcaccctggagcacatccccaagaccctgagccccaccggcaacatcagcagcgcccccaaggacttcgccgtgtacggcctggagaacgagtaccaggaggagggccagctgctgggccagttcacctacgaccaggacggcgagagcctgcagatgttccaggccctgaagagacccgacgacaccgccttccagatcgtggagctgagaatcttcagcaactggggccaccccgagtacacctgcctgtacagattcagagtgcacggcgagcccgtgaagtag

SEQ ID NO: 48871 - DNA, 2358 bp, Artificial Sequence
  derived and/or modified sequence
atggacttcagcagactgcacatgtacagccccccccagtgcgtgcccgagaacaccggctacacctacgccctgagcagcagctacagcagcgacgccctggacttcgagaccgagcacaagctggaccccgtgttcgacagccccagaatgagcagaagaagcctgagactggccaccaccgcctgcaccctgggcgacggcgaggccgtgggcgccgacagcggcaccagcagcgccgtgagcctgaagaacagagccgccagaaccaccaagcagagaagaagcaccaacaagagcgccttcagcatcaaccacgtgagcagacaggtgaccagcagcggcgtgagccacggcggcaccgtgagcctgcaggacgccgtgaccagaagaccccccgtgctggacgagagctggatcagagagcagaccaccgtggaccacttctggggcctggacgacgacggcgacctgaagggcggcaacaaggccgccatccagggcaacggcgacgtgggcgccgccgccgccaccgcccacaacggcttcagctgcagcaactgcagcatgctgagcgagagaaaggacgtgctgaccgcccaccccgccgcccccggccccgtgagcagagtgtacagcagagacagaaaccagaagtgctacttcctgctgcagatcctgagaagaatcggcgccgtgggccaggccgtgagcagaaccgcctggagcgccctgtggctggccgtggtggcccccggcaaggccgccagcggcgtgttctggtggctgggcatcggctggtaccagttcgtgaccctgatcagctggctgaacgtgttcctgctgaccagatgcctgagaaacatctgcaagttcctggtgctgctgatccccctgttcctgctgctggccggcctgagcctgagaggccagggcaacttcttcagcttcctgcccgtgctgaactgggccagcatgcacagaacccagagagtggacgacccccaggacgtgttcaagcccaccaccagcagactgaagcagcccctgcagggcgacagcgaggccttcccctggcactggatgagcggcgtggagcagcaggtggccagcctgagcggccagtgccaccaccacggcgagaacctgagagagctgaccaccctgctgcagaagctgcaggccagagtggaccagatggagggcggcgccgccggccccagcgccagcgtgagagacgccgtgggccagccccccagagagaccgacttcatggccttccaccaggagcacgaggtgagaatgagccacctggaggacatcctgggcaagctgagagagaagagcgaggccatccagaaggagctggagcagaccaagcagaagaccatcagcgccgtgggcgagcagctgctgcccaccgtggagcacctgcagctggagctggaccagctgaagagcgagctgagcagctggagacacgtgaagaccggctgcgagaccgtggacgccgtgcaggagagagtggacgtgcaggtgagagagatggtgaagctgctgttcagcgaggaccagcagggcggcagcctggagcagctgctgcagagattcagcagccagttcgtgagcaagggcgacctgcagaccatgctgagagacctgcagctgcagatcctgagaaacgtgacccaccacgtgagcgtgaccaagcagctgcccaccagcgaggccgtggtgagcgccgtgagcgaggccggcgccagcggcatcaccgaggcccaggccagagccatcgtgaacagcgccctgaagctgtacagccaggacaagaccggcatggtggacttcgccctggagagcggcggcggcagcatcctgagcaccagatgcagcgagacctacgagaccaagaccgccctgatgagcctgttcggcatccccctgtggtacttcagccagagccccagagtggtgatccagcccgacatctaccccggcaactgctgggccttcaagggcagccagggctacctggtggtgagactgagcatgatgatccaccccgccgccttcaccctggagcacatccccaagaccctgagccccaccggcaacatcagcagcgcccccaaggacttcgccgtgtacggcctggagaacgagtaccaggaggagggccagctgctgggccagttcacctacgaccaggacggcgagagcctgcagatgttccaggccctgaagagacccgacgacaccgccttccagatcgtggagctgagaatcttcagcaactggggccaccccgagtacacctgcctgtacagattcagagtgcacggcgagcccgtgaagtag

SEQ ID NO: 48872 - DNA, 2469 bp, Artificial Sequence
  derived and/or modified sequence
atggacttcagcagactgcacatgtacagccccccccagtgcgtgcccgagaacaccggctacacctacgccctgagcagcagctacagcagcgacgccctggacttcgagaccgagcacaagctggaccccgtgttcgacagccccagaatgagcagaagaagcctgagactggccaccaccgcctgcaccctgggcgacggcgaggccgtgggcgccgacagcggcaccagcagcgccgtgagcctgaagaacagagccgccagaaccaccaagcagagaagaagcaccaacaagagcgccttcagcatcaaccacgtgagcagacaggtgaccagcagcggcgtgagccacggcggcaccgtgagcctgcaggacgccgtgaccagaagaccccccgtgctggacgagagctggatcagagagcagaccaccgtggaccacttctggggcctggacgacgacggcgacctgaagggcggcaacaaggccgccatccagggcaacggcgacgtgggcgccgccgccgccaccgcccacaacggcttcagctgcagcaactgcagcatgctgagcgagagaaaggacgtgctgaccgcccaccccgccgcccccggccccgtgagcagagtgtacagcagagacagaaaccagaagtgcgacgactgcaagggcaagagacacctggacgcccacaccgccgcccacagccagagccccagactgcccggcagagccggcaccctgtggcacatctgggcctgcgccggctacttcctgctgcagatcctgagaagaatcggcgccgtgggccaggccgtgagcagaaccgcctggagcgccctgtggctggccgtggtggcccccggcaaggccgccagcggcgtgttctggtggctgggcatcggctggtaccagttcgtgaccctgatcagctggctgaacgtgttcctgctgaccagatgcctgagaaacatctgcaagttcctggtgctgctgatccccctgttcctgctgctggccggcctgagcctgagaggccagggcaacttcttcagcttcctgcccgtgctgaactgggccagcatgcacagaacccagagagtggacgacccccaggacgtgttcaagcccaccaccagcagactgaagcagcccctgcagggcgacagcgaggccttcccctggcactggatgagcggcgtggagcagcaggtggccagcctgagcggccagtgccaccaccacggcgagaacctgagagagctgaccaccctgctgcagaagctgcaggccagagtggaccagatggagggcggcgccgccggccccagcgccagcgtgagagacgccgtgggccagccccccagagagaccgacttcatggccttccaccaggagcacgaggtgagaatgagccacctggaggacatcctgggcaagctgagagagaagagcgaggccatccagaaggagctggagcagaccaagcagaagaccatcagcgccgtgggcgagcagctgctgcccaccgtggagcacctgcagctggagctggaccagctgaagagcgagctgagcagctggagacacgtgaagaccggctgcgagaccgtggacgccgtgcaggagagagtggacgtgcaggtgagagagatggtgaagctgctgttcagcgaggaccagcagggcggcagcctggagcagctgctgcagagattcagcagccagttcgtgagcaagggcgacctgcagaccatgctgagagacctgcagctgcagatcctgagaaacgtgacccaccacgtgagcgtgaccaagcagctgcccaccagcgaggccgtggtgagcgccgtgagcgaggccggcgccagcggcatcaccgaggcccaggccagagccatcgtgaacagcgccctgaagctgtacagccaggacaagaccggcatggtggacttcgccctggagagcggcggcggcagcatcctgagcaccagatgcagcgagacctacgagaccaagaccgccctgatgagcctgttcggcatccccctgtggtacttcagccagagccccagagtggtgatccagcccgacatctaccccggcaactgctgggccttcaagggcagccagggctacctggtggtgagactgagcatgatgatccaccccgccgccttcaccctggagcacatccccaagaccctgagccccaccggcaacatcagcagcgcccccaaggacttcgccgtgtacggcctggagaacgagtaccaggaggagggccagctgctgggccagttcacctacgaccaggacggcgagagcctgcagatgttccaggccctgaagagacccgacgacaccgccttccagatcgtggagctgagaatcttcagcaactggggccaccccgagtacacctgcctgtacagattcagagtgcacggcgagcccgtgaagtag

SEQ ID NO: 48873 - DNA, 2925 bp, Artificial Sequence
  derived and/or modified sequence
atgggcgacgtgagaaaggccaaggaggccctggccgaggtgcagatccccccccccgacgccggccccagccccagatgcaagcccccccccgccgagagactgctgggccccggcagaagaagaagaggcctgagaagaagaagagaggccgtgtggttcgaggtggtgaacatggacttcagcagactgcacatgtacagccccccccagtgcgtgcccgagaacaccggctacacctacgccctgagcagcagctacagcagcgacgccctggacttcgagaccgagcacaagctggaccccgtgttcgacagccccagaatgagcagaagaagcctgagactggccaccaccgcctgcaccctgggcgacggcgaggccgtgggcgccgacagcggcaccagcagcgccgtgagcctgaagaacagagccgccagaaccaccaagcagagaagaagcaccaacaagagcgccttcagcatcaaccacgtgagcagacaggtgaccagcagcggcgtgagccacggcggcaccgtgagcctgcaggacgccgtgaccagaagaccccccgtgctggacgagagctggatcagagagcagaccaccgtggaccacttctggggcctggacgacgacggcgacctgaagggcggcaacaaggccgccatccagggcaacggcgacgtgggcgccgccgccgccaccgcccacaacggcttcagctgcagcaactgcagcatgctgagcgagagaaaggacgtgctgaccgcccaccccgccgcccccggccccgtgagcagagtgtacagcagagacagaaaccagaagtgcggcgccagcttctacgtgaacagaatcctgtggctggccagatacaccgccagcagcttcagcagcttcctggtgcagctgttccaggtggtgctgatgaagctgagctacgagagcgagaactacaagctgaagacccacgagagcaaggactgcgagagcgagagctacaagagcaagagccacgagagcaaggcccacgccagctactacggcagaatgaacgtgagagaggtgctgagagaggacggccacctgagcgtgaacggcgaggccctgtgcgacgactgcaagggcaagagacacctggacgcccacaccgccgcccacagccagagccccagactgcccggcagagccggcaccctgtggcacatctgggcctgcgccggctacttcctgctgcagatcctgagaagaatcggcgccgtgggccaggccgtgagcagaaccgcctggagcgccctgtggctggccgtggtggcccccggcaaggccgccagcggcgtgttctggtggctgggcatcggctggtaccagttcgtgaccctgatcagctggctgaacgtgttcctgctgaccagatgcctgagaaacatctgcaagttcctggtgctgctgatccccctgttcctgctgctggccggcctgagcctgagaggccagggcaacttcttcagcttcctgcccgtgctgaactgggccagcatgcacagaacccagagagtggacgacccccaggacgtgttcaagcccaccaccagcagactgaagcagcccctgcagggcgacagcgaggccttcccctggcactggatgagcggcgtggagcagcaggtggccagcctgagcggccagtgccaccaccacggcgagaacctgagagagctgaccaccctgctgcagaagctgcaggccagagtggaccagatggagggcggcgccgccggccccagcgccagcgtgagagacgccgtgggccagccccccagagagaccgacttcatggccttccaccaggagcacgaggtgagaatgagccacctggaggacatcctgggcaagctgagagagaagagcgaggccatccagaaggagctggagcagaccaagcagaagaccatcagcgccgtgggcgagcagctgctgcccaccgtggagcacctgcagctggagctggaccagctgaagagcgagctgagcagctggagacacgtgaagaccggctgcgagaccgtggacgccgtgcaggagagagtggacgtgcaggtgagagagatggtgaagctgctgttcagcgaggaccagcagggcggcagcctggagcagctgctgcagagattcagcagccagttcgtgagcaagggcgacctgcagaccatgctgagagacctgcagctgcagatcctgagaaacgtgacccaccacgtgagcgtgaccaagcagctgcccaccagcgaggccgtggtgagcgccgtgagcgaggccggcgccagcggcatcaccgaggcccaggccagagccatcgtgaacagcgccctgaagctgtacagccaggacaagaccggcatggtggacttcgccctggagagcggcggcggcagcatcctgagcaccagatgcagcgagacctacgagaccaagaccgccctgatgagcctgttcggcatccccctgtggtacttcagccagagccccagagtggtgatccagcccgacatctaccccggcaactgctgggccttcaagggcagccagggctacctggtggtgagactgagcatgatgatccaccccgccgccttcaccctggagcacatccccaagaccctgagccccaccggcaacatcagcagcgcccccaaggacttcgccgtgtacggcctggagaacgagtaccaggaggagggccagctgctgggccagttcacctacgaccaggacggcgagagcctgcagatgttccaggccctgaagagacccgacgacaccgccttccagatcgtggagctgagaatcttcagcaactggggccaccccgagtacacctgcctgtacagattcagagtgcacggcgagcccgtgaagtag

SEQ ID NO: 48874 - DNA, 2439 bp, Artificial Sequence
  derived and/or modified sequence
atggactttagccggctgcatatgtatagtccccctcaatgcgtgcccgagaatacaggttacacatatgccctatcctctagctacagcagcgacgctctggactttgagacagaacataagcttgacccagttttcgatagcccacgcatgagtcgaaggtctctcaggctcgccaccacggcgtgtacgctgggcgatggggaagcagtcggggcagactccggaacctcctccgccgtcagtctcaagaacagggccgcccgcacaacgaagcagcgacgctctacgaacaagagtgcattttccatcaaccacgtgtcccggcaggtgacctcttccggcgtcagccatggtggcacagtgtccctgcaggacgcagtaactcgtcggcctcccgtgctggacgaaagctggatccgcgaacagaccaccgtggaccacttttggggtctcgacgacgacggcgatttgaaaggcggcaataaggctgccattcaaggcaacggagacgtgggggccgcagccgccacagcacacaacggcttttcctgtagcaactgtagcatgctgtccgaacgtaaagacgtcctcacagcccatcccgcagcccccgggccggtaagtagagtttactcaagggacaggaatcagaaatgcgacgattgtaagggcaaacgacacctggacgcccacccgggccgcgcggggaccttgtggcacatctgggcttgcgctggttactttttgctgcagattctgagacggataggggccgtgggacaagcggtgagtcgaaccgcctggtccgcattgtggctcgctgtagtggctccaggcaaggctgcttctggtgtgttttggtggctgggcatcggctggtatcagttcgttaccctgatcagctggcttaacgttttcctgctcacccgatgtcttagaaatatttgtaagttcctagttctcctcatcccgctcttccttcttctggccggactgagtctgcgcgggcagggtaacttcttttcctttctgcccgttctgaattgggcatctatgcacaggacccagcgcgtagatgacccccaagatgttttcaagcctactacaagcagactgaaacagcctctgcaaggcgattccgaagccttcccatggcactggatgtccggtgtcgaacagcaggtggcttccttgagtggccagtgccatcatcatggagaaaacctgagggagctaaccacactactgcaaaagctgcaggctcgcgtggaccagatggagggtggagccgccggaccatctgcatctgttcgcgacgccgtggggcagcctcccagagagaccgatttcatggcttttcatcaggaacacgaggttcggatgagtcacctagaggacatccttggaaaactgagggagaagtccgaagccatccagaaggagctggagcaaacaaagcagaagaccatttccgcggtgggcgaacaactgcttcctactgtcgagcatctccagctggaattagaccagttgaagtctgagctttcctcttggcgccacgtgaaaacaggttgcgaaaccgtggacgccgtgcaggaacgagttgatgtgcaggtaagagagatggttaagcttctgtttagtgaagaccagcagggaggctctctggagcaactcctacagaggttctcatcccagttcgttagtaaaggcgatttgcagaccatgcttagggatctgcagctccagatactcagaaatgtgacacatcacgtctcagtgaccaagcagctacctacgtcagaggccgtagtctcagcagtgtccgaagccggcgccagtgggattaccgaggcccaggcccgtgccatagtgaatagcgccttaaagctgtactcccaggataagactggcatggtggattttgccctggagtcaggaggcggaagcatcttgtccacaaggtgtagcgagacctatgaaaccaagacggcgcttatgtcactctttggcatccctctatggtattttagccagtcccccagagttgtcatccaacctgatatttacccaggcaattgctgggccttcaaagggtctcagggttacctagtcgtgcgcctaagcatgatgatccatcctgccgcttttacactcgaacatattcctaagaccctgtctcctaccggcaacatctcatctgcacccaaagactttgcagtgtacggcttggagaatgagtatcaagaggagggacagctgctgggtcagttcacttacgaccaagatggtgaatccctgcagatgttccaggccctgaagcgcccagatgacaccgcgtttcagatagttgaactcaggatattctcaaattgggggcaccccgaatatacttgtttgtaccgattcagagtccacggtgaacccgtcaaatag

SEQ ID NO: 48875 - DNA, 2358 bp, Artificial Sequence
  derived and/or modified sequence
atggactttagcagactgcatatgtatagccccccacagtgcgttccagagaacacagggtatacgtacgctctcagtagctcctactcctcagacgcgctcgacttcgaaaccgagcataagctggaccccgtgtttgattctccacgcatgagcaggaggtccctgagactggccactactgcttgtaccctaggggatggagaagccgtcggcgccgactccggaacttcctctgctgtgtctttgaagaatagggcagcccgcaccaccaagcagcggcgatcaaccaataagtcagcattcagtatcaaccatgtgtctcggcaagtaacatcgtctggggtgagccacggtggaacagtcagtctgcaggacgccgtgacaagaagacctcccgtcctagatgaaagctggatccgggaacagactactgtggatcacttttggggcctcgacgatgatggcgatctaaaggggggcaacaaagccgccattcaggggaatggagatgtgggagccgctgccgccactgcacacaatggcttctcttgtagtaattgttccatgctcagcgagaggaaggatgtcctgacggcccatccagccgcccccgggcctgtgtcccgagtgtatagccgggaccggaaccagaagtgctattttctgctacaaatcctgaggcgcatcggggccgtgggccaggctgtgtcccgtaccgcatggagtgcgctctggcttgctgttgtagcccccgggaaagccgcatccggagtattttggtggctgggcatcggctggtatcagtttgtgacactgattagttggttgaacgttttccttcttacacggtgcctccgaaatatatgtaagttcctcgtccttctcattcctctgtttctactactggccggtctctccctgcggggccaggggaattttttttctttcctgcccgttcttaattgggcttcaatgcacagaacccaaagagtagacgacccccaggacgtgttcaagcctacaacctccaggttgaaacaaccactccagggggacagcgaggcgtttccgtggcactggatgtctggagtggaacagcaggtcgcgtccttgagcggccaatgccatcaccacggcgaaaatctcagggaactcactaccctgctgcagaagctgcaggcgcgtgtagaccagatggagggcggggccgctgggccaagtgcatcagttcgcgatgccgtaggccagccccccagagagacagactttatggcctttcaccaggaacacgaggttagaatgagtcatctggaagacatactggggaagttgcgagaaaaatctgaagcaattcaaaaagagttggaacaaacgaagcagaaaacgatttccgctgtgggcgagcagctgctccccaccgtcgaacacctgcagctggagttagaccagctgaaatcagaactgtcgagctggcggcatgtcaagacaggatgtgagaccgtggacgcggtccaagaaagggttgatgtgcaggtaagggagatggtgaaattactgttctccgaagaccaacagggaggatcgttggaacagctcttgcaaaggttttccagccagtttgtcagcaaaggggatttgcagaccatgctgcgcgatctgcagctccagattttgcgcaatgtgacacaccatgtctctgttactaagcagctgccgacctccgaggcagtggtgtctgccgtttctgaggctggcgctagtggaataacagaagcccaagctcgagctatcgtgaactccgcactaaagctgtacagccaggacaagacgggaatggtggattttgcactggagtctggtggaggctccatactgagtacccgatgctcagagacatatgagaccaagacagcacttatgagcttgttcgggatcccattgtggtacttcagccaatcccccagagtagttatccagccagacatttaccccggaaattgctgggcctttaagggctctcagggatatctcgtggtccgactgagtatgatgattcacccggcagccttcaccctggagcacatcccaaaaaccttgtcgccgaccggcaatatatcatccgcccccaaggacttcgcagtttacggactggaaaatgagtaccaggaggagggacagctgctcggccaattcacttacgaccaggatggagagagcctccagatgtttcaggctctgaagagacccgacgatacagccttccagattgtggaattacgcatttttagcaactggggacaccccgaatatacatgcttatatcggttcagggtgcatggcgagccagtaaagtag

SEQ ID NO: 48876 - DNA, 2469 bp, Artificial Sequence
  derived and/or modified sequence
atggatttcagtcgcctgcatatgtatagcccccctcagtgtgtgccggagaataccgggtacacttacgccctctcaagttcgtactcttcagatgcattagatttcgaaacagaacacaagctggaccccgtcttcgactcgcccaggatgagtcggaggagtttaagacttgcgactaccgcctgcactctgggggacggtgaggcagtgggtgccgacagcggtacatcctctgctgtctcgctgaagaaccgggccgccaggaccactaaacaacggaggagcacaaataaaagtgctttctccataaaccacgtatcccgccaggttacttcaagcggcgtgtcccacggcggaaccgtgtcactacaggatgctgtgacccgacgcccccctgtcctcgacgagagttggatacgtgagcagaccactgtcgaccacttttggggccttgacgacgatggagacctgaaaggaggcaataaggcagcgatccagggtaatggcgacgtgggtgcagcagccgctaccgctcacaatggtttctcttgcagcaattgcagcatgctgtctgaacgaaaagatgtgctgacagcgcaccccgccgcccctggacctgtgtctcgggtctactcgagggacagaaatcagaagtgtgatgattgcaagggcaagcggcatctggatgcccataccgcagcacatagccagtccccccgcttgcctgggcgagcggggaccttgtggcacatctgggcttgcgcagggtatttcctcctccagatactgaggcgcattggggcagtgggtcaagccgtgtcgagaacagcgtggtctgccctttggctggccgtggtggctcccgggaaagccgcctcgggagtcttctggtggttaggaattggctggtaccagttcgtgacactgatttcttggctgaatgtattccttctcactcggtgtcttcggaatatctgcaagtttctggtgcttctcattccattgtttctcctactcgccggtctgtctctcagaggtcaagggaactttttcagctttctccctgtgctgaactgggcatccatgcaccgaactcagagagtggacgacccccaggacgtgtttaagcccaccaccagtcggctaaagcagcctttgcagggcgactctgaggcttttccatggcactggatgtcaggtgtggagcagcaggtagcttccctatcaggacagtgccaccatcatggcgaaaatctacgagagctaaccacactgctccagaaactgcaggcacgcgtggaccagatggagggcggtgctgctggcccttctgccagcgttcgggatgctgttggccaacctcctagggagacagatttcatggcttttcaccaggaacacgaagtccgaatgagccacctagaagacatcctgggaaagttgcgagagaaaagcgaggctatacagaaggaactggaacagacgaaacagaaaacaatctcagccgtgggggagcagctccttccaaccgttgaacatttacagctggaactagaccaactgaagtctgaactgagctcttggagacacgtcaaaacaggctgtgagactgtagacgccgtgcaggaacgcgtggacgtccaagtgagagaaatggttaaattgctgttttcagaggatcagcagggtggctctctcgaacagttactgcagaggtttagcagccagttcgtctccaaaggggacctgcaaactatgctccgagaccttcagttgcaaatcttgcggaatgtcacacatcacgtttccgtgactaaacagctgccgacttctgaggcggtggtgtcagctgtttccgaggcaggtgcctctggaattactgaagcacaagccagggcaatcgtgaattctgccctgaagttatactcccaggataagacagggatggttgacttcgccctggagtccggggggggatccatattgtccactcgctgctctgagacttacgagactaagactgctctgatgagtttgttcggaatccctctgtggtatttttcgcagagtcctcgagttgtgattcagccagatatataccctggaaactgttgggccttcaaaggatcccagggatacctggttgtgcgattatccatgatgatccaccctgcagctttcacactggagcatatccccaaaaccttgtcaccaacaggcaacatttcctcagccccgaaagattttgccgtttacggcttagaaaacgagtaccaagaagaaggccaactcctgggacagttcacatacgaccaagatggcgaatcccttcaaatgttccaggctctgaaaagacccgacgataccgcattccagattgtagaactgagaatcttctctaattggggccaccctgagtatacgtgcctctaccgattccgagtgcacggggagccagtgaaatag

SEQ ID NO: 48877 - DNA, 2925 bp, Artificial Sequence
  derived and/or modified sequence
atgggggacgtccgcaaagccaaagaagctctggctgaggttcaaattcctccaccagatgctggccccagccccagatgtaagccaccgcccgccgaacgccttctggggccaggcagaaggcgcaggggcctgaggagacgacgagaggcagtgtggtttgaggtggtgaatatggacttcagtcgattgcacatgtattcacctccacagtgcgtgcctgaaaacaccggttatacctatgccctaagctcctcatatagcagcgacgccttggactttgagaccgaacacaaacttgacccagtcttcgacagtccacgcatgtctcgtcggagcctgagactggccaccacggcttgcaccctgggcgacggggaggctgtaggagctgatagcgggacatcatccgctgttagcttgaaaaaccgcgctgccaggacaacgaagcagcgtcggtcgacgaataaatcagcattcagcatcaatcacgtctctagacaggtgactagttctggggtttctcatgggggcaccgtgtctctacaggacgccgtcacccggagacctcccgttctggatgaatcctggattcgggagcagacaaccgtggatcacttctggggattagacgatgacggcgatctaaaaggcggtaacaaggcggccatccagggcaatggagatgtgggagctgctgctgccacagcacataacggcttctcttgttctaactgcagcatgttgagtgagcgcaaggatgtccttacagctcatccagccgctcctgggcccgtgtctagagtgtattctcgagacagaaatcagaaatgtggggcatctttctacgtgaatcgcatcctgtggttagcaaggtacactgcgtcctcattttcatcattcctggtccagctgtttcaggttgtgttaatgaagttatcttatgaatcggagaactataagttaaaaacccacgaatcaaaggattgcgagtctgaatcatacaagtcaaagtcacatgagtctaaagctcacgcctcttactacggccgcatgaacgttcgagaggtcctgcgggaagatgggcatctctccgtcaacggggaggccctttgcgacgactgtaagggcaagcgccacttggacgcccacaccgcagctcattctcagagccccaggctgccaggtcgggccgggaccctctggcacatctgggcctgcgcgggatactttttgctgcaaattttgagacgcatcggagctgtcggccaggccgtaagccgaacggcctggtccgccctgtggcttgccgtggtcgctcctggcaaagccgctagtggagtattctggtggctggggattggttggtaccaatttgtgaccctcattagctggctgaatgtttttctgctgaccaggtgccttaggaatatctgcaagtttttggtgctgctaatcccactgtttctcctgcttgcgggattgtctctgcgaggacaagggaacttcttctcttttttaccagttttaaactgggcgtccatgcatcggacacaacgcgttgatgaccctcaggatgtttttaagcctacaactagcagattaaagcagcctctccagggggacagcgaggcatttccgtggcactggatgtcaggggtggagcagcaggtggcctctctgtccgggcagtgccaccatcacggcgagaatctgcgggagctgacgacgctgcttcagaagttacaggcccgagtggatcagatggaagggggagccgccgggccttccgctagcgttagagacgcggtgggccagccaccccgcgaaaccgattttatggcttttcaccaggaacatgaggttaggatgtcccatcttgaggatatactaggcaagctgcgcgaaaagtccgaggcaatacagaaggaactggagcagactaagcagaagacaatcagtgcagtgggtgaacagctgctccctacagtagagcacttacagctggaactggaccagctgaagtcggaattatcaagttggcgccacgtcaaaactggttgcgaaactgtcgatgccgtccaggagagagttgacgtacaagtacgcgagatggttaagctgctcttcagtgaggatcagcagggtggcagcttggagcagctgctgcaacgttttagctcccagtttgtttccaagggtgatctgcagaccatgctccgggacctgcaactacagatcctgcggaacgtaactcatcatgtaagcgtgactaagcaactgccaacgtccgaagctgttgtgagcgcggtgagtgaagcaggcgcaagtggtatcactgaagctcaggccagagctatagtgaactcagctctgaagctgtacagccaggataaaacgggcatggtggacttcgccttggagagtggggggggcagcatattgtctaccagatgctctgagacttacgagacgaaaacagcccttatgtccctcttcggaattcccctctggtatttctcccagtctccacgcgtggtaatccagcccgatatctacccgggtaactgctgggcttttaagggatctcaggggtacctggtggtgagacttagtatgatgatccatcctgccgcttttacgctcgagcatattcctaagacattgagcccaacaggcaacatctcctcggccccaaaggactttgctgtgtatggcttagagaacgagtaccaagaagaggggcaactactgggacagtttacttatgatcaggacggagagagcctccagatgttccaggccctcaaaaggcctgatgacacagcatttcagattgtggagctacgaatatttagtaattgggggcacccagagtatacttgcctgtaccgttttagagtgcacggggagcccgtcaagtag

SEQ ID NO: 48878 - DNA, 2439 bp, Artificial Sequence
  derived and/or modified sequence
atggacttcagccggctgcacatgtacagccccccccagtgtgtgcctgaaaatacaggctacacctacgccctgagcagcagctacagcagtgatgccctggactttgaaacagagcacaagctggaccctgtgtttgacagccccaggatgagcagaagaagcctgcggctggccaccacagcctgcaccctgggagatggagaggccgtgggcgctgacagcggcaccagcagcgctgtgtccctgaagaacagagctgcccggaccaccaagcagaggaggagcaccaacaagagcgccttcagcatcaaccacgtgtcccggcaggtgaccagcagcggcgtgagccacggcggcaccgtgtccctgcaggatgctgtgacccggcggccccctgtgctggatgagagctggatccgggagcagaccaccgtggaccacttctggggcctggatgatgatggagacctgaagggcggcaacaaggccgccatccagggcaatggagatgtgggcgctgctgctgccacagcccacaacggcttcagctgcagcaactgcagcatgctgtctgagaggaaggatgtgctgacagcccaccctgctgcccctggccctgtgtcccgggtgtacagccgggacaggaaccagaagtgtgatgactgcaagggcaagaggcacctggatgcccaccctggccgggccggcaccctgtggcacatctgggcctgtgccggctacttcctgctgcagatcctgcggagaattggagctgtgggccaggccgtgtccaggacagcctggagcgccctgtggctggccgtggtggcccctgggaaggccgccagcggggtcttctggtggctgggcatcggctggtaccagtttgtgaccctcatctcctggctgaatgtgttcctgctgacccgctgcctgaggaacatctgcaagttcctggtgctgctgatccccctcttcctgctgctggccggcctgagcctgcggggccagggcaacttcttctccttcctgcctgtgctgaactgggcctccatgcacaggacccagagggtggatgacccccaggatgtgttcaagcccaccaccagccggctgaagcagcccctgcagggcgacagcgaggccttcccctggcactggatgtctggagtggagcagcaggtggccagcctgagcggccagtgccaccaccacggggagaacctgcgggagctgaccaccctgctgcagaagctgcaggcccgggtggaccagatggagggcggggccgccggccccagcgcctctgtgagagatgctgtgggccagcccccccgggagacagacttcatggccttccaccaggagcacgaggtgaggatgagccacctggaggacatcctgggcaagctgcgggagaagtctgaggccatccagaaggagctggagcagaccaagcagaagaccatctctgctgtgggggagcagctgctgcccaccgtggagcacctgcagctggagctggaccagctgaagtctgagctgagctcctggaggcatgtgaagacaggctgtgagaccgtggatgctgtgcaggagcgggtggatgtgcaggtgcgggagatggtgaagctgctcttcagcgaggaccagcagggcggcagcctggagcagctgctgcagcgcttcagcagccagtttgtgtccaaaggagacctgcagaccatgctgcgggacctgcagctgcagatcctgagaaatgtgacccaccacgtgtctgtgaccaagcagctgcccaccagcgaggccgtggtgtctgctgtgtctgaggccggggccagcggcatcacagaggcccaggcccgggccatcgtgaacagcgccctgaagctgtacagccaggacaagacaggcatggtggactttgccctggagagcggcggcggcagcatcctgagcacccgctgcagcgagacctatgagaccaagacagccctgatgagcctgtttggcatccccctgtggtacttcagccagagcccccgggtggtgatccagcctgacatctacccaggcaactgctgggccttcaagggcagccagggctacctggtggtgcggctgtccatgatgatccaccctgctgccttcaccctggagcacatccccaagaccctgagccccaccggcaacatcagcagcgcccccaaggactttgctgtgtatggcctggagaatgagtaccaggaggagggccagctgctgggccagttcacctatgaccaggatggagagagcctgcagatgttccaggccctgaagaggccagatgacacagccttccagatcgtggagctgcgcatcttcagcaactggggccaccctgagtacacctgcctgtaccgcttccgggtgcatggagagcctgtgaagtag

SEQ ID NO: 48879 - DNA, 2358 bp, Artificial Sequence
  derived and/or modified sequence
atggacttcagccggctgcacatgtacagccccccccagtgtgtgcctgaaaatacaggctacacctacgccctgagcagcagctacagcagtgatgccctggactttgaaacagagcacaagctggaccctgtgtttgacagccccaggatgagcagaagaagcctgcggctggccaccacagcctgcaccctgggagatggagaggccgtgggcgctgacagcggcaccagcagcgctgtgtccctgaagaacagagctgcccggaccaccaagcagaggaggagcaccaacaagagcgccttcagcatcaaccacgtgtcccggcaggtgaccagcagcggcgtgagccacggcggcaccgtgtccctgcaggatgctgtgacccggcggccccctgtgctggatgagagctggatccgggagcagaccaccgtggaccacttctggggcctggatgatgatggagacctgaagggcggcaacaaggccgccatccagggcaatggagatgtgggcgctgctgctgccacagcccacaacggcttcagctgcagcaactgcagcatgctgtctgagaggaaggatgtgctgacagcccaccctgctgcccctggccctgtgtcccgggtgtacagccgggacaggaaccagaagtgctacttcctgctgcagatcctgcggcgcatcggggctgtgggccaggccgtgtccaggacagcctggagcgccctgtggctggccgtggtggcccctgggaaggccgccagcggggtcttctggtggctgggcatcggctggtaccagtttgtgaccctcatctcctggctgaatgtgttcctgctgacccgctgcctgaggaacatctgcaagttcctggtgctgctgatccccctcttcctgctgctggccggcctgagcctgcggggccagggcaacttcttctccttcctgcctgtgctgaactgggcctccatgcacaggacccagagggtggatgacccccaggatgtgttcaagcccaccaccagccggctgaagcagcccctgcagggcgacagcgaggccttcccctggcactggatgtctggagtggagcagcaggtggccagcctgagcggccagtgccaccaccacggggagaacctgcgggagctgaccaccctgctgcagaagctgcaggcccgggtggaccagatggagggcggcgctgctggccccagcgcctctgtgagagatgctgtgggccagcccccccgggagacagacttcatggccttccaccaggagcacgaggtgaggatgagccacctggaggacatcctgggcaagctgcgggagaagtctgaggccatccagaaggagctggagcagaccaagcagaagaccatctctgctgtgggggagcagctgctgcccaccgtggagcacctgcagctggagctggaccagctgaagtctgagctgagctcctggaggcatgtgaagacaggctgtgaaacagtggatgctgtgcaggagcgggtggatgtgcaggtgcgggagatggtgaagctgctcttcagcgaggaccagcagggcggcagcctggagcagctgctgcagcgcttcagcagccagtttgtgtccaagggggacctgcagaccatgctgcgggacctgcagctgcagatcctgagaaatgtgacccaccacgtgtctgtgaccaagcagctgcccaccagcgaggccgtggtgtctgctgtgtctgaggccggggccagcggcatcacagaggcccaggcccgggccatcgtgaacagcgccctgaagctgtacagccaggacaagacaggcatggtggactttgccctggagagcggcggcggcagcatcctgagcacccgctgcagcgagacctatgagaccaagacagccctgatgagcctgtttggcatccccctgtggtacttcagccagagcccccgggtggtgatccagcctgacatctacccaggcaactgctgggccttcaagggcagccagggctacctggtggtgcggctgtccatgatgatccaccctgctgccttcaccctggagcacatccccaagaccctgagccccactggaaacatcagcagcgcccccaaggactttgctgtgtatggcctggagaatgagtaccaggaggagggccagctgctgggccagttcacctatgaccaggatggagagagcctgcagatgttccaggccctgaagaggccagatgacacagccttccagatcgtggagctgcgcatcttcagcaactggggccaccctgagtacacctgcctgtaccgcttccgggtgcacggggagcctgtgaagtag

SEQ ID NO: 48880 - DNA, 2469 bp, Artificial Sequence
  derived and/or modified sequence
atggacttcagccggctgcacatgtacagccccccccagtgtgtgcctgaaaatacaggctacacctacgccctgagcagcagctacagcagtgatgccctggactttgaaacagagcacaagctggaccctgtgtttgacagccccaggatgagcagaagaagcctgcggctggccaccacagcctgcaccctgggagatggagaggccgtgggcgctgacagcggcaccagcagcgctgtgtccctgaagaacagagctgcccggaccaccaagcagaggaggagcaccaacaagagcgccttcagcatcaaccacgtgtcccggcaggtgaccagcagcggcgtgagccacggcggcaccgtgtccctgcaggatgctgtgacccggcggccccctgtgctggatgagagctggatccgggagcagaccaccgtggaccacttctggggcctggatgatgatggagacctgaagggcggcaacaaggccgccatccagggcaatggagatgtgggcgctgctgctgccacagcccacaacggcttcagctgcagcaactgcagcatgctgtctgagaggaaggatgtgctgacagcccaccctgctgcccctggccctgtgtcccgggtgtacagccgggacaggaaccagaagtgtgatgactgcaagggcaagaggcacctggatgcccacacagctgcccacagccagagcccccggctgcccggccgggccggcaccctgtggcacatctgggcctgtgccggctacttcctgctgcagatcctgcggagaattggagctgtgggccaggccgtgtccaggacagcctggagcgccctgtggctggccgtggtggcccctgggaaggccgccagcggggtcttctggtggctgggcatcggctggtaccagtttgtgaccctcatctcctggctgaatgtgttcctgctgacccgctgcctgaggaacatctgcaagttcctggtgctgctgatccccctcttcctgctgctggccggcctgagcctgcggggccagggcaacttcttctccttcctgcctgtgctgaactgggcctccatgcacaggacccagagggtggatgacccccaggatgtgttcaagcccaccaccagccggctgaagcagcccctgcagggcgacagcgaggccttcccctggcactggatgtctggagtggagcagcaggtggccagcctgagcggccagtgccaccaccacggggagaacctgcgggagctgaccaccctgctgcagaagctgcaggcccgggtggaccagatggagggcggggccgccggccccagcgcctctgtgagagatgctgtgggccagcccccccgggagacagacttcatggccttccaccaggagcacgaggtgaggatgagccacctggaggacatcctgggcaagctgcgggagaagtctgaggccatccagaaggagctggagcagaccaagcagaagaccatctctgctgtgggggagcagctgctgcccaccgtggagcacctgcagctggagctggaccagctgaagtctgagctgagctcctggaggcatgtgaagacaggctgtgagaccgtggatgctgtgcaggagcgggtggatgtgcaggtgcgggagatggtgaagctgctcttcagcgaggaccagcagggcggcagcctggagcagctgctgcagcgcttcagcagccagtttgtgtccaaaggagacctgcagaccatgctgcgggacctgcagctgcagatcctgagaaatgtgacccaccacgtgtctgtgaccaagcagctgcccaccagcgaggccgtggtgtctgctgtgtctgaggccggggccagcggcatcacagaggcccaggcccgggccatcgtgaacagcgccctgaagctgtacagccaggacaagacaggcatggtggactttgccctggagagcggcggcggcagcatcctgagcacccgctgcagcgagacctatgagaccaagacagccctgatgagcctgtttggcatccccctgtggtacttcagccagagcccccgggtggtgatccagcctgacatctacccaggcaactgctgggccttcaagggcagccagggctacctggtggtgcggctgtccatgatgatccaccctgctgccttcaccctggagcacatccccaagaccctgagccccaccggcaacatcagcagcgcccccaaggactttgctgtgtatggcctggagaatgagtaccaggaggagggccagctgctgggccagttcacctatgaccaggatggagagagcctgcagatgttccaggccctgaagaggccagatgacacagccttccagatcgtggagctgcgcatcttcagcaactggggccaccctgagtacacctgcctgtaccgcttccgggtgcatggagagcctgtgaagtag

SEQ ID NO: 48881 - DNA, 2925 bp, Artificial Sequence
  derived and/or modified sequence
atgggagatgtgaggaaggccaaggaggccctggccgaggtgcagatccccccaccagatgctggccccagcccccgctgcaagcccccacctgctgagcggctgctgggccctggaagaagaagaagaggcctgcggcggcggcgggaggccgtgtggtttgaggtggtgaacatggacttcagccggctgcacatgtacagccccccccagtgtgtgcctgaaaatacaggctacacctacgccctgagcagcagctacagcagtgatgccctggactttgaaacagagcacaagctggaccctgtgtttgacagccccaggatgagcagaagaagcctgcggctggccaccacagcctgcaccctgggagatggagaggccgtgggcgctgacagcggcaccagcagcgctgtgtccctgaagaacagagctgcccggaccaccaagcagaggaggagcaccaacaagagcgccttcagcatcaaccacgtgtcccggcaggtgaccagcagcggcgtgagccacggcggcaccgtgtccctgcaggatgctgtgacccggcggccccctgtgctggatgagagctggatccgggagcagaccaccgtggaccacttctggggcctggatgatgatggagacctgaagggcggcaacaaggccgccatccagggcaatggagatgtgggcgctgctgctgccacagcccacaacggcttcagctgcagcaactgcagcatgctgtctgagaggaaggatgtgctgacagcccaccctgctgcccctggccctgtgtcccgggtgtacagccgggacaggaaccagaagtgtggggccagcttctacgtgaaccgcatcctgtggctggcccgctacacagccagcagcttcagcagcttcctggtgcagctgttccaggtggtgctgatgaagctgtcctatgaaagtgagaactacaagctgaagacccatgagagcaaggactgtgagagcgagagctacaagagcaagagccatgagagcaaggcccacgccagctactacggccgcatgaatgtgcgggaggtgctgcgggaggatggccacctgtctgtgaatggagaggccctgtgtgatgactgcaagggcaagaggcacctggatgcccacacagctgcccacagccagagcccccggctgcccggccgggccggcaccctgtggcacatctgggcctgtgccggctacttcctgctgcagatcctgcggagaattggagctgtgggccaggccgtgtccaggacagcctggagcgccctgtggctggccgtggtggcccctgggaaggccgccagcggggtcttctggtggctgggcatcggctggtaccagtttgtgaccctcatctcctggctgaatgtgttcctgctgacccgctgcctgaggaacatctgcaagttcctggtgctgctgatccccctcttcctgctgctggccggcctgagcctgcggggccagggcaacttcttctccttcctgcctgtgctgaactgggcctccatgcacaggacccagagggtggatgacccccaggatgtgttcaagcccaccaccagccggctgaagcagcccctgcagggcgacagcgaggccttcccctggcactggatgtctggagtggagcagcaggtggccagcctgagcggccagtgccaccaccacggggagaacctgcgggagctgaccaccctgctgcagaagctgcaggcccgggtggaccagatggagggcggggccgccggccccagcgcctctgtgagagatgctgtgggccagcccccccgggagacagacttcatggccttccaccaggagcacgaggtgaggatgagccacctggaggacatcctgggcaagctgcgggagaagtctgaggccatccagaaggagctggagcagaccaagcagaagaccatctctgctgtgggggagcagctgctgcccaccgtggagcacctgcagctggagctggaccagctgaagtctgagctgagctcctggaggcatgtgaagacaggctgtgagaccgtggatgctgtgcaggagcgggtggatgtgcaggtgcgggagatggtgaagctgctcttcagcgaggaccagcagggcggcagcctggagcagctgctgcagcgcttcagcagccagtttgtgtccaaaggagacctgcagaccatgctgcgggacctgcagctgcagatcctgagaaatgtgacccaccacgtgtctgtgaccaagcagctgcccaccagcgaggccgtggtgtctgctgtgtctgaggccggggccagcggcatcacagaggcccaggcccgggccatcgtgaacagcgccctgaagctgtacagccaggacaagacaggcatggtggactttgccctggagagcggcggcggcagcatcctgagcacccgctgcagcgagacctatgagaccaagacagccctgatgagcctgtttggcatccccctgtggtacttcagccagagcccccgggtggtgatccagcctgacatctacccaggcaactgctgggccttcaagggcagccagggctacctggtggtgcggctgtccatgatgatccaccctgctgccttcaccctggagcacatccccaagaccctgagccccaccggcaacatcagcagcgcccccaaggactttgctgtgtatggcctggagaatgagtaccaggaggagggccagctgctgggccagttcacctatgaccaggatggagagagcctgcagatgttccaggccctgaagaggccagatgacacagccttccagatcgtggagctgcgcatcttcagcaactggggccaccctgagtacacctgcctgtaccgcttccgggtgcatggagagcctgtgaagtag

SEQ ID NO: 48882 - DNA, 2439 bp, Artificial Sequence
  derived and/or modified sequence
atggacttcagccggctgcacatgtacagccccccccagtgcgtgcccgagaatacagggtacacttatgctctgtcgagcagctactcgagcgatgcgctggattttgagacggaacataagctcgatccagtgttcgactctccgcgaatgtcaagaaggtctctgaggctcgccaccaccgcttgcacactgggtgacggtgaagccgtgggcgcagactccgggacatcatctgccgtgtccctgaagaatagagccgcacggactacgaaacagagacgctccacgaacaaaagcgcatttagtattaatcatgtcagccgacaggtgacgtcttctggagtgtctcacggaggcactgtgagtctccaggatgcggtgacaaggcgcccaccggtgctggacgagagctggatcagggagcagactacggtcgatcacttttgggggctggatgatgacggcgacctcaaaggaggcaataaagccgccatacagggaaatggcgatgttggagctgctgcagccacagctcataatggtttcagttgctcgaattgtagcatgctttccgagcgcaaggatgtactgacggctcatcccgccgccccaggcccagtatccagggtgtactcacgtgatcgcaatcagaagtgtgacgactgcaagggcaagcgacacttagatgcacatcctgggagagcggggactttgtggcacatctgggcttgtgccgggtacttcttactgcaaattttgagacgtattggagccgtgggtcaggccgtgtctcggactgcctggtctgccctgtggctagcggttgtggcccccggaaaggccgcgtccggtgttttctggtggctcggcattggatggtatcagtttgtgacgcttatcagctggctcaacgtatttctgttaacacgttgcctcaggaatatttgtaaattccttgtcctgctgattccccttttcctactgctggccggtttaagcctgcggggccaggggaatttctttagcttcctgcccgtgctgaattgggcatccatgcacaggacacaaagagttgacgatccgcaggacgtttttaaaccgaccacctctcgactcaaacagcccctgcagggagactcagaggcattcccatggcactggatgtcaggggtcgaacagcaggtcgcatccctgagcggccagtgccatcaccatggagagaacttgcgggaactgacaacactgttacaaaaactgcaagctagagtggatcaaatggaagggggggctgcaggaccttccgccagtgtgcgtgatgctgtgggccagccccccagggagactgactttatggctttccaccaggaacatgaggtacgcatgtctcatctggaagatatcctggggaagttgcgcgagaagtccgaagccatccagaaggaacttgagcaaaccaaacagaaaacaatttccgcagtcggggagcagctgctcccgacagtggaacacctgcagcttgagttggaccagcttaagtctgagttgtcttcgtggagacatgtgaaaactggatgcgaaacagtggacgccgttcaggaacgggtggatgttcaggtcagggaaatggtgaagctgctgttctccgaggatcagcagggagggtccctagagcagttgctgcagaggttttcctcacagtttgtgtcgaagggagatttacagactatgctcagggatttacagcttcagatcctccgaaatgtcacccaccatgtgtcagtcactaagcagttgcctacaagcgaggcagtggtctctgccgtgtccgaggcaggggcgagcggaattactgaggcgcaagcccgcgccattgtgaattccgctctaaagctctactctcaagataaaactgggatggttgattttgccttggaaagcggaggaggatccatcttgtctaccaggtgctccgagacttatgaaaccaaaaccgcgctgatgagtctgttcgggattccactgtggtatttctcccagtcaccacgcgtggtcattcagcccgacatatacccaggaaactgttgggcttttaaaggctcacagggctaccttgtggtgagactgagcatgatgatccatcctgcagcctttactcttgagcatattcccaagactctttcacccactggaaacataagttcagccccaaaggatttcgcggtttatggcctggagaacgagtaccaggaggagggacagctgctgggccaatttacttacgatcaagacggtgagtccctgcagatgtttcaggccctcaagagaccagacgacacagcctttcagatcgtggaactcagaatattttccaactggggtcacccggagtacacctgcctttatcgcttcagggttcatggggaaccagtcaagtag

SEQ ID NO: 48883 - DNA, 2358 bp, Artificial Sequence
  derived and/or modified sequence
atggacttcagccggctgcacatgtacagccccccccagtgcgtgcctgaaaatacagggtatacctacgcactttcatccagctacagcagtgacgccctggacttcgaaacggagcacaaactggatccggtgttcgacagccccaggatgagtcggcggagcctgcgcctcgccaccaccgcctgtacactgggagacggggaagctgttggagcagattcaggtaccagcagtgccgtctctctcaaaaatagagcagccaggacgactaaacagcgacgcagcacaaacaagtctgcatttagtatcaaccatgtgagccgacaggtgactagctcgggagtttctcatggcggtaccgtgagtctgcaggacgctgtcactcgtcggcctccagtgctcgatgagagctggatcagagagcagacaactgttgatcatttttgggggctggacgacgacggtgatcttaaaggtggaaacaaggccgctattcagggcaatggcgatgtcggagccgcagcggcaaccgcacacaatgggtttagctgcagcaattgttccatgttgtcggaacggaaagacgtgctgaccgcacacccagcggcaccaggtccagtaagccgggtttactcgagagatcgaaaccagaagtgctactttcttctgcagatactgaggcgaatcggagccgttggacaggccgtatcccggaccgcatggtcggccctttggctcgcggtggtggcccccggcaaggcggcgtctggggtgttttggtggctgggtatcggatggtatcagtttgtcacactgatcagctggctgaatgttttcctgttgacgcgctgcttgcgaaacatttgcaagtttctggttctcctgattccactgttcctgctcctggctggactcagcctgcgcggccagggtaactttttttcatttctcccagtgctcaattgggcttcaatgcataggacacagcgggtggatgacccccaggacgtctttaaacccactacaagtcgcctgaaacagcccctccagggcgatagcgaagccttcccatggcactggatgtcaggggttgagcaacaggtggcaagcttgtccggacagtgccaccaccacggtgagaaccttcgggagctgactacgctgctccagaaactccaagcacgcgtggaccagatggagggtggggcagcgggcccctcggcatctgtacgcgacgcagtgggacagccccctcgcgagactgactttatggctttccatcaggaacacgaagttcgaatgtcacatctcgaggatatccttgggaagctgcgggaaaagtcagaagcaatacagaaagaactggaacagacaaaacagaagacaatttccgctgtgggcgagcagctcctgccaaccgtggaacatctccagttggagctagaccagctgaaaagcgagttaagtagctggagacacgtgaaaaccgggtgtgagacagtcgacgctgtgcaagagagagtagacgtgcaagtacgcgaaatggtgaagctcctcttttcagaggatcagcaggggggaagtctagaacagctgctgcagagattctcaagccagttcgttagcaagggcgatctgcagaccatgttaagggacctgcagctccaaatcctccggaatgttactcaccatgtgagcgttaccaagcaattacctacttctgaagcagtggtctcagcagtctctgaagctggcgctagcggaattacagaagcccaggcccgagccatcgtaaatagcgctctgaagctgtacagtcaggataaaacaggtatggtggactttgccctcgagagcggaggcggaagtatactgagcactaggtgtagcgagacttacgaaaccaagaccgccctgatgtccctctttggaatacccctctggtatttctcacagtcccccagggtagtaattcagcccgacatttatcccggaaactgttgggcattcaagggttcccagggatatttggttgtcaggttgagtatgatgatccatcctgccgctttcaccctggaacacataccaaaaacactgtcccccacaggcaacatcagctctgctcctaaagacttcgcagtctatggactcgagaacgagtaccaggaggaagggcaactgctcggtcagttcacctacgatcaggacggcgaaagcctccagatgtttcaggccttgaaacgcccagatgacaccgcttttcagatcgtggagttacgcatcttttcgaactggggtcaccctgaatatacatgcctctacagattccgtgtgcacggtgagcctgtcaagtag

SEQ ID NO: 48884 - DNA, 2469 bp, Artificial Sequence
  derived and/or modified sequence
atggacttcagccggctgcacatgtacagccccccccagtgcgtgccagaaaacacgggctatacctacgctctgtccagcagttattcaagtgacgccctggacttcgagaccgaacataaacttgaccctgtcttcgactcccctcgtatgtcacggaggtcgctaaggttagcaactacagcttgtactctcggagatggcgaagctgttggagcggactccggaacatccagtgctgtcagcttgaagaatcgcgccgctaggacaaccaaacagaggagaagcaccaacaagtctgccttttctatcaatcacgtgagccgtcaggtcacctcttctggggtatctcacggcggaactgtctccctccaggacgcggtcacaagaaggccgccggtactggacgagtcatggattagggagcagacaaccgtggaccatttttgggggctggatgacgacggcgatctcaagggcggaaataaggctgccatccaaggtaatggcgatgtcggcgccgccgccgctaccgcacataacggattctcctgtagtaactgttccatgctcagtgaacgcaaggatgtgctgacggcccacccagctgccccagggcccgtcagtcgggtgtattctcgcgacagaaaccagaaatgtgatgattgcaaaggcaaaaggcaccttgacgcccacactgccgctcacagtcagagtccacggcttccagggcgcgcaggaacactatggcacatctgggcctgtgccggctatttcctacttcagatcctgcgccggatcggggctgtggggcaagccgtaagccgaaccgcttggtccgcactgtggctggctgtggttgccccaggcaaggctgccagcggagtgttctggtggctgggcatcgggtggtatcaattcgtgacattgatttcatggctgaatgtgtttctcctcacgagatgtctgagaaacatatgtaagtttttggtgctgttgatcccgctgttcctgctcctcgcagggctcagtttacggggacagggcaattttttttctttccttccagtgctcaactgggcgtcaatgcaccgtacccagagggtggacgacccccaggatgtttttaaacctactaccagtaggctgaagcaacctctgcagggcgattccgaagctttcccttggcactggatgtccggagtggagcagcaggtcgcaagcttaagcggccagtgccatcatcatggagaaaatttgagggagctcactacactgttacagaagctccaggcacgagtggaccaaatggaagggggagctgccggcccaagcgcgtccgttagagacgcagtcggtcagccgccacgcgaaacagattttatggcctttcatcaggagcacgaggtgcgcatgtctcacctggaagacatcctggggaagctccgtgaaaaaagtgaagctatccaaaaggagcttgagcagaccaagcagaagaccataagcgcagtgggggagcagttattacccacggtggaacatcttcagctcgaactggaccagctgaagagcgagctctctagctggcgccacgtaaaaaccggttgtgagactgtcgatgccgtacaggaacgagtggacgtccaggtacgggagatggtcaagttgctgtttagcgaagaccagcaaggaggatctctggaacagctgcttcagcggtttagctcacaatttgtctcaaagggcgatctccagaccatgctgagagacctgcagcttcaaattcttagaaacgtgacacatcacgtcagtgtcaccaagcaactcccgactagcgaggctgtggtgagcgcagtctccgaggctggtgcgagtggcattacggaagcacaggcacgcgctattgtgaacagcgcacttaagttgtactcccaagacaagactgggatggtggatttcgccttggagtccgggggggggagcattctgtcaacgagatgttcagagacatacgaaactaaaacggccctgatgagcctgtttggaatccctctgtggtactttagccagtctcctagagtagtgatacagcctgatatatacccagggaactgctgggcgtttaagggctcccaggggtatttggtggtgcggctgtccatgatgattcatcctgccgccttcacgctggagcatatcccgaaaacactgtccccgaccgggaatattagcagtgctcccaaggattttgcagtatacggcttagagaatgagtatcaagaggagggtcagctgttgggacagtttacatacgaccaggacggcgagtcccttcagatgtttcaggccctcaaaagaccagacgacaccgccttccagatagttgaactgagaatttttagtaactggggccacccagaatacacttgcctttatcgctttcgggttcacggggaacccgtgaagtag

SEQ ID NO: 48885 - DNA, 2925 bp, Artificial Sequence
  derived and/or modified sequence
atgggcgacgtgcggaaggccaaggaggccctggccgaggtgcagatccctccaccagatgccggtccatctcccagatgcaaacctcccccagccgagaggctcctcggccccggtcggaggaggcgcgggttaagaagaagacgtgaagccgtttggttcgaggttgttaatatggacttttcgcgcctccatatgtactccccaccccagtgtgtaccggaaaacacaggatatacctatgccctatctagtagctactcatccgacgcactcgattttgaaacagagcacaagctcgatcccgtgtttgacagtcctagaatgagcagaagatcactcaggctagccactacagcctgcacattgggggatggggaagctgtgggggcggacagcggcacaagctctgcagttagccttaagaacagggcagccaggaccactaaacaaagaagatctaccaacaaatctgccttctctatcaatcacgtgtcccgacaggtaacttctagtggagtgagccatgggggcaccgtgtctctacaggacgcagtgacacggagaccacccgtgctcgacgagagctggatcagggagcagactacagttgatcacttttggggcctggacgatgacggcgatctgaaaggcggaaacaaagctgcaattcagggtaatggagatgttggagccgcagctgctacggcgcacaacgggttctcatgcagtaactgtagcatgctatctgaaaggaaggatgtactgacagcccatccagctgcaccaggccctgtgagcagggtttactcccgggaccggaatcaaaagtgtggcgcttctttttatgtcaatcgcatcctgtggctcgcgcgttatacagcctcaagtttcagcagcttcctagttcaacttttccaggtggtgttaatgaagctttcttatgaatccgaaaattacaagctgaaaacccatgagtcaaaggattgtgagtccgagtcttacaagtctaaatctcatgaatccaaggcccacgctagttattacggcagaatgaatgtgcgcgaagtcctgagagaggatggacacctgtcagtgaatggcgaggctctgtgtgatgactgtaagggcaagcggcacttggatgcccacaccgctgctcactcacagtctccacgcctgcccggacgcgctggcacactttggcacatctgggcttgcgccggatactttctgctgcagattctgcgacggatcggagccgttggccaggcagtctcccggacagcgtggtcggcactgtggctggccgtggtagctcccggcaaagcagcgtctggggtcttttggtggctgggcatcggatggtatcagttcgttacattgattagctggctgaatgtatttttactgacaaggtgcctgcggaacatttgtaagtttctcgttttgctcatcccactgtttttgcttttagcggggctctccttgcggggccagggaaatttttttagcttcctgcccgtcttgaattgggcctctatgcatcgaactcaacgagttgacgacccgcaggacgtgttcaaaccaactacaagccggttgaagcagcctctacaaggggattcagaggccttcccttggcattggatgtccggtgtggaacagcaggtagcgagtttgtctgggcagtgtcatcaccatggcgaaaatctgcgcgaattgacgaccctgctgcagaagctgcaagcacgggtagatcaaatggaaggaggagccgccggcccctctgcatcagtgcgagacgcagttggacagccgcctagggaaacagacttcatggccttccatcaggagcatgaggtcaggatgtcccatctggaagacatattggggaaactcagggagaaaagcgaagctatccagaaagagctggagcagaccaaacaaaaaaccatctcggctgtaggcgagcagctgctgccaactgtagaacaccttcagctggaactggatcagctcaaatcagagctatcctcctggcgccatgtcaagacgggctgcgagaccgtcgacgcggtacaagagcgagttgacgtgcaagttagggaaatggtcaaactcttgttctccgaagatcagcagggaggaagcctggaacagctgctgcaaagattctcttcccagtttgtgtctaagggagacctacagacaatgctcagagatctacaattgcagattctgcgcaacgtgacccatcatgtgtccgttaccaagcagctccctacaagcgaggccgtggtgtccgcagtaagcgaagctggagcctccggcattaccgaagcacaggccagggcaatagttaactctgccctgaagctgtactctcaggataaaacgggtatggtggatttcgcgctggagtcgggcggtggctcaatcctatccactaggtgcagcgagacatacgagaccaaaaccgccttaatgagcctgttcgggatccccttatggtacttttcccagagccccagagtggtcatccagcccgatatctaccccgggaattgttgggcttttaaagggtcacagggctacctggtcgttcgcctgagcatgatgatccaccccgctgctttcactctggagcacattccaaagactctcagccctacgggaaatatctcatccgcccctaaggatttcgccgtgtacgggttggagaacgaatatcaagaggagggtcagttactcggccagtttacttacgaccaagacggcgagtcactccagatgtttcaggccctcaagcgcccagatgacactgcctttcaaatcgttgagctgaggattttttctaattggggacaccccgagtacacctgcctgtacaggtttagagtgcacggagagccggtgaaatag

SEQ ID NO: 48886 - DNA, 2439 bp, Artificial Sequence
  derived and/or modified sequence
atggacttcagccgactgcacatgtatagcccaccccagtgcgttcccgaaaacaccggatacacctacgcactttcatctagctatagctctgacgccttggatttcgaaacagaacataagctggaccccgtgtttgattcacctagaatgtccagacgttctttgcgtctagctacaacggcctgcactctgggtgatggtgaggcggtgggagctgattcaggcacctcgagtgccgtgagcctgaagaaccgcgcagctcggacaactaagcagagaaggtccaccaacaagtcagccttttcaatcaaccatgtgtctaggcaggtgacctcaagcggtgtgtcccatgggggtacagtgtctctccaagacgcagtgactaggagaccccctgtgttagacgagagctggattcgggaacagactacagtggaccatttttgggggctggacgatgacggtgatttgaagggcggaaacaaggcagccatacagggcaacggggacgtcggcgcagcggcagcgactgcacacaacggtttctcctgctcgaattgctccatgctctctgagaggaaagatgtgcttacggctcatcccgctgcgccagggccagtctctagagtctactcaagggatcgtaatcagaaatgtgatgactgcaaaggaaaacggcatctcgatgcccacccaggcagggccggtaccctctggcacatatgggcgtgcgcaggctattttttgctgcagatactcaggcgtattggtgccgttggacaggcagtgtccagaaccgcctggtccgccctctggctggcagtggtcgctccaggaaaagctgccagcggagtcttttggtggctgggcatcggatggtaccagttcgtgacgctgatcagctggctcaatgtgtttctcctgactcgttgcctgaggaatatatgcaaatttctcgtactcctgattcctctcttcctattgctcgccggtctgtccctgcggggacaaggaaacttcttctccttcctgcccgttctcaactgggcctccatgcacaggacccagcgggtggatgatccccaagacgtgttcaagccgacaaccagtcgcctgaagcaacctctgcaaggagatagcgaagccttcccgtggcattggatgtccggcgttgagcagcaggtagcttctctgtccggccaatgccaccaccacggagaaaatctgcgggagcttacgactctcctgcaaaagctgcaggctagagtcgatcaaatggagggtggagcggctggaccatccgcgtctgtccgcgacgcagttggtcaaccccctcgcgagacagatttcatggcatttcatcaagaacatgaagtgagaatgagccatctggaggatattttagggaagcttcgcgagaaaagtgaagccatacagaaagaactagaacaaactaaacagaagaccatttccgccgtcggagagcaacttctacccacagtggagcacctacaactggagctcgatcagctgaagtcggagctctcctcttggagacacgttaaaacgggttgcgagaccgttgatgccgttcaggagcgggtggacgttcaggtgcgtgagatggtcaaactcctcttcagtgaggaccagcagggaggtagtttggagcagttgctacagcgcttttcctcccaatttgtttctaaaggtgacctgcagactatgcttcgcgacttgcagctgcagatcctgaggaatgttacgcatcatgtgtcagtcaccaagcagctgccgacatcagaggctgtcgtatcagccgtcagcgaggcaggagcctccgggatcactgaagcacaggctagagccattgtgaactcagccctcaaactctatagccaggacaaaacaggcatggttgacttcgccctggaatccggcggaggctctatcctcagcactcgctgctctgagacgtacgagaccaagacggcacttatgtctctctttggcataccactgtggtatttcagtcagagccccagggtggttatccagcctgacatctacccaggaaactgctgggccttcaagggctcccaagggtacctggtggtccgcctctccatgatgatacatcccgctgcttttaccctggaacacatccctaagaccctgtcaccaacaggcaacatctcaagcgcccctaaggatttcgccgtttatggtctcgagaatgaataccaagaggaagggcagctgttaggtcagttcacctacgaccaggacggagagtccctgcagatgttccaggctctgaagcgacctgatgacaccgccttccagatcgtggaattgaggatcttctcaaattggggccacccagagtacacttgtctgtataggtttcgggtccacggtgagccagttaagtag

SEQ ID NO: 48887 - DNA, 2358 bp, Artificial Sequence
  derived and/or modified sequence
atggacttttcccggcttcacatgtatagtccaccccagtgcgtgcccgaaaacaccggctatacatatgcactcagtagcagttatagtagtgacgccctggatttcgaaaccgagcacaagctggacccagtattcgacagtcctcgaatgagcaggagaagcctaaggttagccactactgcctgcaccctcggggacggtgaagctgtaggggctgattcgggcaccagctctgcagtctcacttaaaaatcgggcagctaggactacaaagcagcgacgatctacaaataagtccgcgttcagcataaatcacgtgtcccgccaggtgacatcctccggtgtcagtcacggcggtaccgtcagcctccaggatgctgtaacccgcagaccccctgtgttggacgaaagctggatacgggaacagaccactgtcgatcacttctgggggttggatgacgacggggacttaaaaggcggaaacaaggctgcaattcagggtaatggcgacgtgggagcagctgccgctactgctcacaatgggtttagctgctcaaattgtagtatgttgtccgaacgcaaagacgtgttgactgcgcaccctgctgctccgggtccggtctcgcgagtgtactcccgtgatcggaaccagaagtgctacttcttactccaaattctcaggcgcattggagctgtgggccaagcagtaagccggactgcatggtcagccctgtggctggcagtggtggcacctggcaaagctgcctctggggtgttttggtggcttggtatcggctggtaccagttcgtcacactgattagttggctgaacgttttcctcttaacccgatgtctgagaaatatttgcaaattcctcgttttgcttatacccctgttcctgcttctggctggactcagtttgcgtggccaaggcaatttcttttcttttctgccagtcctgaattgggcttctatgcaccggacccagagagtggatgaccctcaggacgttttcaagccaaccacatctcggttaaaacagccacttcagggcgatagcgaagctttcccgtggcactggatgtccggagtggagcagcaggtggccagtctgtccggccagtgtcatcaccatggcgaaaatctgagagagctgaccactctcctgcagaaacttcaagcccgagtggaccagatggagggcggagctgcaggaccttcggcctcagttcgggatgccgttgggcaaccccctcgagagaccgatttcatggcatttcaccaagagcatgaggtcagaatgtcacatttagaagacattctggggaagctccgggaaaaaagcgaggctattcaaaaggagttggagcagactaaacagaagacaatctcagccgtgggagaacagctacttccgactgtggagcacctgcaactggagcttgatcagcttaagagcgaactgagcagttggagacacgtgaaaactgggtgcgaaacagtggacgcagtacaggagagggttgacgtgcaggtccgcgagatggtcaagctgctcttcagcgaagatcagcaggggggtagcctggagcagctgctgcagcggttcagctcccagtttgtgagcaagggggacttgcagactatgttgcgagaccttcagctgcagatcctccggaacgtgacgcaccacgtttcagtcactaagcagctgcctacttccgaagcagtcgtctctgcagtctcagaagcaggggcatcggggatcacagaggcacaagccagagctattgtcaactccgccctcaagctctattcccaagataaaacaggtatggtggatttcgctctcgagagcggcggaggctctatactgtcaaccagatgttcagaaacatacgaaacaaagaccgcgttgatgagccttttcggcatcccgctctggtatttttcccagtcccctagggtggtgattcaacctgacatttatcccggtaactgctgggccttcaagggcagccaggggtaccttgtggtgaggctgtctatgatgatccacccagccgcatttacactggagcatattcccaaaaccctgagtcctacgggcaacatcagctccgccccaaaagatttcgccgtgtatggactcgagaacgagtaccaggaggagggacagctcctgggtcagtttacatatgatcaggatggcgaaagcttgcagatgttccaggctctcaagaggccggacgatactgcttttcagattgtagagctccgtattttttcaaactggggccaccctgaatacacatgcctctaccgcttcagggtgcacggcgagccggtgaagtag

SEQ ID NO: 48888 - DNA, 2469 bp, Artificial Sequence
  derived and/or modified sequence
atggactttagcaggctgcacatgtactcgcctcctcagtgcgtcccagaaaatacagggtatacctatgctttgtcctcttcttattcctcagacgccctggattttgagacagaacataagctggaccccgtgttcgattcgccgagaatgtcacggaggtcactccggctggcaacgacggcttgtactcttggagatggagaagcagtgggggctgattcaggaacctcctctgccgtcagcctgaaaaaccgggcagctaggacaacaaagcaaaggcgctccacaaacaaaagcgctttttctatcaatcacgtgtcacggcaggtgacatcatccggggtctcccatggtggaacagttagtttacaggacgccgtgacgcgccgacctccagtgctggatgaaagctggatacgggaacagacaaccgtcgatcacttttggggcttggatgatgatggcgatctgaaggggggaaacaaggccgctattcaggggaatggtgatgtcggtgcggctgccgcaactgctcataacgggttctcatgttcgaactgttctatgctgagcgaacgaaaggacgtcttaacggctcacccagcagctcctggcccagtatccagagtttactcacgggacaggaaccagaagtgcgacgattgcaagggtaagcgacatttagacgcccataccgccgctcatagccagagcccgaggttgccaggcagagcaggaactttgtggcacatctgggcctgcgccggatactttctcctacagatactgcgacggatcggcgcagtgggccaagctgtgagccgcaccgcttggagtgccctgtggttggccgttgtcgcacccggtaaagccgcaagtggtgtgttctggtggctgggcatcggctggtaccagtttgtgacactgatctcctggctcaacgtattcctgctaactaggtgcttgcgcaacatttgcaaattcctagtcctgttgattcctctgtttctccttttggctgggttatcactgcggggacagggcaactttttttcattcctgcctgtactgaattgggcctccatgcaccgtacccaaagagttgatgatccccaggacgtgttcaaacctaccacttctagactgaagcaacccctccagggggacagcgaagcattcccatggcactggatgtctggagtggagcagcaagttgcatccttatctgggcaatgtcatcaccacggcgagaatttgagagaactgaccaccctgcttcagaaactccaagcacgggtggatcagatggagggcggagccgctgggcctagtgcctctgtcagggatgccgttggccaacccccaagggagacagacttcatggcattccatcaggaacatgaagttcgtatgtcccacttggaagacatcctggggaaattgcgtgagaagagcgaagctatccagaaagagctggaacagacaaagcagaagacgatcagcgctgtaggcgagcagctactccctaccgtggaacacctgcaactggagctagatcaactgaagtcggagttgagcagctggcgccatgtgaagacaggctgtgagactgtggacgctgtgcaggaaagagtagacgtccaggttcgggagatggtcaagctcctgttttccgaggatcaacagggcggaagcctcgagcagctgttacagaggtttagcagccagtttgtgagcaaaggggatctgcagacaatgttgcgcgatctgcagctgcagattctcaggaatgttacgcaccacgtttccgtcacgaaacagttgcctacttccgaggcagtggtgtctgccgtctctgaagcaggcgcatcgggcatcactgaggctcaagccagggccatcgtgaactccgctctaaaactttattcacaggacaagactggaatggttgacttcgccttggagtccgggggaggatcgatcctcagcactcggtgcagtgaaacctacgagactaaaacagctttgatgtcactgtttggcattcccctctggtacttttcccagtctcccagagtagtgatccagcccgacatttaccccggaaactgctgggcctttaagggaagtcaagggtatctggttgtaagactttccatgatgatccatcccgctgcttttaccctggagcatataccaaagacgttaagtcctactggtaatattagttcagccccaaaagatttcgcagtgtacgggctggaaaacgaatatcaggaggagggacagttactggggcaattcacctatgatcaagacggtgaaagcctccaaatgttccaggctctcaaaaggccggatgacaccgccttccaaatagttgaactccgcatattcagtaattgggggcatcccgagtacacatgcctgtacaggtttagggtgcacggagagccagtgaagtag

SEQ ID NO: 48889 - DNA, 2925 bp, Artificial Sequence
  derived and/or modified sequence
atgggtgacgtcagaaaagctaaggaagcccttgcagaggttcagatccctcctcctgacgctggcccatcccccagatgtaagcccccacctgctgaaaggctgctgggacctggcagaagacgccgaggacttagacgcagacgggaagctgtgtggttcgaagtggttaatatggacttcagtcgattgcatatgtacagcccacctcagtgcgtccctgaaaatactggctatacgtacgcactgtcctcttcatactctagcgacgcgctggacttcgaaaccgagcataagctggacccagtgttcgatagccccaggatgagcagaaggtctctccgcctggctactacagcatgtaccctcggtgatggagaggcggtgggtgcagatagcggtacatcttctgcagtgtctcttaaaaaccgagctgcccgaacaaccaagcaaaggcggtccacaaataaatctgccttctcaatcaaccacgtatcacgccaggtgacttcatccggcgtgagccacggcggaacagtatcactgcaggatgcagtcactagacggcctcctgttttggacgagagctggattcgggaacagaccaccgtggaccacttttggggcctggacgatgacggcgaccttaaggggggtaacaaagctgccattcagggaaatggggacgttggggcagccgcagccaccgcccacaatggcttctcctgcagcaattgcagcatgctctcggaaagaaaagatgtcctcacagctcaccctgcagctccgggtccagtgtcgagagtttactcacgcgatcgcaaccagaagtgtggagcatccttctacgttaatcgcatcctttggctggccaggtacaccgcttcctcattctcgtctttcctggtccaactgttccaggttgttttgatgaagctttcctacgagtcagagaattataagctgaagactcacgaatcaaaagactgcgaatctgagagctataaatctaagagccatgaaagcaaggctcacgcttcctactacgggagaatgaacgtgcgcgaggtcctgagggaagatggtcatttatccgtcaacggcgaggcactctgcgacgattgcaagggaaagaggcacctcgacgcccataccgccgcacattcacagtcaccgcgactacctgggagggccggtaccctgtggcacatatgggcatgtgcaggctatttccttctgcagattttaagacggataggcgcagttggccaggccgtgtcccggactgcctggtcagccctatggcttgcggtcgttgcccctggaaaggctgcttctggtgtcttttggtggctgggtattggttggtatcagttcgtgacgctgatctcctggctaaacgtgttcctgctgacccgctgtttgcgtaacatttgcaaattcctcgtgttgctaatccctctgttcctactactggccggactcagtttaagggggcagggtaatttcttctcttttcttcctgtcctcaactgggcctctatgcaccggacacagcgcgtggacgatccgcaggacgtcttcaagccaacaacttcccggctgaagcagcctctgcagggcgactcggaagcattcccttggcattggatgagcggagtggagcagcaagtggcaagcctgtcagggcagtgtcatcaccacggagagaatctgcgtgagttaacaactctcctgcagaagctccaggctagagtggaccaaatggagggaggagctgccggtccatccgcatccgtacgggacgctgtaggccaaccccctagggaaacggactttatggcttttcatcaggagcacgaagtgaggatgtctcatctcgaggacatcttgggaaagctgcgcgagaaatcggaagcaattcaaaaagagctagaacaaaccaagcaaaagactattagcgctgtgggggagcagttgttgccaacagtggagcacctccagcttgagcttgatcagctgaaaagtgaattgtccagctggaggcacgtgaagactggatgtgagacagtggacgccgttcaggagcgagtggatgtccaggttagagagatggtgaagcttctcttctcagaggatcagcagggtggatcactggagcagcttctgcaaagattcagcagtcagtttgtgagcaaaggagacttgcagaccatgctgagggacctacagctgcagatattgaggaatgtcacccaccacgtatccgttaccaaacagctgccaacttctgaggcagttgtttcagcggtgtctgaggccggtgcgtctggcataacagaagcacaggccagagccatcgtcaacagcgccctgaagttatacagccaggacaagacaggcatggtcgactttgcattggagtcgggagggggaagtatactttccactagatgctcagagacctacgaaaccaaaactgctttaatgtcattgttcgggatccctctgtggtacttctcccaatctcccagggtcgtaatccagccagacatctaccctggtaattgctgggcgtttaagggttctcagggatacctggttgtgcggctctcaatgatgattcacccagccgcttttacattggagcatattcctaagaccctcagtcctaccgggaacataagctctgccccaaaggatttcgcagtgtacgggctcgagaacgagtatcaggaagagggccaactgctggggcaatttacttatgatcaggatggagagagtctgcagatgttccaggcccttaaacgacctgatgatacggcatttcagattgttgagctacgcatattttccaactggggacatccagaatatacctgtctttacaggttccgagttcacggcgaacccgtgaaatag

SEQ ID NO: 48890 - DNA, 4048 bp, Artificial Sequence
  derived and/or modified sequence
tatggtttgaagtggtgaacatggatttttctcggcttcacatgtacagtcctccccagtgtgtgccggagaacacgggctacacgtatgcgctcagttccagctattcttcagatgctctggattttgagacggagcacaaattggaccctgtatttgattctccacggatgtcccgccgtagtttgcgcctggccacgacagcatgcaccctgggggatggtgaggctgtgggtgccgacagcggcaccagcagcgctgtctccctgaagaaccgagcggccagaacaacaaaacagcgcagaagcacaaacaaatcagcttttagtatcaaccacgtgtcaaggcaggtcacgtcctctggcgtcagccacggcggcactgtcagcctgcaggatgctgtgactcgacggcctcctgtattggacgagtcttggattcgtgaacagaccacagtggaccacttctggggtcttgatgatgatggtgatcttaaaggtggaaataaagctgccattcagggaaacggggatgtgggagccgccgccgccaccgcgcacaacggcttctcctgcagcaactgcagcatgctgtccgagcgcaaggacgtgctcacggcgcaccccgcggcccccgggcccgtgtcgagagtttattctagggacaggaatcaaaaatgcgacgactgtaagggcaagaggcacctcgacgcgcaccccggtcgggcagggaccctctggcacatctgggcatgtgcaggttacttcttgctgcagattctgcgcaggatcggagctgtgggccaggctgtgtccaggacggcgtggtcggccctttggctggccgtggttgctccagggaaggcagcctctggagtgttctggtggctggggattggatggtaccagtttgttactttgatttcttggctgaatgtgtttcttcttaccaggtgccttcgaaacatctgcaagtttttagtcttgctcatcccactcttccttttactagcaggtctctccttacggggccagggcaatttcttttcgttcttgcccgtgttgaactgggcaagcatgcatagaacacagcgggtggatgacccccaggacgtgtttaaacccacgacttctcgcctgaagcagcctctgcagggtgacagtgaggcttttccgtggcattggatgagtggcgtggagcagcaggtggcctctctgtctggacagtgccaccaccatggtgagaatctccgagagctgaccactttgctacagaagctgcaggctcgggtggaccagatggaaggcggcgctgccgggccgtcagcttcggtcagagacgctgtgggacagcccccgagggagactgactttatggcctttcaccaagaacatgaagtgcgtatgtcacacttggaagatattctgggaaaactgagagaaaaatctgaggccatccagaaggaactagaacagaccaagcaaaaaacaatcagtgcggttggtgagcagctcctgcccacagtcgagcacctccagctggagctggatcagctaaagtcagagctgtccagctggcgacacgtgaagaccggctgtgagacagtggatgccgtacaagaaagagtggacgtgcaagtcagagaaatggtgaaactcctgttttccgaagatcagcaaggcggttctctggaacagctgctgcagaggttctcatcacagtttgtgagcaaaggcgacttgcagacgatgctgcgagacctgcagctgcagatcctgcggaacgtcacccaccacgtttccgtgaccaagcagctcccaacctcagaagccgtggtgtctgctgtgagcgaggcgggggcgtctggaataacagaggcgcaagcacgtgccatcgtgaacagcgccttgaagctgtattcccaagataagaccgggatggtggactttgctctggaatctggtggtggcagcatcttgagtactcgctgttctgaaacttacgaaaccaaaacggcgctgatgagtctgtttgggatcccgctgtggtacttctcgcagtccccgcgcgtggtcatccagcctgacatttaccccggtaactgctgggcatttaaaggctcccaggggtacctggtggtgaggctctccatgatgatccacccagccgccttcactctggagcacatccctaagacgctgtcgccaacaggcaacatcagcagcgcccccaaggacttcgccgtctatggattagaaaatgagtatcaggaagaagggcagcttctgggacagttcacgtatgatcaggatggggagtcgctccagatgttccaggccctgaaaagacccgacgacacagctttccaaatagtggaacttcggattttttctaactggggccatcctgagtatacctgtctgtatcggttcagagttcatggcgaacctgtcaagtgaagacactactcattatttttgtacatttttgtatatactgggacagcgtgaaacactggaatccttcatggacgagggcatatacaatgatgggacagtgccacactccttcaataaacgtggctgctggccagaggacgtgagcgtgtgacgggcgccttggcgccacctgttgggtgctcactgcctctgcaggtgcagaggggtcagcagcaggagaagcgtgttgaacacgtggctctcagacactccttgtttttaacgggaagctctttgcatttgcatttcctcaacaaaggagcaaagcagaggaagctgagagtctggcgtgttcttgacgctttggtcttcagccttgcactggctcttctaaaggacttttggagggcagataatttcatctgttaaatccaacacacatttctttcagggaaaaacaatgtcaccaaattttcagagttctaaactcctttccttcaagccggaattttccttttttcagcaccagtaggtactaagtctccagatggggaaataactaaaatgtgtttttctgctttgttcgctcttacttctgaggaaggtttccagtcaggactcgctgtaccaatatccatggaggaatatgggagcgtttcgctctccttgtaggctgaagtcagtctgacttgaaggggcctggtttggatctaagcaaacacccagatggggttctctggtctcagcaaggcttttcctgttgggagtcacagtaaacagaaacccaaaaatctcatcttgggtgttttcagggcttgttttgagttttgctgaatagggagcgcaagacgccctgagcctccctctcactggtggtgataagaggagccgtctggtgtgtcagggtcacgaacccgttacatttcaggacgatcctttttccttcagcagcatttcttactggctgtggctggaatctgccttttatcacagctgtcaccattctcacgtgattcttgtgagactctttttggttataattactatttaatatttagactattttactgagcagactttataaatgagatatctacaaggcacttaaagtgttacagatgttttaccttaagaattatttaagttgtgttgggttaagacagttttcagtgtaccgtaaatgttgtgttttcagaaaaagacaaaacgatggtgctgactggttttctgtatattgcacaacagtcctcaaatacactgatgtatgaaactattcatacatcaagcagcatttttttcactctccttagaattggaactatgcagttaaggcagataaaatgtacagatgtttcatatattacaggttacatatataaatcaaaatttcctatataaaactgatttgggatttggggtggaaatattttgaatattaatttatttttaaagatgcaagataggactttgtgcaatgtatttttgtaaatgcttttcaaaatatctgtctttggtagtgcttctgctgctgccaccaaattgataagatgctattaagaggtttaaataaagagttttaatttttaaaagggcatgggatataaacagtc

SEQ ID NO: 48891 - DNA, 3812 bp, Artificial Sequence
  derived and/or modified sequence
agagcgtcttctcgggcctgggcggcgcagacgaggcctgaggcggcggcgcgaggcagttccagctattcttcagatgctctggattttgagacggagcacaaattggaccctgtatttgattctccacggatgtcccgccgtagtttgcgcctggccacgacagcatgcaccctgggggatggtgaggctgtgggtgccgacagcggcaccagcagcgctgtctccctgaagaaccgagcggccagaacaacaaaacagcgcagaagcacaaacaaatcagcttttagtatcaaccacgtgtcaaggcaggtcacgtcctctggcgtcagccacggcggcactgtcagcctgcaggatgctgtgactcgacggcctcctgtattggacgagtcttggattcgtgaacagaccacagtggaccacttctggggtcttgatgatgatggtgatcttaaaggtggaaataaagctgccattcagggaaacggggatgtgggagccgccgccgccaccgcgcacaacggcttctcctgcagcaactgcagcatgctgtccgagcgcaaggacgtgctcacggcgcaccccgcggcccccgggcccgtgtcgagagtttattctagggacaggaatcaaaaatggaaggcagcctctggagtgttctggtggctggggattggatggtaccagtttgttactttgatttcttggctgaatgtgtttcttcttaccaggtgccttcgaaacatctgcaagtttttagtcttgctcatcccactcttccttttactagcaggtctctccttacggggccagggcaatttcttttcgttcttgcccgtgttgaactgggcaagcatgcatagaacacagcgggtggatgacccccaggacgtgtttaaacccacgacttctcgcctgaagcagcctctgcagggtgacagtgaggcttttccgtggcattggatgagtggcgtggagcagcaggtggcctctctgtctggacagtgccaccaccatggtgagaatctccgagagctgaccactttgctacagaagctgcaggctcgggtggaccagatggaaggcggcgctgccgggccgtcagcttcggtcagagacgctgtgggacagcccccgagggagactgactttatggcctttcaccaagaacatgaagtgcgtatgtcacacttggaagatattctgggaaaactgagagaaaaatctgaggccatccagaaggaactagaacagaccaagcaaaaaacaatcagtgcggttggtgagcagctcctgcccacagtcgagcacctccagctggagctggatcagctaaagtcagagctgtccagctggcgacacgtgaagaccggctgtgagacagtggatgccgtacaagaaagagtggacgtgcaagtcagagaaatggtgaaactcctgttttccgaagatcagcaaggcggttctctggaacagctgctgcagaggttctcatcacagtttgtgagcaaaggcgacttgcagacgatgctgcgagacctgcagctgcagatcctgcggaacgtcacccaccacgtttccgtgaccaagcagctcccaacctcagaagccgtggtgtctgctgtgagcgaggcgggggcgtctggaataacagaggcgcaagcacgtgccatcgtgaacagcgccttgaagctgtattcccaagataagaccgggatggtggactttgctctggaatctggtggtggcagcatcttgagtactcgctgttctgaaacttacgaaaccaaaacggcgctgatgagtctgtttgggatcccgctgtggtacttctcgcagtccccgcgcgtggtcatccagcctgacatttaccccggtaactgctgggcatttaaaggctcccaggggtacctggtggtgaggctctccatgatgatccacccagccgccttcactctggagcacatccctaagacgctgtcgccaacaggcaacatcagcagcgcccccaaggacttcgccgtctatggattagaaaatgagtatcaggaagaagggcagcttctgggacagttcacgtatgatcaggatggggagtcgctccagatgttccaggccctgaaaagacccgacgacacagctttccaaatagtggaacttcggattttttctaactggggccatcctgagtatacctgtctgtatcggttcagagttcatggcgaacctgtcaagtgaagacactactcattatttttgtacatttttgtatatactgggacagcgtgaaacactggaatccttcatggacgagggcatatacaatgatgggacagtgccacactccttcaataaacgtggctgctggccagaggacgtgagcgtgtgacgggcgccttggcgccacctgttgggtgctcactgcctctgcaggtgcagaggggtcagcagcaggagaagcgtgttgaacacgtggctctcagacactccttgtttttaacgggaagctctttgcatttgcatttcctcaacaaaggagcaaagcagaggaagctgagagtctggcgtgttcttgacgctttggtcttcagccttgcactggctcttctaaaggacttttggagggcagataatttcatctgttaaatccaacacacatttctttcagggaaaaacaatgtcaccaaattttcagagttctaaactcctttccttcaagccggaattttccttttttcagcaccagtaggtactaagtctccagatggggaaataactaaaatgtgtttttctgctttgttcgctcttacttctgaggaaggtttccagtcaggactcgctgtaccaatatccatggaggaatatgggagcgtttcgctctccttgtaggctgaagtcagtctgacttgaaggggcctggtttggatctaagcaaacacccagatggggttctctggtctcagcaaggcttttcctgttgggagtcacagtaaacagaaacccaaaaatctcatcttgggtgttttcagggcttgttttgagttttgctgaatagggagcgcaagacgccctgagcctccctctcactggtggtgataagaggagccgtctggtgtgtcagggtcacgaacccgttacatttcaggacgatcctttttccttcagcagcatttcttactggctgtggctggaatctgccttttatcacagctgtcaccattctcacgtgattcttgtgagactctttttggttataattactatttaatatttagactattttactgagcagactttataaatgagatatctacaaggcacttaaagtgttacagatgttttaccttaagaattatttaagttgtgttgggttaagacagttttcagtgtaccgtaaatgttgtgttttcagaaaaagacaaaacgatggtgctgactggttttctgtatattgcacaacagtcctcaaatacactgatgtatgaaactattcatacatcaagcagcatttttttcactctccttagaattggaactatgcagttaaggcagataaaatgtacagatgtttcatatattacaggttacatatataaatcaaaatttcctatataaaactgatttgggatttggggtggaaatattttgaatattaatttatttttaaagatgcaagataggactttgtgcaatgtatttttgtaaatgcttttcaaaatatctgtctttggtagtgcttctgctgctgccaccaaattgataagatgctattaagaggtttaaataaagagttttaatttttaaaaggg

SEQ ID NO: 48892 - DNA, 3953 bp, Artificial Sequence
  derived and/or modified sequence
gcagtatggtttgaagtggtgaacatggatttttctcggcttcacatgtacagtcctccccagtgtgtgccggagaacacgggctacacgtatgcgctcagttccagctattcttcagatgctctggattttgagacggagcacaaattggaccctgtatttgattctccacggatgtcccgccgtagtttgcgcctggccacgacagcatgcaccctgggggatggtgaggctgtgggtgccgacagcggcaccagcagcgctgtctccctgaagaaccgagcggccagaacaacaaaacagcgcagaagcacaaacaaatcagcttttagtatcaaccacgtgtcaaggcaggtcacgtcctctggcgtcagccacggcggcactgtcagcctgcaggatgctgtgactcgacggcctcctgtattggacgagtcttggattcgtgaacagaccacagtggaccacttctggggtcttgatgatgatggtgatcttaaaggtggaaataaagctgccattcagggaaacggggatgtgggagccgccgccgccaccgcgcacaacggcttctcctgcagcaactgcagcatgctgtccgagcgcaaggacgtgctcacggcgcaccccgcggcccccgggcccgtgtcgagagtttattctagggacaggaatcaaaaatgttacttcttgctgcagattctgcgcaggatcggagctgtgggccaggctgtgtccaggacggcgtggtcggccctttggctggccgtggttgctccagggaaggcagcctctggagtgttctggtggctggggattggatggtaccagtttgttactttgatttcttggctgaatgtgtttcttcttaccaggtgccttcgaaacatctgcaagtttttagtcttgctcatcccactcttccttttactagcaggtctctccttacggggccagggcaatttcttttcgttcttgcccgtgttgaactgggcaagcatgcatagaacacagcgggtggatgacccccaggacgtgtttaaacccacgacttctcgcctgaagcagcctctgcagggtgacagtgaggcttttccgtggcattggatgagtggcgtggagcagcaggtggcctctctgtctggacagtgccaccaccatggtgagaatctccgagagctgaccactttgctacagaagctgcaggctcgggtggaccagatggaaggcggcgctgccgggccgtcagcttcggtcagagacgctgtgggacagcccccgagggagactgactttatggcctttcaccaagaacatgaagtgcgtatgtcacacttggaagatattctgggaaaactgagagaaaaatctgaggccatccagaaggaactagaacagaccaagcaaaaaacaatcagtgcggttggtgagcagctcctgcccacagtcgagcacctccagctggagctggatcagctaaagtcagagctgtccagctggcgacacgtgaagaccggctgtgagacagtggatgccgtacaagaaagagtggacgtgcaagtcagagaaatggtgaaactcctgttttccgaagatcagcaaggcggttctctggaacagctgctgcagaggttctcatcacagtttgtgagcaaaggcgacttgcagacgatgctgcgagacctgcagctgcagatcctgcggaacgtcacccaccacgtttccgtgaccaagcagctcccaacctcagaagccgtggtgtctgctgtgagcgaggcgggggcgtctggaataacagaggcgcaagcacgtgccatcgtgaacagcgccttgaagctgtattcccaagataagaccgggatggtggactttgctctggaatctggtggtggcagcatcttgagtactcgctgttctgaaacttacgaaaccaaaacggcgctgatgagtctgtttgggatcccgctgtggtacttctcgcagtccccgcgcgtggtcatccagcctgacatttaccccggtaactgctgggcatttaaaggctcccaggggtacctggtggtgaggctctccatgatgatccacccagccgccttcactctggagcacatccctaagacgctgtcgccaacaggcaacatcagcagcgcccccaaggacttcgccgtctatggattagaaaatgagtatcaggaagaagggcagcttctgggacagttcacgtatgatcaggatggggagtcgctccagatgttccaggccctgaaaagacccgacgacacagctttccaaatagtggaacttcggattttttctaactggggccatcctgagtatacctgtctgtatcggttcagagttcatggcgaacctgtcaagtgaagacactactcattatttttgtacatttttgtatatactgggacagcgtgaaacactggaatccttcatggacgagggcatatacaatgatgggacagtgccacactccttcaataaacgtggctgctggccagaggacgtgagcgtgtgacgggcgccttggcgccacctgttgggtgctcactgcctctgcaggtgcagaggggtcagcagcaggagaagcgtgttgaacacgtggctctcagacactccttgtttttaacgggaagctctttgcatttgcatttcctcaacaaaggagcaaagcagaggaagctgagagtctggcgtgttcttgacgctttggtcttcagccttgcactggctcttctaaaggacttttggagggcagataatttcatctgttaaatccaacacacatttctttcagggaaaaacaatgtcaccaaattttcagagttctaaactcctttccttcaagccggaattttccttttttcagcaccagtaggtactaagtctccagatggggaaataactaaaatgtgtttttctgctttgttcgctcttacttctgaggaaggtttccagtcaggactcgctgtaccaatatccatggaggaatatgggagcgtttcgctctccttgtaggctgaagtcagtctgacttgaaggggcctggtttggatctaagcaaacacccagatggggttctctggtctcagcaaggcttttcctgttgggagtcacagtaaacagaaacccaaaaatctcatcttgggtgttttcagggcttgttttgagttttgctgaatagggagcgcaagacgccctgagcctccctctcactggtggtgataagaggagccgtctggtgtgtcagggtcacgaacccgttacatttcaggacgatcctttttccttcagcagcatttcttactggctgtggctggaatctgccttttatcacagctgtcaccattctcacgtgattcttgtgagactctttttggttataattactatttaatatttagactattttactgagcagactttataaatgagatatctacaaggcacttaaagtgttacagatgttttaccttaagaattatttaagttgtgttgggttaagacagttttcagtgtaccgtaaatgttgtgttttcagaaaaagacaaaacgatggtgctgactggttttctgtatattgcacaacagtcctcaaatacactgatgtatgaaactattcatacatcaagcagcatttttttcactctccttagaattggaactatgcagttaaggcagataaaatgtacagatgtttcatatattacaggttacatatataaatcaaaatttcctatataaaactgatttgggatttggggtggaaatattttgaatattaatttatttttaaagatgcaagataggactttgtgcaatgtatttttgtaaatgcttttcaaaatatctgtctttggtagtgcttctgctgctgccaccaaattgataagatgctattaagaggtttaaataaagagttttaatttttaaaaggg

SEQ ID NO: 48893 - DNA, 4062 bp, Artificial Sequence
  derived and/or modified sequence
gcagtatggtttgaagtggtgaacatggatttttctcggcttcacatgtacagtcctccccagtgtgtgccggagaacacgggctacacgtatgcgctcagttccagctattcttcagatgctctggattttgagacggagcacaaattggaccctgtatttgattctccacggatgtcccgccgtagtttgcgcctggccacgacagcatgcaccctgggggatggtgaggctgtgggtgccgacagcggcaccagcagcgctgtctccctgaagaaccgagcggccagaacaacaaaacagcgcagaagcacaaacaaatcagcttttagtatcaaccacgtgtcaaggcaggtcacgtcctctggcgtcagccacggcggcactgtcagcctgcaggatgctgtgactcgacggcctcctgtattggacgagtcttggattcgtgaacagaccacagtggaccacttctggggtcttgatgatgatggtgatcttaaaggtggaaataaagctgccattcagggaaacggggatgtgggagccgccgccgccaccgcgcacaacggcttctcctgcagcaactgcagcatgctgtccgagcgcaaggacgtgctcacggcgcaccccgcggcccccgggcccgtgtcgagagtttattctagggacaggaatcaaaaatgcgacgactgtaagggcaagaggcacctcgacgcgcacacagccgcccactcgcagtcgccacggctgcccggtcgggcagggaccctctggcacatctgggcatgtgcaggttacttcttgctgcagattctgcgcaggatcggagctgtgggccaggctgtgtccaggacggcgtggtcggccctttggctggccgtggttgctccagggaaggcagcctctggagtgttctggtggctggggattggatggtaccagtttgttactttgatttcttggctgaatgtgtttcttcttaccaggtgccttcgaaacatctgcaagtttttagtcttgctcatcccactcttccttttactagcaggtctctccttacggggccagggcaatttcttttcgttcttgcccgtgttgaactgggcaagcatgcatagaacacagcgggtggatgacccccaggacgtgtttaaacccacgacttctcgcctgaagcagcctctgcagggtgacagtgaggcttttccgtggcattggatgagtggcgtggagcagcaggtggcctctctgtctggacagtgccaccaccatggtgagaatctccgagagctgaccactttgctacagaagctgcaggctcgggtggaccagatggaaggcggcgctgccgggccgtcagcttcggtcagagacgctgtgggacagcccccgagggagactgactttatggcctttcaccaagaacatgaagtgcgtatgtcacacttggaagatattctgggaaaactgagagaaaaatctgaggccatccagaaggaactagaacagaccaagcaaaaaacaatcagtgcggttggtgagcagctcctgcccacagtcgagcacctccagctggagctggatcagctaaagtcagagctgtccagctggcgacacgtgaagaccggctgtgagacagtggatgccgtacaagaaagagtggacgtgcaagtcagagaaatggtgaaactcctgttttccgaagatcagcaaggcggttctctggaacagctgctgcagaggttctcatcacagtttgtgagcaaaggcgacttgcagacgatgctgcgagacctgcagctgcagatcctgcggaacgtcacccaccacgtttccgtgaccaagcagctcccaacctcagaagccgtggtgtctgctgtgagcgaggcgggggcgtctggaataacagaggcgcaagcacgtgccatcgtgaacagcgccttgaagctgtattcccaagataagaccgggatggtggactttgctctggaatctggtggtggcagcatcttgagtactcgctgttctgaaacttacgaaaccaaaacggcgctgatgagtctgtttgggatcccgctgtggtacttctcgcagtccccgcgcgtggtcatccagcctgacatttaccccggtaactgctgggcatttaaaggctcccaggggtacctggtggtgaggctctccatgatgatccacccagccgccttcactctggagcacatccctaagacgctgtcgccaacaggcaacatcagcagcgcccccaaggacttcgccgtctatggattagaaaatgagtatcaggaagaagggcagcttctgggacagttcacgtatgatcaggatggggagtcgctccagatgttccaggccctgaaaagacccgacgacacagctttccaaatagtggaacttcggattttttctaactggggccatcctgagtatacctgtctgtatcggttcagagttcatggcgaacctgtcaagtgaagacactactcattatttttgtacatttttgtatatactgggacagcgtgaaacactggaatccttcatggacgagggcatatacaatgatgggacagtgccacactccttcaataaacgtggctgctggccagaggacgtgagcgtgtgacgggcgccttggcgccacctgttgggtgctcactgcctctgcaggtgcagaggggtcagcagcaggagaagcgtgttgaacacgtggctctcagacactccttgtttttaacgggaagctctttgcatttgcatttcctcaacaaaggagcaaagcagaggaagctgagagtctggcgtgttcttgacgctttggtcttcagccttgcactggctcttctaaaggacttttggagggcagataatttcatctgttaaatccaacacacatttctttcagggaaaaacaatgtcaccaaattttcagagttctaaactcctttccttcaagccggaattttccttttttcagcaccagtaggtactaagtctccagatggggaaataactaaaatgtgtttttctgctttgttcgctcttacttctgaggaaggtttccagtcaggactcgctgtaccaatatccatggaggaatatgggagcgtttcgctctccttgtaggctgaagtcagtctgacttgaaggggcctggtttggatctaagcaaacacccagatggggttctctggtctcagcaaggcttttcctgttgggagtcacagtaaacagaaacccaaaaatctcatcttgggtgttttcagggcttgttttgagttttgctgaatagggagcgcaagacgccctgagcctccctctcactggtggtgataagaggagccgtctggtgtgtcagggtcacgaacccgttacatttcaggacgatcctttttccttcagcagcatttcttactggctgtggctggaatctgccttttatcacagctgtcaccattctcacgtgattcttgtgagactctttttggttataattactatttaatatttagactattttactgagcagactttataaatgagatatctacaaggcacttaaagtgttacagatgttttaccttaagaattatttaagttgtgttgggttaagacagttttcagtgtaccgtaaatgttgtgttttcagaaaaagacaaaacgatggtgctgactggttttctgtatattgcacaacagtcctcaaatacactgatgtatgaaactattcatacatcaagcagcatttttttcactctccttagaattggaactatgcagttaaggcagataaaatgtacagatgtttcatatattacaggttacatatataaatcaaaatttcctatataaaactgatttgggatttggggtggaaatattttgaatattaatttatttttaaagatgcaagataggactttgtgcaatgtatttttgtaaatgcttttcaaaatatctgtctttggtagtgcttctgctgctgccaccaaattgataagatgctattaagaggtttaaataaagagttttaatttttaaaag

SEQ ID NO: 48894 - DNA, 3868 bp, Artificial Sequence
  derived and/or modified sequence
tatggtttgaagtggtgaacatggatttttctcggcttcacatgtacagtcctccccagtgtgtgccggagaacacgggctacacgtatgcgctcagttccagctattcttcagatgctctggattttgagacggagcacaaattggaccctgtatttgattctccacggatgtcccgccgtagtttgcgcctggccacgacagcatgcaccctgggggatggtgaggctgtgggtgccgacagcggcaccagcagcgctgtctccctgaagaaccgagcggccagaacaacaaaacagcgcagaagcacaaacaaatcagcttttagtatcaaccacgtgtcaaggcaggtcacgtcctctggcgtcagccacggcggcactgtcagcctgcaggatgctgtgactcgacggcctcctgtattggacgagtcttggattcgtgaacagaccacagtggaccacttctggggtcttgatgatgatggtgatcttaaaggtggaaataaagctgccattcagggaaacggggatgtgggagccgccgccgccaccgcgcacaacggcttctcctgcagcaactgcagcatgctgtccgagcgcaaggacgtgctcacggcgcaccccgcggcccccgggcccgtgtcgagagtttattctagggacaggaatcaaaaatggaaggcagcctctggagtgttctggtggctggggattggatggtaccagtttgttactttgatttcttggctgaatgtgtttcttcttaccaggtgccttcgaaacatctgcaagtttttagtcttgctcatcccactcttccttttactagcaggtctctccttacggggccagggcaatttcttttcgttcttgcccgtgttgaactgggcaagcatgcatagaacacagcgggtggatgacccccaggacgtgtttaaacccacgacttctcgcctgaagcagcctctgcagggtgacagtgaggcttttccgtggcattggatgagtggcgtggagcagcaggtggcctctctgtctggacagtgccaccaccatggtgagaatctccgagagctgaccactttgctacagaagctgcaggctcgggtggaccagatggaaggcggcgctgccgggccgtcagcttcggtcagagacgctgtgggacagcccccgagggagactgactttatggcctttcaccaagaacatgaagtgcgtatgtcacacttggaagatattctgggaaaactgagagaaaaatctgaggccatccagaaggaactagaacagaccaagcaaaaaacaatcagtgcggttggtgagcagctcctgcccacagtcgagcacctccagctggagctggatcagctaaagtcagagctgtccagctggcgacacgtgaagaccggctgtgagacagtggatgccgtacaagaaagagtggacgtgcaagtcagagaaatggtgaaactcctgttttccgaagatcagcaaggcggttctctggaacagctgctgcagaggttctcatcacagtttgtgagcaaaggcgacttgcagacgatgctgcgagacctgcagctgcagatcctgcggaacgtcacccaccacgtttccgtgaccaagcagctcccaacctcagaagccgtggtgtctgctgtgagcgaggcgggggcgtctggaataacagaggcgcaagcacgtgccatcgtgaacagcgccttgaagctgtattcccaagataagaccgggatggtggactttgctctggaatctggtggtggcagcatcttgagtactcgctgttctgaaacttacgaaaccaaaacggcgctgatgagtctgtttgggatcccgctgtggtacttctcgcagtccccgcgcgtggtcatccagcctgacatttaccccggtaactgctgggcatttaaaggctcccaggggtacctggtggtgaggctctccatgatgatccacccagccgccttcactctggagcacatccctaagacgctgtcgccaacaggcaacatcagcagcgcccccaaggacttcgccgtctatggattagaaaatgagtatcaggaagaagggcagcttctgggacagttcacgtatgatcaggatggggagtcgctccagatgttccaggccctgaaaagacccgacgacacagctttccaaatagtggaacttcggattttttctaactggggccatcctgagtatacctgtctgtatcggttcagagttcatggcgaacctgtcaagtgaagacactactcattatttttgtacatttttgtatatactgggacagcgtgaaacactggaatccttcatggacgagggcatatacaatgatgggacagtgccacactccttcaataaacgtggctgctggccagaggacgtgagcgtgtgacgggcgccttggcgccacctgttgggtgctcactgcctctgcaggtgcagaggggtcagcagcaggagaagcgtgttgaacacgtggctctcagacactccttgtttttaacgggaagctctttgcatttgcatttcctcaacaaaggagcaaagcagaggaagctgagagtctggcgtgttcttgacgctttggtcttcagccttgcactggctcttctaaaggacttttggagggcagataatttcatctgttaaatccaacacacatttctttcagggaaaaacaatgtcaccaaattttcagagttctaaactcctttccttcaagccggaattttccttttttcagcaccagtaggtactaagtctccagatggggaaataactaaaatgtgtttttctgctttgttcgctcttacttctgaggaaggtttccagtcaggactcgctgtaccaatatccatggaggaatatgggagcgtttcgctctccttgtaggctgaagtcagtctgacttgaaggggcctggtttggatctaagcaaacacccagatggggttctctggtctcagcaaggcttttcctgttgggagtcacagtaaacagaaacccaaaaatctcatcttgggtgttttcagggcttgttttgagttttgctgaatagggagcgcaagacgccctgagcctccctctcactggtggtgataagaggagccgtctggtgtgtcagggtcacgaacccgttacatttcaggacgatcctttttccttcagcagcatttcttactggctgtggctggaatctgccttttatcacagctgtcaccattctcacgtgattcttgtgagactctttttggttataattactatttaatatttagactattttactgagcagactttataaatgagatatctacaaggcacttaaagtgttacagatgttttaccttaagaattatttaagttgtgttgggttaagacagttttcagtgtaccgtaaatgttgtgttttcagaaaaagacaaaacgatggtgctgactggttttctgtatattgcacaacagtcctcaaatacactgatgtatgaaactattcatacatcaagcagcatttttttcactctccttagaattggaactatgcagttaaggcagataaaatgtacagatgtttcatatattacaggttacatatataaatcaaaatttcctatataaaactgatttgggatttggggtggaaatattttgaatattaatttatttttaaagatgcaagataggactttgtgcaatgtatttttgtaaatgcttttcaaaatatctgtctttggtagtgcttctgctgctgccaccaaattgataagatgctattaagaggtttaaataaagagttttaatttttaaaagggcatgggatataaacagtc

SEQ ID NO: 48895 - DNA, 4514 bp, Artificial Sequence
  derived and/or modified sequence
atgggagacgtgcggaaggccaaggaggcactggccgaggtgcagatccctcccccagatgcgggcccctcccccagatgcaaaccccccccagcagagcgtcttctcgggcctgggcggcgcagacgaggcctgaggcggcggcgcgaggcagtatggtttgaagtggtgaacatggatttttctcggcttcacatgtacagtcctccccagtgtgtgccggagaacacgggctacacgtatgcgctcagttccagctattcttcagatgctctggattttgagacggagcacaaattggaccctgtatttgattctccacggatgtcccgccgtagtttgcgcctggccacgacagcatgcaccctgggggatggtgaggctgtgggtgccgacagcggcaccagcagcgctgtctccctgaagaaccgagcggccagaacaacaaaacagcgcagaagcacaaacaaatcagcttttagtatcaaccacgtgtcaaggcaggtcacgtcctctggcgtcagccacggcggcactgtcagcctgcaggatgctgtgactcgacggcctcctgtattggacgagtcttggattcgtgaacagaccacagtggaccacttctggggtcttgatgatgatggtgatcttaaaggtggaaataaagctgccattcagggaaacggggatgtgggagccgccgccgccaccgcgcacaacggcttctcctgcagcaactgcagcatgctgtccgagcgcaaggacgtgctcacggcgcaccccgcggcccccgggcccgtgtcgagagtttattctagggacaggaatcaaaaatgcggtgcgtctttctacgtgaataggattttgtggctggccagatacactgcatcatctttttcatcatttttagttcaactttttcaagtggttttaatgaagctcagttatgaatcagaaaattacaaattgaaaactcatgaatcaaaagattgtgaatccgaaagctataagtcaaaaagccatgaatcaaaagctcatgccagttactatgggagaatgaatgtgagagaggttctcagagaggatggccacctcagtgtaaatggggaagcgctgtgcgacgactgtaagggcaagaggcacctcgacgcgcacacagccgcccactcgcagtcgccacggctgcccggtcgggcagggaccctctggcacatctgggcatgtgcaggttacttcttgctgcagattctgcgcaggatcggagctgtgggccaggctgtgtccaggacggcgtggtcggccctttggctggccgtggttgctccagggaaggcagcctctggagtgttctggtggctggggattggatggtaccagtttgttactttgatttcttggctgaatgtgtttcttcttaccaggtgccttcgaaacatctgcaagtttttagtcttgctcatcccactcttccttttactagcaggtctctccttacggggccagggcaatttcttttcgttcttgcccgtgttgaactgggcaagcatgcatagaacacagcgggtggatgacccccaggacgtgtttaaacccacgacttctcgcctgaagcagcctctgcagggtgacagtgaggcttttccgtggcattggatgagtggcgtggagcagcaggtggcctctctgtctggacagtgccaccaccatggtgagaatctccgagagctgaccactttgctacagaagctgcaggctcgggtggaccagatggaaggcggcgctgccgggccgtcagcttcggtcagagacgctgtgggacagcccccgagggagactgactttatggcctttcaccaagaacatgaagtgcgtatgtcacacttggaagatattctgggaaaactgagagaaaaatctgaggccatccagaaggaactagaacagaccaagcaaaaaacaatcagtgcggttggtgagcagctcctgcccacagtcgagcacctccagctggagctggatcagctaaagtcagagctgtccagctggcgacacgtgaagaccggctgtgagacagtggatgccgtacaagaaagagtggacgtgcaagtcagagaaatggtgaaactcctgttttccgaagatcagcaaggcggttctctggaacagctgctgcagaggttctcatcacagtttgtgagcaaaggcgacttgcagacgatgctgcgagacctgcagctgcagatcctgcggaacgtcacccaccacgtttccgtgaccaagcagctcccaacctcagaagccgtggtgtctgctgtgagcgaggcgggggcgtctggaataacagaggcgcaagcacgtgccatcgtgaacagcgccttgaagctgtattcccaagataagaccgggatggtggactttgctctggaatctggtggtggcagcatcttgagtactcgctgttctgaaacttacgaaaccaaaacggcgctgatgagtctgtttgggatcccgctgtggtacttctcgcagtccccgcgcgtggtcatccagcctgacatttaccccggtaactgctgggcatttaaaggctcccaggggtacctggtggtgaggctctccatgatgatccacccagccgccttcactctggagcacatccctaagacgctgtcgccaacaggcaacatcagcagcgcccccaaggacttcgccgtctatggattagaaaatgagtatcaggaagaagggcagcttctgggacagttcacgtatgatcaggatggggagtcgctccagatgttccaggccctgaaaagacccgacgacacagctttccaaatagtggaacttcggattttttctaactggggccatcctgagtatacctgtctgtatcggttcagagttcatggcgaacctgtcaagtgaagacactactcattatttttgtacatttttgtatatactgggacagcgtgaaacactggaatccttcatggacgagggcatatacaatgatgggacagtgccacactccttcaataaacgtggctgctggccagaggacgtgagcgtgtgacgggcgccttggcgccacctgttgggtgctcactgcctctgcaggtgcagaggggtcagcagcaggagaagcgtgttgaacacgtggctctcagacactccttgtttttaacgggaagctctttgcatttgcatttcctcaacaaaggagcaaagcagaggaagctgagagtctggcgtgttcttgacgctttggtcttcagccttgcactggctcttctaaaggacttttggagggcagataatttcatctgttaaatccaacacacatttctttcagggaaaaacaatgtcaccaaattttcagagttctaaactcctttccttcaagccggaattttccttttttcagcaccagtaggtactaagtctccagatggggaaataactaaaatgtgtttttctgctttgttcgctcttacttctgaggaaggtttccagtcaggactcgctgtaccaatatccatggaggaatatgggagcgtttcgctctccttgtaggctgaagtcagtctgacttgaaggggcctggtttggatctaagcaaacacccagatggggttctctggtctcagcaaggcttttcctgttgggagtcacagtaaacagaaacccaaaaatctcatcttgggtgttttcagggcttgttttgagttttgctgaatagggagcgcaagacgccctgagcctccctctcactggtggtgataagaggagccgtctggtgtgtcagggtcacgaacccgttacatttcaggacgatcctttttccttcagcagcatttcttactggctgtggctggaatctgccttttatcacagctgtcaccattctcacgtgattcttgtgagactctttttggttataattactatttaatatttagactattttactgagcagactttataaatgagatatctacaaggcacttaaagtgttacagatgttttaccttaagaattatttaagttgtgttgggttaagacagttttcagtgtaccgtaaatgttgtgttttcagaaaaagacaaaacgatggtgctgactggttttctgtatattgcacaacagtcctcaaatacactgatgtatgaaactattcatacatcaagcagcatttttttcactctccttagaattggaactatgcagttaaggcagataaaatgtacagatgtttcatatattacaggttacatatataaatcaaaatttcctatataaaactgatttgggatttggggtggaaatattttgaatattaatttatttttaaagatgcaagataggactttgtgcaatgtatttttgtaaatgcttttcaaaatatctgtctttggtagtgcttctgctgctgccaccaaattgataagatgctattaagaggtttaaataaagagttttaatttttaaaagggcatgggatataaacagtc

SEQ ID NO: 48896 - protein, 386 aa, Artificial Sequence
  derived and/or modified sequence
MILGSLSRAGPLPLLRQPPIMQPPLDLKQILPFPLEPAPTLGLFSNYSTMDPVQKAVLSHTFGGPLLKTKRPVISCNICQIRFNSQSQAEAHYKGNRHARRVKGIEAAKTRGREPGVREPGDPAPPGSTPTNGDGVAPRPVSMENGLGPAPGSPEKQPGSPSPPSIPETGQGVTKGEGGTPAPASLPGGSKEEEEKAKRLLYCALCKVAVNSLSQLEAHNKGTKHKTILEARSGLGPIKAYPRLGPPTPGEPEAPAQDRTFHCEICNVKVNSEVQLKQHISSRRHRDGVAGKPNPLLSRHKKSRGAGELAGTLTFSKELPKSLAGGLLPSPLAVAAVMAAAAGSPLSLRPAPAAPLLQGPPITHPLLHPAPGPIRTAHGPILFSPY

SEQ ID NO: 48897 - DNA, 1161 bp, Artificial Sequence
  derived and/or modified sequence
atgatcctgggcagcctgagcagagccggccccctgcccctgctgagacagccccccatcatgcagccccccctggacctgaagcagatcctgcccttccccctggagcccgcccccaccctgggcctgttcagcaactacagcaccatggaccccgtgcagaaggccgtgctgagccacaccttcggcggccccctgctgaagaccaagagacccgtgatcagctgcaacatctgccagatcagattcaacagccagagccaggccgaggcccactacaagggcaacagacacgccagaagagtgaagggcatcgaggccgccaagaccagaggcagagagcccggcgtgagagagcccggcgaccccgccccccccggcagcacccccaccaacggcgacggcgtggcccccagacccgtgagcatggagaacggcctgggccccgcccccggcagccccgagaagcagcccggcagccccagcccccccagcatccccgagaccggccagggcgtgaccaagggcgagggcggcacccccgcccccgccagcctgcccggcggcagcaaggaggaggaggagaaggccaagagactgctgtactgcgccctgtgcaaggtggccgtgaacagcctgagccagctggaggcccacaacaagggcaccaagcacaagaccatcctggaggccagaagcggcctgggccccatcaaggcctaccccagactgggcccccccacccccggcgagcccgaggcccccgcccaggacagaaccttccactgcgagatctgcaacgtgaaggtgaacagcgaggtgcagctgaagcagcacatcagcagcagaagacacagagacggcgtggccggcaagcccaaccccctgctgagcagacacaagaagagcagaggcgccggcgagctggccggcaccctgaccttcagcaaggagctgcccaagagcctggccggcggcctgctgcccagccccctggccgtggccgccgtgatggccgccgccgccggcagccccctgagcctgagacccgcccccgccgcccccctgctgcagggcccccccatcacccaccccctgctgcaccccgcccccggccccatcagaaccgcccacggccccatcctgttcagcccctactag

SEQ ID NO: 48898 - DNA, 1161 bp, Artificial Sequence
  derived and/or modified sequence
atgatcctcgggtctctaagcagagccggaccacttccgcttctgcgccagcccccgattatgcagccacccctcgaccttaaacagattctaccatttccactcgaacctgcccctacgctgggcctgttcagcaactactccactatggatcccgttcagaaagccgtcctgtcccacaccttcggcggcccgctcctgaagacaaagcgtcccgttatctcatgcaatatctgccagatccgcttcaactcccaatcgcaagctgaagcgcactataagggtaaccgtcatgcacggcgcgtaaagggtatagaggctgctaagactcggggccgtgagcccggtgttagggaacccggcgaccccgcccctcctgggtccactcccacgaacggcgatggagtagccccccgtcccgtttcgatggaaaatgggttaggaccagcacccggatccccagaaaaacaacctggttccccttctcccccttctatccccgagaccggccaaggagttacaaagggagaaggtgggactcctgcgcccgcctcactgccgggcgggtccaaagaagaagaagagaaggctaaaagactgctgtactgcgccttgtgcaaagtagcagtgaacagcctgagccagctggaagcccataataagggtaccaagcacaaaaccatcctggaggctaggagcgggctcggcccaatcaaggcctatccgagacttggtcctccaactcctggtgagcccgaggccccagctcaagatcgcacatttcactgtgaaatatgcaacgtcaaggtcaacagtgaggtgcaattaaaacagcacataagtagccgacgacacagagacggagtagcgggaaagcccaaccccctgcttagtaggcataagaagagccgaggggcaggggagttagctggcaccctgactttctccaaggagttgccgaaatcattggcaggcggtttgctgccctctcctcttgccgtagccgctgtgatggcggctgccgctggcagcccgctttccttgaggcctgcaccagccgctccccttctgcagggtcccccaattactcacccccttctgcaccccgctcctgggccgatccggacagcccacggacctattctctttagcccgtactag

SEQ ID NO: 48899 - DNA, 1161 bp, Artificial Sequence
  derived and/or modified sequence
atgatcctgggcagcctgagcagagctggccccctgcccctgctgcggcagccccccatcatgcagccccccctggacctgaagcagatcctgcccttccccctggagcccgcccccaccctgggcctcttcagcaactacagcaccatggaccctgtgcagaaggctgtgctgagccacaccttcggcggccccctgctgaagaccaagaggcctgtgatcagctgcaacatctgccagatccgcttcaacagccagagccaggccgaggcccactacaagggcaacagacatgcccggcgggtgaagggcattgaagctgccaagacccggggccgggagcccggggtgcgggagcccggggaccctgcccctcctggcagcacccccaccaatggagatggagtggcccccaggcctgtgtccatggagaatggcctgggccctgcccctggcagccctgagaagcagcccggcagccccagccccccatccatccctgagaccggccagggcgtgaccaagggggagggcggcaccccagccccagccagcctgcccggcggcagcaaggaggaggaggagaaggccaagaggctgctgtactgtgccctgtgcaaggtggccgtgaacagcctgagccagctggaggcccacaacaagggcaccaagcacaagaccatcctggaggcccggagcggcctgggccccatcaaggcctacccccggctgggcccccccaccccaggagagcctgaggccccagcccaggacaggaccttccactgtgagatctgcaatgtgaaggtgaacagcgaggtgcagctgaagcagcacatcagcagcagaagacacagagatggagtggccggcaagcccaaccccctgctgagccgccacaagaagagcagaggagctggggagctggccggcaccctgaccttcagcaaggagctgcccaagagcctggccggcggcctgctgcccagccccctggccgtggccgctgtgatggctgctgctgctggcagccccctgagcctgcggcctgccccagctgcccccctgctgcagggcccccccatcacccaccccctgctgcacccagcccctggccccatcagaacagcccacggccccatcctcttcagcccctactag

SEQ ID NO: 48900 - DNA, 1161 bp, Artificial Sequence
  derived and/or modified sequence
atgatcctgggcagcctgagccgggccggccccctgcccctgctgagacaaccgcctattatgcagcctcccctcgacctgaagcagattcttccgtttcctctcgaacctgccccgaccctcggtctgttttctaactactcaacaatggatcctgtacaaaaagctgtcctgtcccacaccttcggtggaccacttctcaaaactaagaggccggtgatttcttgtaatatctgccagatcagatttaatagtcaatcccaagctgaggcacactacaaggggaacagacatgctcggcgtgtgaagggcattgaagccgccaagactcgcgggagggagcccggagtacgtgagcctggtgacccagcccctcccggctctactccaaccaatggagatggagtggccccccgacccgtgtccatggagaacggactgggacccgccccaggatcacccgaaaagcagcctggcagcccttctccaccatccattccggaaacaggacaaggggtgaccaaaggggaggggggtacacctgccccagccagtcttcccggggggtcaaaggaagaggaagaaaaggctaagcggcttctgtactgtgccttgtgtaaagtggcagtcaattctctgtcccagctggaggctcacaataaaggaactaagcataaaacaattcttgaggctcggagcggtctcggccctatcaaagcctacccaaggctgggacctcccacccctggggagcccgaggctccagcgcaggataggacctttcattgtgagatctgtaacgtgaaagtaaattctgaggttcagctgaagcaacacatcagtagcagaagacaccgggacggcgtggccggcaagcccaacccactattgtcacgccataagaagagtcggggcgctggcgaactcgctggaactctgacgttcagtaaggagctcccaaaaagcctggcaggcggacttttaccgtcacctctcgccgtcgccgcagtgatggctgcagccgctgggtcgcctctgtctctgcgtcccgcgccagctgctcctctgctgcagggacctcccataacacatcccctcctgcaccccgccccaggtccgattcgtaccgcccacggtccgattctcttctccccatattag

SEQ ID NO: 48901 - DNA, 1161 bp, Artificial Sequence
  derived and/or modified sequence
atgattctgggatcgctgtcacgcgctggtcctttgcccctgctccggcagcccccaatcatgcaaccacctctggatctcaagcagattctgcctttccccttggaaccagctcccactttggggcttttttctaactacagtaccatggaccccgtccagaaggctgtcctgtcgcacacgttcggcggacccctcttaaaaaccaagaggcctgtaataagttgtaatatctgtcagatcaggttcaacagccagagccaggcagaagcccactataaaggtaatagacacgccaggagagtaaaggggattgaagctgcaaaaacaagagggagagaacctggggtgcgggagcccggagaccccgctccccctggttcaacgcccaccaatggggacggcgtggccccacggccagtgtccatggagaacgggctgggacctgcgcctggatcccctgagaaacagccaggatcgccaagcccgccatctatcccagaaaccggccagggcgtaactaagggagaaggcggaacacctgcccctgccagcctgcccggaggctctaaagaggaggaagagaaagccaagcgtcttctttattgcgccctttgcaaggtcgccgtaaactccctttctcagctagaggctcacaataaagggaccaaacacaaaacgattctggaagccagatcaggcctcgggcctataaaggcttatccccgtctgggccctccgacccctggcgaacccgaggctccggcacaggatcgaacatttcactgtgagatctgtaatgtgaaagttaattccgaggtacagcttaaacaacacatttctagccgcaggcaccgcgacggtgtggcaggaaaaccaaaccccctgctgtctagacacaagaaatcccgtggggcaggagaactggcgggtacacttacgttcagcaaggagctcccaaagtctcttgcaggcggactgctccctagccctctagccgtcgccgctgtgatggctgcagctgctggcagccccttgtccctgcgtccggcaccagctgccccattgcttcagggacctccaataacacaccccttattacaccccgcaccgggacctataaggactgctcatggaccgattctgttttcgccttactag

SEQ ID NO: 48902 - DNA, 2331 bp, Artificial Sequence
  derived and/or modified sequence
agaacggcccccgggacagagcgacgcggaaccccgggcgcctgggtccccagcatgatcctcggcagcctgagccgggcagggcccctgcctctgctacggcagcccccgatcatgcagcccccactggacctcaagcagatcctgcccttcccactcgagccagcccctacccttggcctcttcagcaactacagcaccatggaccctgtgcagaaggctgtgctctcccacacttttgggggacccttgctcaagaccaagcggcccgtcatttcctgtaatatctgtcaaatccgcttcaattctcagagccaggctgaggcgcactacaaaggtaatcgccacgcccgacgagtcaaaggcattgaggctgccaagaccagaggcagggagcctggcgtccgagaacctggagacccagctcccccaggcagcaccccaacaaatggggatggtgtagcaccccgtccagtttccatggagaatggactggggccagccccaggatccccagagaaacagcctggctccccatcccctcccagcattccggagactggtcagggtgtaaccaagggtgaaggggggactccagccccggcttccttgcctgggggtagcaaggaagaggaggagaaagccaagcggctgctctactgtgctctgtgcaaggtggctgtgaactccctgtcccagcttgaggcacataacaaaggtactaagcacaagacaattctggaggcccgaagtgggctcgggcccatcaaagcttaccctcggctggggcctcccaccccgggggaaccagaggctcctgcccaggaccgaactttccactgtgagatctgcaatgtcaaggtcaactcggaggtccaactgaaacagcacatctccagccggcggcaccgagacggcgtggccgggaagcccaacccactactgagccgtcacaagaagtctaggggcgccggggagctggcgggcacgctgactttctccaaggagctgcccaagtccctggcgggcggcctgctccccagccccctggcggtggctgcagtgatggcagcggcagcaggctcgccgctgtccctgcgcccggctccagccgcacctcttctccagggaccgccgatcactcaccctctgcttcacccggcccccggacccatccgaactgcgcacggacccatcctcttctccccgtactgacctcaaccctgaacccctcccattcaactccccacctccagccgggacccaggcgtccgggctcccagcccgcccctcctcccggcactccctaaatgatctctccttccccccccccaccccgagatacggggttccaggaaaggggaggggtagcgggggaggggggcttcagaagggggggaacaccccagatctcagggaaccccgccccctgcctttccctctcccctagaaaagggggggccgtctcacccccgagcccccttggagacaccccccctcccaaaagccatgtccatccagcccttccccccaaacctagcacaaaacggggttcacaagccatggtcggggtccgggggggacagaaatggattttcttggcaataagcggactctgggactccggctccctaccccaaactgaagcgcttccgtgaacacccccgtcctccgtagggggaggggagcaggcgggatcctgggtccctcataagcactttggttttaccgcctgcaacctcactgtgcccgccccgcaccatgccctagccccaggtctagccgggcccattgcagggggcagcacttgggggcatctccggcacttgggtgggaccaaggagatgccaccatagacctttccctcgccttcttcctccctagtccgggttccattcttttcaccagcacccatcgcccaaggggtaccgaggggggcaaggggtgtccagtccaagcccacccccgcctcgccttccgcaaaactgtgagcaaaaagcaatagaagcctcgcccccgcccttccccttcgcaggattcgccgagtctgtagcctccccgatccaagttcctagacctcatggctgtcccctcccaccagtcacctccactgcacaactcgggcgggggtgtgacacctctcccccacccccgactccgtggtttccgtatcgtcaacccttcagccgccgacccgggaggggtctggcctacactggtcttccccttcccatcaactctttctgcttgacaatgtagcaacccaggccccccacccacggtcctcccctttttcctctccctgacaataaagtctgaatttgttctgcc

SEQ ID NO: 48903 - DNA, 775 bp, Artificial Sequence
  derived and/or modified sequence
cagaactggacctgtagctgagcattcctggcagcctgagccgggcagggcccctgcctctgctacggcagcccccgatcatgcagcccccactggacctcaagcagatcctgcccttcccactcgagccagcccctacccttggcctcttcagcaactacagcaccatggaccctgtgcagaaggctgtgctctcccacacttttgggggacccttgctcaagaccaagcggcccgtcatttcctgtaatatctgtcaaatccgcttcaattctcagagccaggctgaggcgcactacaaaggtaatcgccacgcccgacgagtcaaaggcattgaggctgccaagaccagaggcagggagcctggcgtccgagaacctggagacccagctcccccaggcagcaccccaacaaatggggatggtgtagcaccccgtccagtttccatggagaatggactggggccagccccaggatccccagagaaacagcctggctccccatcccctcccagcattccggagactggtcagggtgtaaccaagggtgaaggggggactccagccccggcttccttgcctgggggtagcaaggaagaggaggagaaagccaagcggctgctctactgtgctctgtgcaaggtggctgtgaactccctgtcccagcttgaggcacataacaaaggtactaagcacaagacaattctggaggcccgaagtgggctcgggcccatcaaagcttaccctcggctggggcctcccaccccgggggaacc

SEQ ID NO: 48904 - DNA, 568 bp, Artificial Sequence
  derived and/or modified sequence
attgctctggagccagcaggggaagcagcctgagccgggcagggcccctgcctctgctacggcagcccccgatcatgcagcccccactggacctcaagcagatcctgcccttcccactcgagccagcccctacccttggcctcttcagcaactacagcaccatggaccctgtgcagaaggctgtgctctcccacacttttgggggacccttgctcaagaccaagcggcccgtcatttcctgtaatatctgtcaaatccgcttcaattctcagagccaggctgaggcgcactacaaaggtaatcgccacgcccgacgagtcaaaggcattgaggctgccaagaccagaggcagggagcctggcgtccgagaacctggagacccagctcccccaggcagcaccccaacaaatggggatggtgtagcaccccgtccagtttccatggagaatggactggggccagccccaggatccccagagaaacagcctggctccccatcccctcccagcattccggagactggtcagggtgtaaccaagggtgaaggggggactccagccccggcttc

SEQ ID NO: 48905 - DNA, 545 bp, Artificial Sequence
  derived and/or modified sequence
agaacggcccccgggacagagcgacgcggaaccccgggcgcctgggtccccagcatgatcctcgcctgagccgggcagggcccctgcctctgctacggcagcccccgatcatgcagcccccactggacctcaagcagatcctgcccttcccactcgagccagcccctacccttggcctcttcagcaactacagcaccatggaccctgtgcagaaggctgtgctctcccacacttttgggggacccttgctcaagaccaagcggcccgtcatttcctgtaatatctgtcaaatccgcttcaattctcagagccaggctgaggcgcactacaaaggtaatcgccacgcccgacgagtcaaaggcattgaggctgccaagaccagaggcagggagcctggcgtccgagaacctggagacccagctcccccaggcagcaccccaacaaatggggatggtgtagcaccccgtccagtttccatggagaatggactggggccagccccaggatccccagagaaacagcctggctccccatcccctcccagc

SEQ ID NO: 48906 - protein, 305 aa, Artificial Sequence
  derived and/or modified sequence
MILGSLSRAGPLPLLRQPPIMQPPLDLKQILPFPLEPAPTLGLFSNYSTMDPVQKAVLSHTFGGPLLKTKRPVISCNICQIRFNSQSQAEAHYKGNRHARRVKGIEAAKTRGREPGVREPGDPAPPGSTPTNGDGVAPRPGTKHKTILEARSGLGPIKAYPRLGPPTPGEPEAPAQDRTFHCEICNVKVNSEVQLKQHISSRRHRDGVAGKPNPLLSRHKKSRGAGELAGTLTFSKELPKSLAGGLLPSPLAVAAVMAAAAGSPLSLRPAPAAPLLQGPPITHPLLHPAPGPIRTAHGPILFSPY

SEQ ID NO: 48907 - DNA, 918 bp, Artificial Sequence
  derived and/or modified sequence
atgatcctgggcagcctgagcagagccggccccctgcccctgctgagacagccccccatcatgcagccccccctggacctgaagcagatcctgcccttccccctggagcccgcccccaccctgggcctgttcagcaactacagcaccatggaccccgtgcagaaggccgtgctgagccacaccttcggcggccccctgctgaagaccaagagacccgtgatcagctgcaacatctgccagatcagattcaacagccagagccaggccgaggcccactacaagggcaacagacacgccagaagagtgaagggcatcgaggccgccaagaccagaggcagagagcccggcgtgagagagcccggcgaccccgccccccccggcagcacccccaccaacggcgacggcgtggcccccagacccggcaccaagcacaagaccatcctggaggccagaagcggcctgggccccatcaaggcctaccccagactgggcccccccacccccggcgagcccgaggcccccgcccaggacagaaccttccactgcgagatctgcaacgtgaaggtgaacagcgaggtgcagctgaagcagcacatcagcagcagaagacacagagacggcgtggccggcaagcccaaccccctgctgagcagacacaagaagagcagaggcgccggcgagctggccggcaccctgaccttcagcaaggagctgcccaagagcctggccggcggcctgctgcccagccccctggccgtggccgccgtgatggccgccgccgccggcagccccctgagcctgagacccgcccccgccgcccccctgctgcagggcccccccatcacccaccccctgctgcaccccgcccccggccccatcagaaccgcccacggccccatcctgttcagcccctactag

SEQ ID NO: 48908 - DNA, 918 bp, Artificial Sequence
  derived and/or modified sequence
atgatccttgggagtctgagcagagcaggtccactccctctcctccggcaaccaccgatcatgcaacccccccttgacttgaagcagatcctgccatttcccctcgagcccgccccgacactgggactgtttagcaactatagcaccatggatcccgtccagaaagccgttctgagccacactttcggaggaccccttctcaaaacaaagcggcccgtaatcagctgcaacatttgccagattaggtttaatagtcagtcacaagccgaagcccactacaagggcaatcggcatgcccggcgcgttaaggggatagaagccgcgaaaacccgtgggagggagcccggtgtgagggagcccggcgatcccgcccccccagggagtaccccaaccaatggtgacggcgtcgcacctcgaccaggcacaaaacataagacaatattggaagccagatccggcttaggcccaataaaggcctatccgcgcctgggacctcctaccccaggggagcctgaggctcccgcacaggatcgcacctttcattgcgaaatttgtaatgttaaagttaatagtgaagtgcagttgaaacaacatatctccagtcgccgacatcgtgacggcgtggcgggaaaacctaacccgctgttgtcaaggcacaagaaatcacgcggtgctggcgaattagccggcaccctgacattctccaaggagctgccgaagtccctagcaggcggacttttgccctcacccctggccgtcgccgccgtaatggccgccgccgccggaagcccactgagcctgaggccagcaccagctgcccccctcttgcaaggccctcctattacacatccgttgctccacccagcacctggcccaatccgcactgctcacggcccaatattgtttagtccatattag

SEQ ID NO: 48909 - DNA, 918 bp, Artificial Sequence
  derived and/or modified sequence
atgatcctgggcagcctgagcagagctggccccctgcccctgctgcggcagccccccatcatgcagccccccctggacctgaagcagatcctgcccttccccctggagcccgcccccaccctgggcctcttcagcaactacagcaccatggaccctgtgcagaaggctgtgctgagccacaccttcggcggccccctgctgaagaccaagaggcctgtgatcagctgcaacatctgccagatccgcttcaacagccagagccaggccgaggcccactacaagggcaacagacatgcccggcgggtgaagggcattgaagctgccaagacccggggccgggagcccggggtgcgggagcccggggaccctgcccctcctggcagcacccccaccaatggagatggagtggccccccggcccggcaccaagcacaagaccatcctggaggcccggagcggcctgggccccatcaaggcctacccccggctgggcccccccaccccaggagagcctgaggccccagcccaggacaggaccttccactgtgagatctgcaatgtgaaggtgaacagcgaggtgcagctgaagcagcacatcagcagccgccgccacagagatggagtggccggcaagcccaaccccctgctgagccgccacaagaagagcagaggagctggggagctggccggcaccctgaccttcagcaaggagctgcccaagagcctggccggcggcctgctgcccagccccctggccgtggccgctgtgatggctgctgctgctggcagccccctgagcctgcggcctgccccagctgcccccctgctgcagggcccccccatcacccaccccctgctgcacccagcccctggccccatcagaacagcccacggccccatcctcttcagcccctactag

SEQ ID NO: 48910 - DNA, 918 bp, Artificial Sequence
  derived and/or modified sequence
atgatcctgggcagcctgagccgggccggccccctgcccctgctgagacagccacccattatgcagccccccctggatctgaagcaaatcctacccttcccgctggagccagccccaaccctgggactattctccaactactccaccatggaccccgtgcaaaaggctgtattgagccatacattcggaggacccttgctcaaaactaaaagacccgtgattagctgcaatatctgccagatccgtttcaactcacagtcgcaggccgaggctcattacaagggcaatagacacgcaagaagggttaagggcatcgaggctgctaagacccgcggcagagagccaggtgtgcgagagcccggggatcctgcaccacctggatccactccaaccaatggggatggagtcgcccctcggcctgggacaaagcataagaccatactggaagctcgatctggcctcggtccgattaaggcctacccccgcctgggccctcctacaccaggcgagccagaggctcctgcacaagaccggacctttcattgcgagatctgtaatgtgaaagtgaatagcgaggtgcagttaaaacagcacatctcatccaggagacaccgtgacggcgtggccggaaagccaaacccactactgtcaaggcacaagaaaagtcggggcgcaggggagctagctggcacactgacattttcaaaggagctgccaaagagcctggccggtggtttgctgccctcgcccttagctgtagctgctgtcatggccgctgccgcgggaagtcccctctccctgcggcctgcacctgctgcccctctcctccagggcccaccgatcacgcatccactgttgcaccctgccccgggacccatcagaacagcccatggccccattttattctctccgtattag

SEQ ID NO: 48911 - DNA, 918 bp, Artificial Sequence
  derived and/or modified sequence
atgatacttggcagtctgtctcgcgctggtccgctgcctctgctgcgccagccgccaattatgcagccaccactggatcttaagcagatactaccatttcccctggagcctgcccctactttgggattattctcaaactatagtaccatggaccctgttcagaaagctgtgctgtcacacacgttcgggggacccctcctaaaaaccaagcgccctgtgatttcttgtaatatctgtcaaataagattcaatagccagtcccaagccgaagcccactacaaaggcaacagacacgccagacgggtgaaaggtatcgaggccgcaaaaacccgcggacgcgagcccggagtgcgcgaacctggagaccccgcacctcccggaagtacgcctaccaacggagacggagttgccccaagacccggtacaaaacacaagactattcttgaggctcggtcgggcctgggtccaatcaaggcctatcctcgtttgggaccgcctaccccaggcgagcccgaggccccagctcaggaccgtaccttccactgtgagatctgcaatgtgaaggttaactctgaggtgcaattgaagcagcatattagctctagacgacaccgcgacggtgttgcagggaagcccaaccccctactaagcagacacaagaagtcccgtggcgctggggaactcgccggaactctgactttctctaaggaattgcccaaatcccttgccggtggcctgctgccaagccccctggcggtggctgctgtgatggcagcagctgcgggaagtcctctgtcactgcgcccagcccctgccgcacccttgctgcaggggccaccaattacacaccctctgctgcaccccgctcccggacccatcagaaccgcccatggccctattctgttctccccctactag

SEQ ID NO: 48912 - DNA, 2076 bp, Artificial Sequence
  derived and/or modified sequence
agagcgacgcggaaccccgggcgcctgggtccccagcatgatcctcggcagcctgagccgggcagggcccctgcctctgctacggcagcccccgatcatgcagcccccactggacctcaagcagatcctgcccttcccactcgagccagcccctacccttggcctcttcagcaactacagcaccatggaccctgtgcagaaggctgtgctctcccacacttttgggggacccttgctcaagaccaagcggcccgtcatttcctgtaatatctgtcaaatccgcttcaattctcagagccaggctgaggcgcactacaaaggtaatcgccacgcccgacgagtcaaaggcattgaggctgccaagaccagaggcagggagcctggcgtccgagaacctggagacccagctcccccaggcagcaccccaacaaatggggatggtgtagcaccccgtccaggtactaagcacaagacaattctggaggcccgaagtgggctcgggcccatcaaagcttaccctcggctggggcctcccaccccgggggaaccagaggctcctgcccaggaccgaactttccactgtgagatctgcaatgtcaaggtcaactcggaggtccaactgaaacagcacatctccagccggcggcaccgagacggcgtggccgggaagcccaacccactactgagccgtcacaagaagtctaggggcgccggggagctggcgggcacgctgactttctccaaggagctgcccaagtccctggcgggcggcctgctccccagccccctggcggtggctgcagtgatggcagcggcagcaggctcgccgctgtccctgcgcccggctccagccgcacctcttctccagggaccgccgatcactcaccctctgcttcacccggcccccggacccatccgaactgcgcacggacccatcctcttctccccgtactgacctcaaccctgaacccctcccattcaactccccacctccagccgggacccaggcgtccgggctcccagcccgcccctcctcccggcactccctaaatgatctctccttccccccccccaccccgagatacggggttccaggaaaggggaggggtagcgggggaggggggcttcagaagggggggaacaccccagatctcagggaaccccgccccctgcctttccctctcccctagaaaagggggggccgtctcacccccgagcccccttggagacaccccccctcccaaaagccatgtccatccagcccttccccccaaacctagcacaaaacggggttcacaagccatggtcggggtccgggggggacagaaatggattttcttggcaataagcggactctgggactccggctccctaccccaaactgaagcgcttccgtgaacacccccgtcctccgtagggggaggggagcaggcgggatcctgggtccctcataagcactttggttttaccgcctgcaacctcactgtgcccgccccgcaccatgccctagccccaggtctagccgggcccattgcagggggcagcacttgggggcatctccggcacttgggtgggaccaaggagatgccaccatagacctttccctcgccttcttcctccctagtccgggttccattcttttcaccagcacccatcgcccaaggggtaccgaggggggcaaggggtgtccagtccaagcccacccccgcctcgccttccgcaaaactgtgagcaaaaagcaatagaagcctcgcccccgcccttccccttcgcaggattcgccgagtctgtagcctccccgatccaagttcctagacctcatggctgtcccctcccaccagtcacctccactgcacaactcgggcgggggtgtgacacctctcccccacccccgactccgtggtttccgtatcgtcaacccttcagccgccgacccgggaggggtctggcctacactggtcttccccttcccatcaactctttctgcttgacaatgtagcaacccaggccccccacccacggtcctcccctttttcctctccctgacaataaagtctgaatttgttctgccctccg

SEQ ID NO: 48913 - protein, 145 aa, Artificial Sequence
  derived and/or modified sequence
MVGSRRVKAQTFAERRERSFSRSWSDPTPMKADTSHDSRDSSDLQSSHCTLDEAFEDLDWDTEKGLEAVACDTEGFVPPKVMLISSKVPKAEYIPTIIRRDDPSIIPILYVSPAPGLPPTDALLRPHPGPAPAPQVPRVLWRCWL

SEQ ID NO: 48914 - protein, 530 aa, Artificial Sequence
  derived and/or modified sequence
MGAAASRRRALRSEAMSSVAAKVRAARAFGEYLSQSHPENRNGADHLLADAYSGHDGSPEMQPAPQNKRRLSLVSNGCYEGSLSEEPSIRKPAGEGPQPRVYTISGEPALLPSPEAEAIELAVVKGRRQRHPHHHSQPLRASPGGSREDVSRPCQSWAGSRQGSKECPGCAQLAPGPTPRAFGLDQPPLPETSGRRKKLERMYSVDRVSDDIPIRTWFPKENLFSFQTATTTMQAISVFRGYAERKRRKRENDSASVIQRNFRKHLRMVGSRRVKAQTFAERRERSFSRSWSDPTPMKADTSHDSRDSSDLQSSHCTLDEAFEDLDWDTEKGLEAVACDTEGFVPPKVMLISSKVPKAEYIPTIIRRDDPSIIPILYDHEHATFEDILEEIERKLNVYHKGAKIWKMLIFCQGGPGHLYLLKNKVATFAKVEKEEDMIHFWKRLSRLMSKVNPEPNVIHIMGCYILGNPNGEKLFQNLRTLMTPYRVTFESPLELSAQGKQMIETYFDFRLYRLWKSRQHSKLLDFDDVL

SEQ ID NO: 48915 - protein, 194 aa, Artificial Sequence
  derived and/or modified sequence
MGLGPLSSSLSPQLISSKVPKAEYIPTIIRRDDPSIIPILYDHEHATFEDILEEIERKLNVYHKGAKIWKMLIFCQGGPGHLYLLKNKVATFAKVEKEEDMIHFWKRLSRLMSKVNPEPNVIHIMGCYILGNPNGEKLFQNLRTLMTPYRVTFESPLELSAQGKQMIETYFDFRLYRLWKSRQHSKLLDFDDVL

SEQ ID NO: 48916 - DNA, 1593 bp, Artificial Sequence
  derived and/or modified sequence
atgggcgcagcagcctctcggcgacgtgccctgcgctctgaggctatgagtagcgtggccgccaaagtccgggcagcccgcgcttttggagagtatctgagccaaagccaccccgagaatagaaatggcgcggatcacctgttagcagatgcttactctgggcacgacggcagtccagagatgcagccggcccctcaaaacaaacgccggctaagcctggtgagcaacggatgctacgaaggctcactcagtgaggagcccagcataaggaaacctgctggcgaaggaccgcagcccagggtgtacaccatatccggtgagccagctttgcttccttcccccgaggccgaggctatcgagcttgctgttgtgaaaggcaggcgtcaaaggcatccacaccatcattcccaaccattacgcgccagcccgggcgggtcccgggaagacgtgagcagaccttgccagtcatgggccgggtcacgacaggggtctaaggagtgcccaggctgtgctcagttagctccagggccgacccctcgtgccttcggcctcgatcagccaccgttacctgaaacctcagggaggcggaagaaactggagaggatgtattcagtggacagagtatcagacgacattccaatcaggacttggtttcctaaagaaaatctgttctccttccagacagctaccacaacgatgcaagccatctccgtcttccggggctatgctgaacggaaacgccgaaagagagagaatgactcggcctcagtgattcagagaaattttagaaagcatttgaggatggtggggtcaaggcgcgtcaaagctcaaacattcgctgaacgccgcgaaagatcctttagccgaagctggagcgacccaactccaatgaaagctgatacaagccatgactctcgcgactcttctgatctgcagtcctctcactgtacccttgatgaagcattcgaagatttggattgggatactgaaaagggtctggaggctgtggcttgcgataccgaagggttcgtgcctccaaaggtgatgctaatcagctcgaaggttcctaaggccgagtacattccgactatcattcgaagggacgacccaagtatcattccaatcttatacgatcatgaacatgccacgtttgaggacattttggaggagatagaacgtaagttgaatgtgtaccataagggagccaaaatatggaagatgctgatcttctgtcagggcggacccggccatctctacttgctcaaaaataaggtggctactttcgccaaagtagaaaaagaggaggacatgatccatttctggaagcggctctccaggctgatgtccaaagttaaccctgaacccaatgttattcacatcatgggatgttacatattggggaaccctaacggtgagaagttattccagaatcttaggacactaatgaccccttatagggttactttcgaatcacccctggaactcagcgcccagggcaagcagatgattgaaacgtacttcgacttccgactttacagattatggaaatcccggcaacactccaagctcctcgactttgacgatgttttgtag

SEQ ID NO: 48917 - DNA, 1593 bp, Artificial Sequence
  derived and/or modified sequence
atgggcgccgccgccagcagaagaagagccctgcggtctgaggccatgagctctgtggccgccaaggtgcgggccgcccgggcctttggagagtacctgagccagagccacccagaaaatagaaatggagctgaccacctgctggctgatgcctacagcggccatgatggcagccctgagatgcagcctgccccccagaacaagaggcggctgagcctggtgtccaatggctgctatgagggcagcctgtctgaggagcccagcatcaggaagccagctggggagggcccccagccccgggtgtacaccatctctggagagcccgccctgctgcccagccctgaggccgaggccatcgagctggccgtggtgaagggccggcggcagaggcacccccaccaccacagccagcccctgcgggccagccctgggggcagccgggaggatgtgtcccggccctgccagagctgggccggcagccggcagggcagcaaggagtgccccggctgtgcccagctggcccctggccccaccccccgggccttcggcctggaccagccccccctgcctgagaccagcggccgcaggaagaagctggagaggatgtacagcgtggacagagtgtctgatgacatccccatccgcacctggttccccaaggaaaatctcttctccttccagacagccaccaccaccatgcaggccatctctgtgttccggggctatgcagagaggaagaggaggaagagagaaaatgacagcgccagcgtcatccagaggaacttcaggaagcacctgaggatggtgggcagccggcgggtgaaggcccagacctttgctgagcggcgggagaggagcttcagccgctcctggagcgaccccacccccatgaaggctgacaccagccatgacagccgggacagcagtgacctgcagagcagccactgcaccctggatgaggcctttgaggacctggactgggacacagagaagggcctggaggccgtggcctgtgacacagagggctttgtgccccccaaggtgatgctgatcagcagcaaggtgcccaaggccgagtacatccccaccatcatcagaagagatgaccccagcatcatccccatcctgtatgaccatgaacatgccacctttgaggacatcctggaggagattgaaaggaagctgaatgtgtaccacaagggggccaagatctggaagatgctgatcttctgccagggcggccctggccacctgtacctgctgaagaacaaggtggccacctttgccaaggtggagaaggaggaggacatgatccacttctggaagaggctgagccggctgatgagcaaggtgaaccctgagcccaacgtcatccacatcatgggctgctacatcctgggcaaccccaacggggagaagctgttccagaacctgcggaccctgatgaccccctacagagtgacctttgagagccccctggagctgagcgcccagggcaagcagatgattgagacctactttgacttccggctgtaccgcctgtggaagagccggcagcacagcaagctgctggactttgatgatgtgctgtag

SEQ ID NO: 48918 - DNA, 3646 bp, Artificial Sequence
  derived and/or modified sequence
ggttcgggcagcgctctcccgggagcggcggcacgcgcggagcgccgggtgcggccatgcggggaccgggcccgaccccgagcccgaccccgagcccaagcccgagccggagcccgagcgagaccccgagcccgagcccgagcgcgacccccggtgcggcgcggctaccccggcggaggcggcgggcgcggggcgcgctctgaggcccgggggatgcgccgccgcctcgaccatgggcgccgccgcctccaggaggagggcgctgaggagcgaggccatgtcctcggtggcggccaaagtgcgagcagcccgagcgtttggagagtacctgtcccagagtcaccctgagaaccgcaacggcgcagatcacctgctggctgatgcctactctggccacgacgggtcccccgagatgcagccggccccccagaacaagcgccgcctgtccctcgtctccaacggctgctacgagggcagcctctcagaggagcccagcattaggaagcccgcaggcgagggccctcagcctcgagtgtacaccatctctggggagcctgccctgctgcccagccctgaggcggaggccattgagctggcggtggtgaaggggcggcggcagcggcaccctcaccatcacagccagcccctgcgcgccagccctggtggcagccgggaggacgtcagcaggccctgccagagctgggcgggcagccgccagggctccaaggagtgccccggatgtgcccagctggctcctggccccacccctcgggcctttgggctggaccagccacctctgcctgagacctccggtcgccgcaagaagctggagaggatgtacagcgttgaccgtgtgtctgacgacatccctattcgtacctggttccccaaggaaaatcttttcagcttccagacagcaaccacaactatgcaagccatctcggtgttcaggggctacgcggagaggaagcgccggaaacgggagaatgattccgcgtctgtaatccagaggaacttccgcaaacacctgcgcatggtcggcagccggagggtgaaggcccagacgttcgctgagcggcgcgagcggagcttcagccggtcctggagcgaccccacccccatgaaagccgacacttcccacgactcccgagacagcagtgacctgcagagctcccactgcacgctggacgaggccttcgaggacctggactgggacactgagaagggcctggaggctgtggcctgcgacaccgaaggcttcgtgccaccaaaggtcatgctcatttcctccaaggtgcccaaggctgagtacatccccactatcatccgccgggatgacccctccatcatccccatcctctacgaccatgagcacgcaaccttcgaggacatccttgaggagatagagaggaagctgaacgtctaccacaagggagccaagatctggaaaatgctgattttctgccagggaggtcctggacacctctatctcctcaagaacaaggtggccacctttgccaaagtggagaaggaagaggacatgattcacttctggaagcggctgagccgcctgatgagcaaagtgaacccagagccgaacgtcatccacatcatgggctgctacattctggggaaccccaatggagagaagctgttccagaacctcaggaccctcatgactccttatagggtcaccttcgagtcacccctggagctctcagcccaagggaagcagatgatcgagacgtactttgacttccggttgtatcgcctgtggaagagccgccagcactcgaagctgctggactttgacgacgtcctgtgaggggcagaggcctccgcccagtcaccatcaggccactccctctgcaccgggacctggggctgggccgcctcgtgctccccgggactgtgtggctccggtctcgcctggagccacttcagggcacctcagacgttgctcaggttccccctgtgggttccggtcctcgctgcacccgtggccgcagaggctgcagtccctgggggccgggaggatcccgccctgtggcccgtggatgctcagcggccaggcactgacctgccatgcctcgcctggaggctcagctgtgggcatccctccatggggttcatagaaataagtgcaatttctacacccccgaaacaattcaaagggaagcagcatttcttgttaactagttaagcactatgctgctagttacagtgtaggcaccccggcccagcagcccagcagcccacatgtgttcaggaccctccctgcccaccccctccctgccgtatcgatcaccagcaccagggtggcccgtgtgcgtggggccagcgtcgccgggctgcccagcctggctctgtctacactggccgagtctctgggtctgtctacactggccgagtctccgactgtctgtgctttcacttacactcctcttgccaccccccatccctgcttacttagacctcagccggcgccggacccggtaggggcagtctgggcagcaggaaggaagggcgcagcgtcccctccttcagaggaggctctgggtggggcctgctccccatccccccaagcccacccagcactctcattgctgctgttgagttcagcttttaccagcctcagtgtggaggctccatcccagcacacaggcctggggcttggcaggggcccagctggggctgggccctgggttttgagaaactcgctggcaccacagtgggcccctggacccggccgcgcagctggtggactgtaggggctcctgactgggcacaggagctcccagcttttgtccacggccagcaggatgggctgtcgtgtatatagctggggcgagggggcaggccccccttgtgcagagccaggggtctgagggcacctggctgtgttcccagctgagggagggctggggcgggggccgggcttggaacgatgtacgataccctcatagtgaccattaaacctgatcctccaccgcggccgccgcgtgggtctgtcctctcagtgctttccaggggccttcctgtgcccagcttctgggcccactcctgtgaggtcactgctgcagggccttcctgcctggacagagttggagctaggccactagaccaccccacagggcatagccagggggaccagcacaggaggggacggagaggagctgcaggagggctggggggaggctgcagtctcggaggggggcctcgccgggtctggaggggacagcagagacagcccgttccccctgccgcctgagggcaccagggagagggctgtatgtccctcacgccacactgtgtgtgcagtcagcagtgtggccacagatgggggccactctctcaacctcaggtgtcctcagggcccagaccgctgctgggcacagccaggctggctgccagctggttccctgccccgtggctgggggacagagcagcacgtatcagctgggctagggtcagggggccactggtgcgcagcctggcacagcctggcaggcttgaggcccagtgtgctgggggtggtcacacagccgtcagccacctccagctcttccagggcattctagatggggtcccgggagggggcaggttttggtgccaatttgagtgtataaagttttaggtaaatacc

SEQ ID NO: 48919 - DNA, 1593 bp, Artificial Sequence
  derived and/or modified sequence
atgggcgccgccgccagccggcggcgggccctgcggagcgaggccatgtctagtgtggccgctaaggtgagggctgcaagggcctttggggagtatttatcccagagtcatccagaaaacaggaatggagcggaccatctgcttgccgacgcctacagtggccatgacggttcgcccgagatgcagcctgcgcctcagaacaaacgcaggctgagtctggtgagtaatggctgttatgagggatcgctcagcgaggagccttccatccggaagcctgccggggagggcccacagccccgggtgtacactatttctggggaacctgcgctgctgccctctccagaggccgaggcgatcgaactcgcggtcgtgaagggccgaagacagcgccaccctcaccaccacagccaaccattacgagcatcaccaggagggtccagagaagacgtttcgcgcccttgccagagttgggcaggctctcgtcaaggtagcaaggaatgtcctggttgtgcacagctggcacctgggccaacaccccgagcattcggcctggatcagcctcccttaccggaaactagtgggcgtcgcaaaaagttggagcggatgtactccgttgatagggtgagcgatgacattcctatccggacctggttccctaaagaaaatttattcagcttccaaactgcgacaacaactatgcaggcaatatccgtgttcagaggatatgccgagcgtaaacgcagaaagagggaaaacgactccgcttccgtaatacagcgcaacttccgaaaacacttgagaatggtcggaagccgaagggtcaaggcacagaccttcgccgaacgtagagaacgctcatttagtagatcatggtcggaccccacaccaatgaaagcggatacgagccacgatagccgggactcttccgacctgcaaagttctcactgcaccctcgacgaggcatttgaggatctcgactgggatacggagaaaggcctggaggcggtcgcctgtgacacagagggcttcgtcccacccaaagtcatgctcatttcttccaaagtccccaaagcagaatacatcccaactattattcgccgcgatgatccctccataatcccgattctttacgaccatgaacatgccacattcgaggacattctagaagagatcgaacgcaaacttaacgtttatcacaagggcgcaaagatctggaaaatgctgatattctgccagggaggccccggacacttgtacttactgaagaacaaggtggcaaccttcgctaaggtcgaaaaagaggaagacatgatccacttctggaagcgattgtcgcgtctaatgagcaaggtcaatcccgaaccgaacgtgatccacataatgggatgttatattcttggcaatcctaacggcgaaaaattgtttcagaacttacgtacattaatgacgccctatcgggttaccttcgaaagcccccttgaattatccgctcagggcaagcagatgattgagacctactttgacttcaggttgtacaggttgtggaaaagccgtcagcacagcaaactgctggactttgatgacgtcctgtag

SEQ ID NO: 48920 - DNA, 1593 bp, Artificial Sequence
  derived and/or modified sequence
atgggcgctgccgcttcacgcagacgtgcactccgcagtgaggccatgagctctgtcgctgcaaaagtacgggctgcccgtgcatttggggagtatttgtcacagagccacccggagaataggaacggggctgatcacctacttgccgacgcttattcggggcatgacggctcccccgagatgcagcccgctccacagaacaagcgtcgcctgtcccttgtgtctaacggctgctatgagggcagtctctctgaagaacctagtatcaggaaacccgcaggggagggcccacagcccagagtatacacgatttcgggggagccagccttactcccatctccggaggcagaggctattgagctggcggtcgtaaagggcagaaggcaacgccacccacatcaccactcacagccattgcgggcaagtcctggtggctcacgtgaggacgttagccgtccctgccagtcttgggcagggagcagacagggaagcaaggagtgtcccggatgcgcccagctggctccgggacccactcctagagcttttggcctggatcaaccccctctgcctgaaacttccggacggaggaagaaattggaacggatgtactctgttgaccgcgtgtcggatgatatccctatccgtacctggttcccgaaagaaaacttgttctcattccagaccgcgacaacaacaatgcaagctattagcgttttccgtggttatgccgaacgaaagcgccgtaagcgcgagaacgactccgccagtgtcatccagcgcaatttccggaagcatctcagaatggtgggatctaggagagtgaaggcccagacgtttgcagagagaagagaaaggtccttttcccgatcatggtctgatccgactccgatgaaagcggatacttcacacgactcacgtgactcatctgatttgcagtcgtcgcattgcacgctagatgaggcctttgaggacctggactgggacacagaaaaaggcctggaagctgtggcatgcgacactgagggatttgtccctccaaaggttatgctgatctcttcgaaggtgcccaaggcggagtacattccaactattatccggcgagacgacccctctattatcccgattctctatgatcacgagcacgctacattcgaggacatcctcgaggagatcgagcgcaagcttaacgtgtatcacaaaggagccaagatatggaagatgcttatattttgtcagggcggaccaggccatctctacctgctcaaaaacaaagtcgctacctttgctaaagtcgaaaaggaggaagacatgatacatttctggaaacgactctcccgcttaatgagcaaggtgaacccagagcctaatgtgatccacattatgggctgctatatcctagggaatcccaatggggaaaagctatttcaaaacctgaggactcttatgactccatatagagtgacttttgaaagtccgctggagttgagtgcccagggtaaacagatgatcgaaacctatttcgatttccgtctgtatagactctggaagagccgacagcacagcaagctacttgatttcgacgatgtgctgtag

SEQ ID NO: 48921 - DNA, 1593 bp, Artificial Sequence
  derived and/or modified sequence
atgggcgccgccgccagcagaagaagagccctgagaagcgaggccatgagcagcgtggccgccaaggtgagagccgccagagccttcggcgagtacctgagccagagccaccccgagaacagaaacggcgccgaccacctgctggccgacgcctacagcggccacgacggcagccccgagatgcagcccgccccccagaacaagagaagactgagcctggtgagcaacggctgctacgagggcagcctgagcgaggagcccagcatcagaaagcccgccggcgagggcccccagcccagagtgtacaccatcagcggcgagcccgccctgctgcccagccccgaggccgaggccatcgagctggccgtggtgaagggcagaagacagagacacccccaccaccacagccagcccctgagagccagccccggcggcagcagagaggacgtgagcagaccctgccagagctgggccggcagcagacagggcagcaaggagtgccccggctgcgcccagctggcccccggccccacccccagagccttcggcctggaccagccccccctgcccgagaccagcggcagaagaaagaagctggagagaatgtacagcgtggacagagtgagcgacgacatccccatcagaacctggttccccaaggagaacctgttcagcttccagaccgccaccaccaccatgcaggccatcagcgtgttcagaggctacgccgagagaaagagaagaaagagagagaacgacagcgccagcgtgatccagagaaacttcagaaagcacctgagaatggtgggcagcagaagagtgaaggcccagaccttcgccgagagaagagagagaagcttcagcagaagctggagcgaccccacccccatgaaggccgacaccagccacgacagcagagacagcagcgacctgcagagcagccactgcaccctggacgaggccttcgaggacctggactgggacaccgagaagggcctggaggccgtggcctgcgacaccgagggcttcgtgccccccaaggtgatgctgatcagcagcaaggtgcccaaggccgagtacatccccaccatcatcagaagagacgaccccagcatcatccccatcctgtacgaccacgagcacgccaccttcgaggacatcctggaggagatcgagagaaagctgaacgtgtaccacaagggcgccaagatctggaagatgctgatcttctgccagggcggccccggccacctgtacctgctgaagaacaaggtggccaccttcgccaaggtggagaaggaggaggacatgatccacttctggaagagactgagcagactgatgagcaaggtgaaccccgagcccaacgtgatccacatcatgggctgctacatcctgggcaaccccaacggcgagaagctgttccagaacctgagaaccctgatgaccccctacagagtgaccttcgagagccccctggagctgagcgcccagggcaagcagatgatcgagacctacttcgacttcagactgtacagactgtggaagagcagacagcacagcaagctgctggacttcgacgacgtgctgtag

SEQ ID NO: 48922 - protein, 507 aa, Artificial Sequence
  derived and/or modified sequence
MGAAASRRRALRSEAMSSVAAKVRAARAFGEYLSQSHPENRNGADHLLADAYSGHDGSPEMQPAPQNKRRLSLVSNGCYEGSLSEEPSIRKPAGEGPQPRVYTISGEPALLPSPEAEAIELAVVKGRRQRHPHHHSQPLRASPGGSREDVSRPCQSWAGSRQGSKECPGCAQLAPGPTPRAFGLDQPPLPETSGRRKKLERMYSVDRVSDDIPIRTWFPKENLFSFQTATTTMQAVGNFRKHLRMVGSRRVKAQTFAERRERSFSRSWSDPTPMKADTSHDSRDSSDLQSSHCTLDEAFEDLDWDTEKGLEAVACDTEGFVPPKVMLISSKVPKAEYIPTIIRRDDPSIIPILYDHEHATFEDILEEIERKLNVYHKGAKIWKMLIFCQGGPGHLYLLKNKVATFAKVEKEEDMIHFWKRLSRLMSKVNPEPNVIHIMGCYILGNPNGEKLFQNLRTLMTPYRVTFESPLELSAQGKQMIETYFDFRLYRLWKSRQHSKLLDFDDVL

SEQ ID NO: 48923 - protein, 507 aa, Artificial Sequence
  derived and/or modified sequence
MGAAASRRRALRSEAMSSVAAKVRAARAFGEYLSQSHPENRNGADHLLADAYSGHDGSPEMQPAPQNKRRLSLVSNGCYEGSLSEEPSIRKPAGEGPQPRVYTISGEPALLPSPEAEAIELAVVKGRRQRHPHHHSQPLRASPGGSREDVSRPCQSWAGSRQGSKECPGCAQLAPGPTPRAFGLDQPPLPETSGRRKKLERMYSVDRVSDDIPIRTWFPKENLFSFQTATTTMQAISNFRKHLRMVGSRRVKAQTFAERRERSFSRSWSDPTPMKADTSHDSRDSSDLQSSHCTLDEAFEDLDWDTEKGLEAVACDTEGFVPPKVMLISSKVPKAEYIPTIIRRDDPSIIPILYDHEHATFEDILEEIERKLNVYHKGAKIWKMLIFCQGGPGHLYLLKNKVATFAKVEKEEDMIHFWKRLSRLMSKVNPEPNVIHIMGCYILGNPNGEKLFQNLRTLMTPYRVTFESPLELSAQGKQMIETYFDFRLYRLWKSRQHSKLLDFDDVL

SEQ ID NO: 48924 - DNA, 1524 bp, Artificial Sequence
  derived and/or modified sequence
atgggcgctgccgcctcgcgccgccgggctttgaggagtgaggctatgagtagcgtcgccgcaaaagtccgcgctgcccgggcatttggtgagtacctaagccagtcacatcctgaaaaccggaatggagccgaccatctactggcagacgcctacagtggccacgatggttcacccgagatgcaacccgcaccacagaacaagcggcgccttagccttgttagcaatggatgctacgaggggagcctgtcagaggagccttcaattaggaaacccgccggcgagggtccgcagccgcgagtctacactatcagcggtgagccagcactgctccctagccccgaggccgaagccatcgagctcgcagtggtaaagggccggcgccagaggcatccccatcaccatagtcaacccctgagagcatcaccaggcggcagtcgcgaggacgtatcaaggccctgtcagagctgggcaggcagccgacaaggtagtaaggaatgccccggctgtgctcagctggcacccggccctacacctcgcgccttcggcctcgatcaaccgcctctacctgagacgtccggccgccgcaagaaactggagcggatgtacagcgtcgatcgggtgtctgacgatatacccattcgcacctggttccctaaggagaacctgttctctttccaaaccgctacaacaaccatgcaggcagtgggaaacttcaggaagcaccttaggatggtgggaagccgccgagtaaaggcacagaccttcgccgagcgtcgcgaaagatccttctccaggtcttggtctgatcctacgcctatgaaagccgatacgagccatgactctcgtgacagcagcgatttgcagtctagccattgtactctggacgaggcgtttgaggaccttgattgggacaccgagaaaggactagaagccgttgcatgcgatactgagggcttcgtccctcctaaagtgatgctgatcagtagtaaagtgccgaaagcagagtatattccaaccataataaggagggatgacccgtccattattcctatcctgtacgaccacgaacatgccaccttcgaagatatcttggaagagatcgagaggaaacttaacgtgtaccacaagggggctaaaatttggaagatgctcatcttttgccagggcggcccaggccacctgtacttgcttaaaaataaagttgctacctttgcaaaagttgagaaagaggaggacatgattcacttctggaagaggctttcacgactgatgagcaaagtaaatcccgagcccaacgtcatccatataatgggatgctatattctgggtaatccaaatggcgaaaagctgtttcaaaatcttcgcacgttaatgacaccatatagagtgacattcgaatcgcccttggaactatctgcgcaggggaagcagatgatcgagacatacttcgactttagactataccgtctgtggaagagtaggcagcatagtaaattgctcgattttgatgatgtcctgtag

SEQ ID NO: 48925 - DNA, 1524 bp, Artificial Sequence
  derived and/or modified sequence
atgggcgcagccgcatcacgccgtcgggccctgagaagtgaagccatgagttctgtggcggccaaagtacgcgccgctagagcctttggcgagtatctgtctcagtcccatcccgagaatcggaatggagccgaccatcttttggctgatgcttacagcggccacgacgggtcgcccgagatgcaacctgcgccgcagaacaagagacgactcagcttggtttccaacggatgttacgaggggagccttagtgaagagcccagtatccgaaaaccagccggggaggggccacagccccgggtttacaccatcagcggggaacccgcgctactcccttcccctgaagcagaggccattgagttggctgtagtcaaggggaggagacagcgccatccgcaccaccattcacagccgcttcgggcatcgcccgggggatctcgggaggacgtgtccagaccatgccagtcctgggcggggtcacggcaagggagcaaggagtgtccagggtgtgcccagttggcccccggtccaacacctcgcgcttttggactagaccaaccgcctttgcccgagacttccgggcggagaaaaaaattggaacggatgtactccgttgaccgcgtatccgacgacatacctataagaacatggtttccgaaagagaatctgttctccttccagaccgccactacaaccatgcaagccatatcaaattttaggaagcatttgagaatggtgggttcaaggcgcgtaaaggcacaaacctttgctgaacgacgggagaggtccttctcacggagctggtccgaccctacccccatgaaagcggacacctcccatgacagtcgagatagttccgacttgcagagctcccactgcacgctggacgaagccttcgaggatcttgactgggacaccgaaaaaggtctcgaggcagtcgcttgtgacactgagggattcgtgccaccaaaagtcatgctgatctcctcaaaggtgccgaaggctgagtatatccccaccatcatccggagggacgatcccagcattataccaatcctttacgaccatgaacacgccactttcgaagacattctggaggagattgagagaaaattaaacgtttatcacaagggcgctaaaatctggaagatgctgattttttgccaaggaggaccagggcacttatacctcttaaaaaacaaagttgccaccttcgcgaaggttgagaaggaggaggacatgattcatttctggaagcgactctcaaggcttatgagcaaggttaatcccgagccaaacgttatccacatcatgggttgctatatattggggaaccctaatggcgagaaactcttccagaatttgcggacattgatgacaccctatcgtgtgacattcgagagtcccttagaactctccgcgcaagggaagcagatgatcgagacctactttgattttagattgtatagactttggaaaagccgccagcattccaagctgcttgatttcgatgatgtgctgtag

SEQ ID NO: 48926 - DNA, 1524 bp, Artificial Sequence
  derived and/or modified sequence
atgggcgccgccgccagcagaagaagagccctgcggtctgaggccatgagctctgtggccgccaaggtgcgggccgcccgggcctttggagagtacctgagccagagccacccagaaaatagaaatggagctgaccacctgctggctgatgcctacagcggccatgatggcagccctgagatgcagcctgccccccagaacaagaggcggctgagcctggtgtccaatggctgctatgagggcagcctgtctgaggagcccagcatcaggaagccagctggggagggcccccagccccgggtgtacaccatctctggagagcccgccctgctgcccagccctgaggccgaggccatcgagctggccgtggtgaagggccggcggcagaggcacccccaccaccacagccagcccctgcgggccagccctgggggcagccgggaggatgtgtcccggccctgccagagctgggccggcagccggcagggcagcaaggagtgccccggctgtgcccagctggcccctggccccaccccccgggccttcggcctggaccagccccccctgcctgagaccagcggccgcaggaagaagctggagaggatgtacagcgtggacagagtgtctgatgacatccccatccgcacctggttccccaaggaaaatctcttctccttccagacagccaccaccaccatgcaggccgtgggcaacttcaggaagcacctgaggatggtgggcagcagaagagtgaaggcccagacctttgctgagcggcgggagaggagcttcagccgctcctggagcgaccccacccccatgaaggctgacaccagccatgacagccgggacagcagtgacctgcagagcagccactgcaccctggatgaggcctttgaggacctggactgggacacagagaagggcctggaggccgtggcctgtgacacagagggctttgtgccccccaaggtgatgctgatcagcagcaaggtgcccaaggccgagtacatccccaccatcatcagaagagatgaccccagcatcatccccatcctgtatgaccacgagcacgccacctttgaggacatcctggaggagattgaaaggaagctgaatgtgtaccacaagggggccaagatctggaagatgctgatcttctgccagggcggccctggccacctgtacctgctgaagaacaaggtggccacctttgccaaggtggagaaggaggaggacatgatccacttctggaagaggctgagccggctgatgagcaaggtgaaccctgagcccaacgtcatccacatcatgggctgctacatcctgggcaaccccaatggagagaagctgttccagaacctgcggaccctgatgaccccctacagagtgacctttgagagccccctggagctgagcgcccagggcaagcagatgattgagacctactttgacttccggctgtaccgcctgtggaagagccggcagcacagcaagctgctggactttgatgatgtgctgtag

SEQ ID NO: 48927 - DNA, 1524 bp, Artificial Sequence
  derived and/or modified sequence
atgggcgccgccgccagcagaagaagagccctgcggtctgaggccatgagctctgtggccgccaaggtgcgggccgcccgggcctttggagagtacctgagccagagccacccagaaaatagaaatggagctgaccacctgctggctgatgcctacagcggccatgatggcagccctgagatgcagcctgccccccagaacaagaggcggctgagcctggtgtccaatggctgctatgagggcagcctgtctgaggagcccagcatcaggaagccagctggggagggcccccagccccgggtgtacaccatctctggagagcccgccctgctgcccagccctgaggccgaggccatcgagctggccgtggtgaagggccggcggcagaggcacccccaccaccacagccagcccctgcgggccagccctgggggcagccgggaggatgtgtcccggccctgccagagctgggccggcagccggcagggcagcaaggagtgccccggctgtgcccagctggcccctggccccaccccccgggccttcggcctggaccagccccccctgcctgagaccagcggccgcaggaagaagctggagaggatgtacagcgtggacagagtgtctgatgacatccccatccgcacctggttccccaaggaaaatctcttctccttccagacagccaccaccaccatgcaggccatcagcaacttcaggaagcacctgaggatggtgggcagcagaagagtgaaggcccagacctttgctgagcggcgggagaggagcttcagccgctcctggagcgaccccacccccatgaaggctgacaccagccatgacagccgggacagcagtgacctgcagagcagccactgcaccctggatgaggcctttgaggacctggactgggacacagagaagggcctggaggccgtggcctgtgacacagagggctttgtgccccccaaggtgatgctgatcagcagcaaggtgcccaaggccgagtacatccccaccatcatcagaagagatgaccccagcatcatccccatcctgtatgaccacgagcacgccacctttgaggacatcctggaggagattgaaaggaagctgaatgtgtaccacaagggggccaagatctggaagatgctgatcttctgccagggcggccctggccacctgtacctgctgaagaacaaggtggccacctttgccaaggtggagaaggaggaggacatgatccacttctggaagaggctgagccggctgatgagcaaggtgaaccctgagcccaacgtcatccacatcatgggctgctacatcctgggcaaccccaatggagagaagctgttccagaacctgcggaccctgatgaccccctacagagtgacctttgagagccccctggagctgagcgcccagggcaagcagatgattgagacctactttgacttccggctgtaccgcctgtggaagagccggcagcacagcaagctgctggactttgatgatgtgctgtag

SEQ ID NO: 48928 - DNA, 3577 bp, Artificial Sequence
  derived and/or modified sequence
ggttcgggcagcgctctcccgggagcggcggcacgcgcggagcgccgggtgcggccatgcggggaccgggcccgaccccgagcccgaccccgagcccaagcccgagccggagcccgagcgagaccccgagcccgagcccgagcgcgacccccggtgcggcgcggctaccccggcggaggcggcgggcgcggggcgcgctctgaggcccgggggatgcgccgccgcctcgaccatgggcgccgccgcctccaggaggagggcgctgaggagcgaggccatgtcctcggtggcggccaaagtgcgagcagcccgagcgtttggagagtacctgtcccagagtcaccctgagaaccgcaacggcgcagatcacctgctggctgatgcctactctggccacgacgggtcccccgagatgcagccggccccccagaacaagcgccgcctgtccctcgtctccaacggctgctacgagggcagcctctcagaggagcccagcattaggaagcccgcaggcgagggccctcagcctcgagtgtacaccatctctggggagcctgccctgctgcccagccctgaggcggaggccattgagctggcggtggtgaaggggcggcggcagcggcaccctcaccatcacagccagcccctgcgcgccagccctggtggcagccgggaggacgtcagcaggccctgccagagctgggcgggcagccgccagggctccaaggagtgccccggatgtgcccagctggctcctggccccacccctcgggcctttgggctggaccagccacctctgcctgagacctccggtcgccgcaagaagctggagaggatgtacagcgttgaccgtgtgtctgacgacatccctattcgtacctggttccccaaggaaaatcttttcagcttccagacagcaaccacaactatgcaagcggttgggaacttccgcaaacacctgcgcatggtcggcagccggagggtgaaggcccagacgttcgctgagcggcgcgagcggagcttcagccggtcctggagcgaccccacccccatgaaagccgacacttcccacgactcccgagacagcagtgacctgcagagctcccactgcacgctggacgaggccttcgaggacctggactgggacactgagaagggcctggaggctgtggcctgcgacaccgaaggcttcgtgccaccaaaggtcatgctcatttcctccaaggtgcccaaggctgagtacatccccactatcatccgccgggatgacccctccatcatccccatcctctacgaccatgagcacgcaaccttcgaggacatccttgaggagatagagaggaagctgaacgtctaccacaagggagccaagatctggaaaatgctgattttctgccagggaggtcctggacacctctatctcctcaagaacaaggtggccacctttgccaaagtggagaaggaagaggacatgattcacttctggaagcggctgagccgcctgatgagcaaagtgaacccagagccgaacgtcatccacatcatgggctgctacattctggggaaccccaatggagagaagctgttccagaacctcaggaccctcatgactccttatagggtcaccttcgagtcacccctggagctctcagcccaagggaagcagatgatcgagacgtactttgacttccggttgtatcgcctgtggaagagccgccagcactcgaagctgctggactttgacgacgtcctgtgaggggcagaggcctccgcccagtcaccatcaggccactccctctgcaccgggacctggggctgggccgcctcgtgctccccgggactgtgtggctccggtctcgcctggagccacttcagggcacctcagacgttgctcaggttccccctgtgggttccggtcctcgctgcacccgtggccgcagaggctgcagtccctgggggccgggaggatcccgccctgtggcccgtggatgctcagcggccaggcactgacctgccatgcctcgcctggaggctcagctgtgggcatccctccatggggttcatagaaataagtgcaatttctacacccccgaaacaattcaaagggaagcagcatttcttgttaactagttaagcactatgctgctagttacagtgtaggcaccccggcccagcagcccagcagcccacatgtgttcaggaccctccctgcccaccccctccctgccgtatcgatcaccagcaccagggtggcccgtgtgcgtggggccagcgtcgccgggctgcccagcctggctctgtctacactggccgagtctctgggtctgtctacactggccgagtctccgactgtctgtgctttcacttacactcctcttgccaccccccatccctgcttacttagacctcagccggcgccggacccggtaggggcagtctgggcagcaggaaggaagggcgcagcgtcccctccttcagaggaggctctgggtggggcctgctccccatccccccaagcccacccagcactctcattgctgctgttgagttcagcttttaccagcctcagtgtggaggctccatcccagcacacaggcctggggcttggcaggggcccagctggggctgggccctgggttttgagaaactcgctggcaccacagtgggcccctggacccggccgcgcagctggtggactgtaggggctcctgactgggcacaggagctcccagcttttgtccacggccagcaggatgggctgtcgtgtatatagctggggcgagggggcaggccccccttgtgcagagccaggggtctgagggcacctggctgtgttcccagctgagggagggctggggcgggggccgggcttggaacgatgtacgataccctcatagtgaccattaaacctgatcctccaccgcggccgccgcgtgggtctgtcctctcagtgctttccaggggccttcctgtgcccagcttctgggcccactcctgtgaggtcactgctgcagggccttcctgcctggacagagttggagctaggccactagaccaccccacagggcatagccagggggaccagcacaggaggggacggagaggagctgcaggagggctggggggaggctgcagtctcggaggggggcctcgccgggtctggaggggacagcagagacagcccgttccccctgccgcctgagggcaccagggagagggctgtatgtccctcacgccacactgtgtgtgcagtcagcagtgtggccacagatgggggccactctctcaacctcaggtgtcctcagggcccagaccgctgctgggcacagccaggctggctgccagctggttccctgccccgtggctgggggacagagcagcacgtatcagctgggctagggtcagggggccactggtgcgcagcctggcacagcctggcaggcttgaggcccagtgtgctgggggtggtcacacagccgtcagccacctccagctcttccagggcattctagatggggtcccgggagggggcaggttttggtgccaatttgagtgtataaagttttaggtaaatacc

SEQ ID NO: 48929 - DNA, 3577 bp, Artificial Sequence
  derived and/or modified sequence
ggttcgggcagcgctctcccgggagcggcggcacgcgcggagcgccgggtgcggccatgcggggaccgggcccgaccccgagcccgaccccgagcccaagcccgagccggagcccgagcgagaccccgagcccgagcccgagcgcgacccccggtgcggcgcggctaccccggcggaggcggcgggcgcggggcgcgctctgaggcccgggggatgcgccgccgcctcgaccatgggcgccgccgcctccaggaggagggcgctgaggagcgaggccatgtcctcggtggcggccaaagtgcgagcagcccgagcgtttggagagtacctgtcccagagtcaccctgagaaccgcaacggcgcagatcacctgctggctgatgcctactctggccacgacgggtcccccgagatgcagccggccccccagaacaagcgccgcctgtccctcgtctccaacggctgctacgagggcagcctctcagaggagcccagcattaggaagcccgcaggcgagggccctcagcctcgagtgtacaccatctctggggagcctgccctgctgcccagccctgaggcggaggccattgagctggcggtggtgaaggggcggcggcagcggcaccctcaccatcacagccagcccctgcgcgccagccctggtggcagccgggaggacgtcagcaggccctgccagagctgggcgggcagccgccagggctccaaggagtgccccggatgtgcccagctggctcctggccccacccctcgggcctttgggctggaccagccacctctgcctgagacctccggtcgccgcaagaagctggagaggatgtacagcgttgaccgtgtgtctgacgacatccctattcgtacctggttccccaaggaaaatcttttcagcttccagacagcaaccacaactatgcaagccatctcgaacttccgcaaacacctgcgcatggtcggcagccggagggtgaaggcccagacgttcgctgagcggcgcgagcggagcttcagccggtcctggagcgaccccacccccatgaaagccgacacttcccacgactcccgagacagcagtgacctgcagagctcccactgcacgctggacgaggccttcgaggacctggactgggacactgagaagggcctggaggctgtggcctgcgacaccgaaggcttcgtgccaccaaaggtcatgctcatttcctccaaggtgcccaaggctgagtacatccccactatcatccgccgggatgacccctccatcatccccatcctctacgaccatgagcacgcaaccttcgaggacatccttgaggagatagagaggaagctgaacgtctaccacaagggagccaagatctggaaaatgctgattttctgccagggaggtcctggacacctctatctcctcaagaacaaggtggccacctttgccaaagtggagaaggaagaggacatgattcacttctggaagcggctgagccgcctgatgagcaaagtgaacccagagccgaacgtcatccacatcatgggctgctacattctggggaaccccaatggagagaagctgttccagaacctcaggaccctcatgactccttatagggtcaccttcgagtcacccctggagctctcagcccaagggaagcagatgatcgagacgtactttgacttccggttgtatcgcctgtggaagagccgccagcactcgaagctgctggactttgacgacgtcctgtgaggggcagaggcctccgcccagtcaccatcaggccactccctctgcaccgggacctggggctgggccgcctcgtgctccccgggactgtgtggctccggtctcgcctggagccacttcagggcacctcagacgttgctcaggttccccctgtgggttccggtcctcgctgcacccgtggccgcagaggctgcagtccctgggggccgggaggatcccgccctgtggcccgtggatgctcagcggccaggcactgacctgccatgcctcgcctggaggctcagctgtgggcatccctccatggggttcatagaaataagtgcaatttctacacccccgaaacaattcaaagggaagcagcatttcttgttaactagttaagcactatgctgctagttacagtgtaggcaccccggcccagcagcccagcagcccacatgtgttcaggaccctccctgcccaccccctccctgccgtatcgatcaccagcaccagggtggcccgtgtgcgtggggccagcgtcgccgggctgcccagcctggctctgtctacactggccgagtctctgggtctgtctacactggccgagtctccgactgtctgtgctttcacttacactcctcttgccaccccccatccctgcttacttagacctcagccggcgccggacccggtaggggcagtctgggcagcaggaaggaagggcgcagcgtcccctccttcagaggaggctctgggtggggcctgctccccatccccccaagcccacccagcactctcattgctgctgttgagttcagcttttaccagcctcagtgtggaggctccatcccagcacacaggcctggggcttggcaggggcccagctggggctgggccctgggttttgagaaactcgctggcaccacagtgggcccctggacccggccgcgcagctggtggactgtaggggctcctgactgggcacaggagctcccagcttttgtccacggccagcaggatgggctgtcgtgtatatagctggggcgagggggcaggccccccttgtgcagagccaggggtctgagggcacctggctgtgttcccagctgagggagggctggggcgggggccgggcttggaacgatgtacgataccctcatagtgaccattaaacctgatcctccaccgcggccgccgcgtgggtctgtcctctcagtgctttccaggggccttcctgtgcccagcttctgggcccactcctgtgaggtcactgctgcagggccttcctgcctggacagagttggagctaggccactagaccaccccacagggcatagccagggggaccagcacaggaggggacggagaggagctgcaggagggctggggggaggctgcagtctcggaggggggcctcgccgggtctggaggggacagcagagacagcccgttccccctgccgcctgagggcaccagggagagggctgtatgtccctcacgccacactgtgtgtgcagtcagcagtgtggccacagatgggggccactctctcaacctcaggtgtcctcagggcccagaccgctgctgggcacagccaggctggctgccagctggttccctgccccgtggctgggggacagagcagcacgtatcagctgggctagggtcagggggccactggtgcgcagcctggcacagcctggcaggcttgaggcccagtgtgctgggggtggtcacacagccgtcagccacctccagctcttccagggcattctagatggggtcccgggagggggcaggttttggtgccaatttgagtgtataaagttttaggtaaatacc

SEQ ID NO: 48930 - DNA, 1524 bp, Artificial Sequence
  derived and/or modified sequence
atgggcgccgccgccagccggcggcgggccctgcggagcgaggccatgtcatccgtggctgctaaagtgagggccgccagagccttcggtgagtatctcagccagagccaccccgagaatcgcaacggggcggaccatctcctggccgacgcctattccggtcatgacggtagcccagagatgcagcccgcccctcaaaacaagcgtcgtctctccttggtcagtaacggctgttacgagggctccttgagcgaggagccctcgatccgcaagcccgccggagaagggccacagcccagagtgtataccatctctggggagccagcgttactaccatcccccgaagctgaagccattgaactcgccgtggtgaagggaagaaggcagagacacccccaccatcatagccagcccctcagagcctcccctggtggatcaagggaggatgtgtcaagaccctgtcagtcttgggctgggagtagacaggggagcaaggaatgcccaggttgtgcccagctggcccccggccccacaccccgcgcgtttggcctcgatcagcccccacttcccgagactagtggcagaagaaagaagctggagcgtatgtatagcgtggacagagtgtcagacgacattcccatccgcacctggtttccaaaggaaaatctgtttagcttccagactgcaaccactactatgcaagcagtgggcaacttcagaaagcatctgcgaatggttggctccaggagagttaaagcgcagacttttgccgaaaggagggagcgcagtttttcacgatcttggtctgatcccacgcccatgaaagccgatacaagccacgactcccgcgatagcagcgacctgcagtcttctcactgtacgctagatgaagcgttcgaggacctggactgggacaccgagaaagggttggaggcggtcgcatgcgatacagaagggtttgtgccacccaaggtgatgcttatcagcagtaaagtacctaaggccgagtacatccctaccatcattcgacgggacgacccctctatcatacccatcctctacgaccacgaacatgcaaccttcgaagacattctcgaagagatcgaaaggaagctgaacgtttatcacaaaggggccaagatctggaagatgctcatcttttgccagggagggcccggacacctgtacctgctgaagaacaaagtggctactttcgccaaagtagaaaaagaggaagacatgattcacttctggaaaagattgagccggctgatgtccaaggtgaatccagaaccaaatgtgatccacatcatgggctgctacatcctggggaatcccaacggagaaaagttgtttcagaatttgcggacactcatgaccccttatagggtcacttttgagtccccattggaattgtctgcacagggcaagcagatgatagaaacctattttgatttccggctgtataggttgtggaagtctaggcagcacagtaaactactggatttcgacgacgtactgtag

SEQ ID NO: 48931 - DNA, 1524 bp, Artificial Sequence
  derived and/or modified sequence
atgggcgccgccgccagccggcggcgggccctgcggagcgaggccatgtccagcgtggcggcgaaggtgcgcgcagcccgagcatttggggagtatcttagtcagtctcatcccgagaatcggaacggcgccgaccacctgctggcagacgcatattccggacacgacgggagtccagagatgcagcctgctccacagaacaaacggaggctatctctcgtgtctaatgggtgctatgaaggtagtctgagtgaagagccatccattcgcaagcccgccggagagggccctcagccacgcgtctacacaataagtggtgagcccgccctgttgccatctcctgaagctgaggctatcgagctagccgtggtcaagggccgtcggcagaggcacccgcaccaccatagccagcccttacgcgccagcccgggtgggtctcgagaagatgtatctcggccctgtcagagctgggcaggcagcagacagggctcaaaggaatgtccaggttgcgcacagctggcccccggaccaacgcctagagcatttgggcttgatcagccaccgttgcctgagacctccgggcgccgaaagaagctagagcgcatgtactcagtggatagagtgtcagacgatatacctatcagaacttggttcccaaaagaaaacctgtttagttttcagacagccaccaccaccatgcaggccatctctaacttccgcaaacatttgcggatggtcggctcgcggcgggtgaaagcacagaccttcgccgagcgacgggaaagatcattttcaaggagttggtctgatccaacccctatgaaagccgacacatcccacgatagcagagatagctcggacctgcaaagtagtcactgtaccctcgacgaagcttttgaggacttggactgggatacagaaaaaggactcgaggcagtagcctgtgatacagaggggtttgtgcctcctaaggtgatgcttatttcatcaaaggttcccaaggccgaatatattcccacaattattcgccgggacgacccatcaattatccccattctctacgatcatgaacacgctaccttcgaagacatattggaggagatagagaggaagctcaatgtctaccacaagggggcaaaaatctggaaaatgctcatcttttgtcagggcgggcctggacacctgtatctcctgaagaacaaggtcgccacttttgcaaaggtggagaaggaagaggatatgattcacttttggaagaggttaagcaggctgatgagtaaagtcaacccggaaccgaacgtgattcatataatggggtgttacattctgggtaacccgaatggagaaaagctgttccagaatttgagaaccctaatgacaccctacagagtcacctttgaatctcctctcgaactttccgctcagggcaagcagatgattgaaacgtactttgactttcgtctgtaccgattatggaagtcccgccagcactctaagctcctggactttgatgacgttctgtag

SEQ ID NO: 48932 - DNA, 1524 bp, Artificial Sequence
  derived and/or modified sequence
atgggagcagcagccagccggcgtcgagcactgagaagtgaggctatgagctctgtcgccgcaaaggtgagggctgcacgtgcattcggtgagtacctgtcccaaagccatcctgaaaatagaaacggtgccgatcacttgctggctgacgcctatagtgggcatgatggctcccctgagatgcagcctgcaccccagaacaagcgcagactgtcactggtgtctaatgggtgctacgaaggctccctctctgaggagccttccattcggaaaccagcaggcgaaggaccacagccgagagtgtataccatttcaggggaacccgctttgttgccaagcccggaggccgaagccattgaactggctgtcgtcaagggaaggcgccaacggcatccacaccatcattcccagccacttcgcgcaagcccagggggtagccgggaagatgtatcacggccatgtcagagctgggcgggatcaagacaagggtctaaagaatgtcccggatgcgctcagctggctcctggacccacccctcgggctttcgggctcgaccagcctccattaccagagacttccggcaggagaaaaaaactggaacgcatgtactccgtcgatcgcgtgagtgacgacatccccattcgaacatggtttccgaaggaaaatttgttttccttccagacagccactaccaccatgcaggccgtggggaattttagaaaacatctcagaatggttggcagtaggcgggtcaaggctcaaaccttcgccgagcgccgtgagcggtcattctcgcgaagctggagcgatccaacccccatgaaggcagatacaagccacgattctcgagattcttccgatctgcagtcctcccactgcacactggatgaggcctttgaagatctggattgggatactgagaaaggtctggaagccgtggcatgtgacaccgaaggctttgtgccaccaaaggttatgcttattagttcaaaagtgcccaaagccgagtacatacccacaattatccggagagacgatcctagcatcattccaattctttacgaccacgagcacgccacattcgaggatatacttgaggaaatagaacggaaactcaatgtttaccacaagggagccaaaatctggaagatgttaatcttttgccagggtggtcccggacatctgtatctgttgaaaaacaaggtagcgacattcgcgaaagtcgaaaaagaagaggacatgatccatttctggaagcggctgtcaagactgatgagcaaggttaacccagagcccaacgttatccacatcatggggtgttacatcctaggcaaccccaacggcgaaaagctctttcaaaacttgcgcacactgatgaccccttatcgcgttacattcgagtctccgttggagctcagcgcacaaggtaaacagatgatcgagacttattttgacttccggctgtacagactctggaagtctaggcagcattctaagctgctcgacttcgacgacgtgctgtag

SEQ ID NO: 48933 - DNA, 1524 bp, Artificial Sequence
  derived and/or modified sequence
atgggcgcagccgctagccgaagaagagccctgcgcagtgaagccatgagctcagtggccgctaaggtccgggcagccagagccttcggggagtatttgagtcagtcccaccctgaaaaccgcaatggtgcagaccatctcctggccgacgcctactctggtcatgacgggtccccagaaatgcagccagccccacagaataagcgacgcctgagtctggtttcaaatggatgctatgagggcagcctgagtgaggagccatccattcgcaagcccgctggtgaggggcctcaaccaagagtgtacactatctccggcgaacctgctttacttccatcccctgaggcggaggcaatcgagctggccgtggtgaaagggcgaaggcagcgtcacccccaccaccacagtcagcccctccgggcatctcctggcggaagccgggaagacgtttcccggccatgtcagagctgggctgggtcacgccagggcagtaaggaatgtccaggctgcgcgcagctggcccctggacccacccctagagcctttggacttgatcagccgcctctgccagagacatccgggaggagaaaaaagctggagaggatgtactctgtggacagagtttctgacgatattccaatccgcacgtggtttccgaaagaaaatctgtttagtttccagacagctacaaccaccatgcaggcgattagcaacttcaggaaacatctgcgtatggttggctcccggagggttaaggctcagacttttgctgaaaggagggagcgcagcttttctcgatcttggtcagaccctaccccgatgaaggcggacaccagccacgactcacgcgatagctctgaccttcagagttcacattgtaccttggacgaggcatttgaggacctggactgggatacagagaaaggtcttgaggctgtggcctgcgatacagaaggcttcgtacctcccaaagttatgctcattagctctaaggtccccaaagctgaatacataccaacaatcattcggagggacgatcctagtataatcccgattttgtacgaccatgagcatgccacctttgaggacatactggaggagatcgagcgcaaactcaacgtgtaccacaagggagcaaaaatctggaagatgttgatcttttgccaaggtggtccagggcacctttacctgttaaagaacaaggtggctacatttgctaaggtcgaaaaggaggaggatatgatacacttctggaaacgcctgagcaggctgatgagtaaagtaaatccggaaccaaatgtgattcacattatgggttgttatatcttagggaatcctaatggcgaaaagctgttccagaacctgaggaccttaatgacgccataccgagtcactttcgagtcccccctggagctcagtgcccaagggaaacaaatgatcgaaacgtatttcgattttaggttgtacagactttggaagagccgtcagcatagcaagctgcttgacttcgacgacgttctgtag

SEQ ID NO: 48934 - DNA, 1524 bp, Artificial Sequence
  derived and/or modified sequence
atgggcgccgccgccagcagaagaagagccctgagaagcgaggccatgagcagcgtggccgccaaggtgagagccgccagagccttcggcgagtacctgagccagagccaccccgagaacagaaacggcgccgaccacctgctggccgacgcctacagcggccacgacggcagccccgagatgcagcccgccccccagaacaagagaagactgagcctggtgagcaacggctgctacgagggcagcctgagcgaggagcccagcatcagaaagcccgccggcgagggcccccagcccagagtgtacaccatcagcggcgagcccgccctgctgcccagccccgaggccgaggccatcgagctggccgtggtgaagggcagaagacagagacacccccaccaccacagccagcccctgagagccagccccggcggcagcagagaggacgtgagcagaccctgccagagctgggccggcagcagacagggcagcaaggagtgccccggctgcgcccagctggcccccggccccacccccagagccttcggcctggaccagccccccctgcccgagaccagcggcagaagaaagaagctggagagaatgtacagcgtggacagagtgagcgacgacatccccatcagaacctggttccccaaggagaacctgttcagcttccagaccgccaccaccaccatgcaggccgtgggcaacttcagaaagcacctgagaatggtgggcagcagaagagtgaaggcccagaccttcgccgagagaagagagagaagcttcagcagaagctggagcgaccccacccccatgaaggccgacaccagccacgacagcagagacagcagcgacctgcagagcagccactgcaccctggacgaggccttcgaggacctggactgggacaccgagaagggcctggaggccgtggcctgcgacaccgagggcttcgtgccccccaaggtgatgctgatcagcagcaaggtgcccaaggccgagtacatccccaccatcatcagaagagacgaccccagcatcatccccatcctgtacgaccacgagcacgccaccttcgaggacatcctggaggagatcgagagaaagctgaacgtgtaccacaagggcgccaagatctggaagatgctgatcttctgccagggcggccccggccacctgtacctgctgaagaacaaggtggccaccttcgccaaggtggagaaggaggaggacatgatccacttctggaagagactgagcagactgatgagcaaggtgaaccccgagcccaacgtgatccacatcatgggctgctacatcctgggcaaccccaacggcgagaagctgttccagaacctgagaaccctgatgaccccctacagagtgaccttcgagagccccctggagctgagcgcccagggcaagcagatgatcgagacctacttcgacttcagactgtacagactgtggaagagcagacagcacagcaagctgctggacttcgacgacgtgctgtag

SEQ ID NO: 48935 - DNA, 1524 bp, Artificial Sequence
  derived and/or modified sequence
atgggcgccgccgccagcagaagaagagccctgagaagcgaggccatgagcagcgtggccgccaaggtgagagccgccagagccttcggcgagtacctgagccagagccaccccgagaacagaaacggcgccgaccacctgctggccgacgcctacagcggccacgacggcagccccgagatgcagcccgccccccagaacaagagaagactgagcctggtgagcaacggctgctacgagggcagcctgagcgaggagcccagcatcagaaagcccgccggcgagggcccccagcccagagtgtacaccatcagcggcgagcccgccctgctgcccagccccgaggccgaggccatcgagctggccgtggtgaagggcagaagacagagacacccccaccaccacagccagcccctgagagccagccccggcggcagcagagaggacgtgagcagaccctgccagagctgggccggcagcagacagggcagcaaggagtgccccggctgcgcccagctggcccccggccccacccccagagccttcggcctggaccagccccccctgcccgagaccagcggcagaagaaagaagctggagagaatgtacagcgtggacagagtgagcgacgacatccccatcagaacctggttccccaaggagaacctgttcagcttccagaccgccaccaccaccatgcaggccatcagcaacttcagaaagcacctgagaatggtgggcagcagaagagtgaaggcccagaccttcgccgagagaagagagagaagcttcagcagaagctggagcgaccccacccccatgaaggccgacaccagccacgacagcagagacagcagcgacctgcagagcagccactgcaccctggacgaggccttcgaggacctggactgggacaccgagaagggcctggaggccgtggcctgcgacaccgagggcttcgtgccccccaaggtgatgctgatcagcagcaaggtgcccaaggccgagtacatccccaccatcatcagaagagacgaccccagcatcatccccatcctgtacgaccacgagcacgccaccttcgaggacatcctggaggagatcgagagaaagctgaacgtgtaccacaagggcgccaagatctggaagatgctgatcttctgccagggcggccccggccacctgtacctgctgaagaacaaggtggccaccttcgccaaggtggagaaggaggaggacatgatccacttctggaagagactgagcagactgatgagcaaggtgaaccccgagcccaacgtgatccacatcatgggctgctacatcctgggcaaccccaacggcgagaagctgttccagaacctgagaaccctgatgaccccctacagagtgaccttcgagagccccctggagctgagcgcccagggcaagcagatgatcgagacctacttcgacttcagactgtacagactgtggaagagcagacagcacagcaagctgctggacttcgacgacgtgctgtag

SEQ ID NO: 48936 - protein, 505 aa, Artificial Sequence
  derived and/or modified sequence
MGAAASRRRALRSEAMSSVAAKVRAARAFGEYLSQSHPENRNGADHLLADAYSGHDGSPEMQPAPQNKRRLSLVSNGCYEGSLSEEPSIRKPAGEGPQPRVYTISGEPALLPSPEAEAIELAVVKGRRQRHPHHHSQPLRASPGGSREDVSRPCQSWAGSRQGSKECPGCAQLAPGPTPRAFGLDQPPLPETSGRRKKLERMYSVDRVSDDIPIRTWFPKENLFSFQTATTTMQANFRKHLRMVGSRRVKAQTFAERRERSFSRSWSDPTPMKADTSHDSRDSSDLQSSHCTLDEAFEDLDWDTEKGLEAVACDTEGFVPPKVMLISSKVPKAEYIPTIIRRDDPSIIPILYDHEHATFEDILEEIERKLNVYHKGAKIWKMLIFCQGGPGHLYLLKNKVATFAKVEKEEDMIHFWKRLSRLMSKVNPEPNVIHIMGCYILGNPNGEKLFQNLRTLMTPYRVTFESPLELSAQGKQMIETYFDFRLYRLWKSRQHSKLLDFDDVL

SEQ ID NO: 48937 - DNA, 1518 bp, Artificial Sequence
  derived and/or modified sequence
atgggggccgcagcttcccggcggagagccctgcgctcagaggccatgtcctccgtagccgcgaaagttcgggccgcccgcgcgtttggcgagtaccttagtcagtcacatcccgaaaaccgcaatggggctgaccatcttttagccgacgcatactccggccatgatggctctcctgagatgcaaccagcgccacagaacaagagaaggctgagtctcgtgtcgaatgggtgctacgagggtagcctaagcgaagaaccaagtatccgaaaacctgcgggggaaggaccccaacccagggtgtacaccatttctggtgaacctgccctgctccccagcccagaagccgaagcgatcgagctggcagtggtgaagggacgacgtcagcgtcacccgcaccatcatagccagcctttgagggcgtctcctggcggctctagagaagacgttagcagaccatgccagtcatgggcaggctcccggcagggatctaaagaatgcccaggctgtgctcagctcgcgccagggcccactccacgtgctttcgggctggaccagcccccccttccagagacatctggtagaagaaaaaaactcgaacgcatgtactccgtggaccgtgtgagcgatgatattcctattcggacctggtttcctaaagaaaacttattcagttttcagactgcaaccaccaccatgcaggctaacttccgcaaacacttgagaatggttgggagcagacgggtgaaggcccaaacttttgccgaacggagggaacggtcattctccagaagctggagtgatcccacacctatgaaagccgatacgtcacacgactcccgtgattcctctgacctgcagtctagccactgtactctcgatgaggcttttgaggacttggactgggacacggaaaaggggctcgaagccgttgcatgtgatactgagggattcgtgcctccaaaggtcatgttgataagctcaaaagtgccaaaagccgagtatattccaacaattattcgacgcgacgatcccagtattatccccattctatacgatcacgagcacgcaactttcgaggatatcctggaagaaattgaacggaagctcaatgtctaccacaagggagccaagatctggaagatgcttatattttgtcaggggggccccggccacctctatttactgaagaacaaggttgctacctttgcaaaagttgagaaggaagaggatatgatccatttttggaagagactgagcagactgatgtccaaagttaatcctgaaccaaatgtcattcatataatgggctgttacattcttggtaatcctaacggtgagaaactatttcagaatcttcggacattgatgacaccttaccgcgtcacgttcgaatcccctttggagctttcggctcaaggcaaacagatgatagagacatacttcgactttagattataccgcctatggaagagtagacagcattccaaactgctcgacttcgatgatgtcctctag

SEQ ID NO: 48938 - DNA, 984 bp, Artificial Sequence
  derived and/or modified sequence
atgcagttgggacgccgccttgatcccgagagacaagcactccacctgtgctcaggggttgaaggggaaccttggaaagccgtcgctgggcgtgcactcggaggaatctgcctgtgggtagggggcggcgccagaagccagggggagcactggctgccaactcccaaggggaacttccgcaaacacctgagaatggttggcagccgccgggtgaaagcccaaaccttcgctgagcgcagagaaagatccttctcccggtcctggagtgacccaacacccatgaaggccgatacgtcccacgactcgcgggactcctctgacctccaaagtagccactgcactttagacgaagccttcgaagacctggactgggataccgagaaaggacttgaagccgtagcctgcgacactgagggattcgttccaccaaaagtcatgttgatcagcagtaaggtgccaaaggctgaatatatcccgacgattattcgaagagacgacccaagcatcatccctatactgtacgatcatgaacatgcgacatttgaagatattctggaggaaatagagcgcaagctcaacgtgtaccacaagggagcaaagatctggaagatgctgatcttctgtcagggtggacccggccatttgtacttactgaagaataaggtcgctacttttgctaaggtggagaaggaggaggacatgatccacttttggaagcggcttagccgcttgatgagtaaggtcaaccccgaacctaatgtgatacacattatgggctgttacatcctcggcaacccaaacggggaaaagctcttccaaaacttgcggacactgatgactccctatcgcgtcaccttcgaatcacctctggagctgtccgcacaaggtaagcaaatgatagagacatatttcgatttccgtctgtatagattgtggaaatctcgtcaacacagcaagctcttggactttgatgatgtactttag

SEQ ID NO: 48939 - DNA, 1518 bp, Artificial Sequence
  derived and/or modified sequence
atgggcgccgccgccagcagaagaagagccctgcggtctgaggccatgagctctgtggccgccaaggtgcgggccgcccgggcctttggagagtacctgagccagagccacccagaaaatagaaatggagctgaccacctgctggctgatgcctacagcggccatgatggcagccctgagatgcagcctgccccccagaacaagaggcggctgagcctggtgtccaatggctgctatgagggcagcctgtctgaggagcccagcatcaggaagccagctggggagggcccccagccccgggtgtacaccatctctggagagcccgccctgctgcccagccctgaggccgaggccatcgagctggccgtggtgaagggccggcggcagaggcacccccaccaccacagccagcccctgcgggccagccctgggggcagccgggaggatgtgtcccggccctgccagagctgggccggcagccggcagggcagcaaggagtgccccggctgtgcccagctggcccctggccccaccccccgggccttcggcctggaccagccccccctgcctgagaccagcggccgcaggaagaagctggagaggatgtacagcgtggacagagtgtctgatgacatccccatccgcacctggttccccaaggaaaatctcttctccttccagacagccaccaccaccatgcaggccaacttcaggaagcacctgaggatggtgggcagcagaagagtgaaggcccagacctttgctgagcggcgggagaggagcttcagccgctcctggagcgaccccacccccatgaaggctgacaccagccatgacagccgggacagcagtgacctgcagagcagccactgcaccctggatgaggcctttgaggacctggactgggacacagagaagggcctggaggccgtggcctgtgacacagagggctttgtgccccccaaggtgatgctgatcagcagcaaggtgcccaaggccgagtacatccccaccatcatcagaagagatgaccccagcatcatccccatcctgtatgaccacgagcacgccacctttgaggacatcctggaggagattgaaaggaagctgaatgtgtaccacaagggggccaagatctggaagatgctgatcttctgccagggcggccctggccacctgtacctgctgaagaacaaggtggccacctttgccaaggtggagaaggaggaggacatgatccacttctggaagaggctgagccggctgatgagcaaggtgaaccctgagcccaacgtcatccacatcatgggctgctacatcctgggcaaccccaatggagagaagctgttccagaacctgcggaccctgatgaccccctacagagtgacctttgagagccccctggagctgagcgcccagggcaagcagatgattgagacctactttgacttccggctgtaccgcctgtggaagagccggcagcacagcaagctgctggactttgatgatgtgctgtag

SEQ ID NO: 48940 - DNA, 984 bp, Artificial Sequence
  derived and/or modified sequence
atgcagctgggccgccgcctggaccctgagcggcaggccctgcacctgtgcagcggcgtggagggggagccctggaaggctgtggccggccgggccctgggcggcatctgcctgtgggtgggcggcggggcccggagccagggcgagcactggctgcccacccccaagggcaacttcaggaagcacctgaggatggtgggcagcagaagagtgaaggcccagacctttgctgagcggcgggagaggagcttcagccgctcctggagcgaccccacccccatgaaggctgacaccagccatgacagccgggacagcagtgacctgcagagcagccactgcaccctggatgaggcctttgaggacctggactgggacacagagaagggcctggaggccgtggcctgtgacacagagggctttgtgccccccaaggtgatgctgatcagcagcaaggtgcccaaggccgagtacatccccaccatcatcagaagagatgaccccagcatcatccccatcctgtatgaccacgagcacgccacctttgaggacatcctggaggagattgaaaggaagctgaatgtgtaccacaagggggccaagatctggaagatgctgatcttctgccagggcggccctggccacctgtacctgctgaagaacaaggtggccacctttgccaaggtggagaaggaggaggacatgatccacttctggaagaggctgagccggctgatgagcaaggtgaaccctgagcccaacgtcatccacatcatgggctgctacatcctgggcaaccccaatggagagaagctgttccagaacctgcggaccctgatgaccccctacagagtgacctttgagagccccctggagctgagcgcccagggcaagcagatgattgagacctactttgacttccggctgtaccgcctgtggaagagccggcagcacagcaagctgctggactttgatgatgtgctgtag

SEQ ID NO: 48941 - DNA, 3571 bp, Artificial Sequence
  derived and/or modified sequence
ggttcgggcagcgctctcccgggagcggcggcacgcgcggagcgccgggtgcggccatgcggggaccgggcccgaccccgagcccgaccccgagcccaagcccgagccggagcccgagcgagaccccgagcccgagcccgagcgcgacccccggtgcggcgcggctaccccggcggaggcggcgggcgcggggcgcgctctgaggcccgggggatgcgccgccgcctcgaccatgggcgccgccgcctccaggaggagggcgctgaggagcgaggccatgtcctcggtggcggccaaagtgcgagcagcccgagcgtttggagagtacctgtcccagagtcaccctgagaaccgcaacggcgcagatcacctgctggctgatgcctactctggccacgacgggtcccccgagatgcagccggccccccagaacaagcgccgcctgtccctcgtctccaacggctgctacgagggcagcctctcagaggagcccagcattaggaagcccgcaggcgagggccctcagcctcgagtgtacaccatctctggggagcctgccctgctgcccagccctgaggcggaggccattgagctggcggtggtgaaggggcggcggcagcggcaccctcaccatcacagccagcccctgcgcgccagccctggtggcagccgggaggacgtcagcaggccctgccagagctgggcgggcagccgccagggctccaaggagtgccccggatgtgcccagctggctcctggccccacccctcgggcctttgggctggaccagccacctctgcctgagacctccggtcgccgcaagaagctggagaggatgtacagcgttgaccgtgtgtctgacgacatccctattcgtacctggttccccaaggaaaatcttttcagcttccagacagcaaccacaactatgcaagcgaacttccgcaaacacctgcgcatggtcggcagccggagggtgaaggcccagacgttcgctgagcggcgcgagcggagcttcagccggtcctggagcgaccccacccccatgaaagccgacacttcccacgactcccgagacagcagtgacctgcagagctcccactgcacgctggacgaggccttcgaggacctggactgggacactgagaagggcctggaggctgtggcctgcgacaccgaaggcttcgtgccaccaaaggtcatgctcatttcctccaaggtgcccaaggctgagtacatccccactatcatccgccgggatgacccctccatcatccccatcctctacgaccatgagcacgcaaccttcgaggacatccttgaggagatagagaggaagctgaacgtctaccacaagggagccaagatctggaaaatgctgattttctgccagggaggtcctggacacctctatctcctcaagaacaaggtggccacctttgccaaagtggagaaggaagaggacatgattcacttctggaagcggctgagccgcctgatgagcaaagtgaacccagagccgaacgtcatccacatcatgggctgctacattctggggaaccccaatggagagaagctgttccagaacctcaggaccctcatgactccttatagggtcaccttcgagtcacccctggagctctcagcccaagggaagcagatgatcgagacgtactttgacttccggttgtatcgcctgtggaagagccgccagcactcgaagctgctggactttgacgacgtcctgtgaggggcagaggcctccgcccagtcaccatcaggccactccctctgcaccgggacctggggctgggccgcctcgtgctccccgggactgtgtggctccggtctcgcctggagccacttcagggcacctcagacgttgctcaggttccccctgtgggttccggtcctcgctgcacccgtggccgcagaggctgcagtccctgggggccgggaggatcccgccctgtggcccgtggatgctcagcggccaggcactgacctgccatgcctcgcctggaggctcagctgtgggcatccctccatggggttcatagaaataagtgcaatttctacacccccgaaacaattcaaagggaagcagcatttcttgttaactagttaagcactatgctgctagttacagtgtaggcaccccggcccagcagcccagcagcccacatgtgttcaggaccctccctgcccaccccctccctgccgtatcgatcaccagcaccagggtggcccgtgtgcgtggggccagcgtcgccgggctgcccagcctggctctgtctacactggccgagtctctgggtctgtctacactggccgagtctccgactgtctgtgctttcacttacactcctcttgccaccccccatccctgcttacttagacctcagccggcgccggacccggtaggggcagtctgggcagcaggaaggaagggcgcagcgtcccctccttcagaggaggctctgggtggggcctgctccccatccccccaagcccacccagcactctcattgctgctgttgagttcagcttttaccagcctcagtgtggaggctccatcccagcacacaggcctggggcttggcaggggcccagctggggctgggccctgggttttgagaaactcgctggcaccacagtgggcccctggacccggccgcgcagctggtggactgtaggggctcctgactgggcacaggagctcccagcttttgtccacggccagcaggatgggctgtcgtgtatatagctggggcgagggggcaggccccccttgtgcagagccaggggtctgagggcacctggctgtgttcccagctgagggagggctggggcgggggccgggcttggaacgatgtacgataccctcatagtgaccattaaacctgatcctccaccgcggccgccgcgtgggtctgtcctctcagtgctttccaggggccttcctgtgcccagcttctgggcccactcctgtgaggtcactgctgcagggccttcctgcctggacagagttggagctaggccactagaccaccccacagggcatagccagggggaccagcacaggaggggacggagaggagctgcaggagggctggggggaggctgcagtctcggaggggggcctcgccgggtctggaggggacagcagagacagcccgttccccctgccgcctgagggcaccagggagagggctgtatgtccctcacgccacactgtgtgtgcagtcagcagtgtggccacagatgggggccactctctcaacctcaggtgtcctcagggcccagaccgctgctgggcacagccaggctggctgccagctggttccctgccccgtggctgggggacagagcagcacgtatcagctgggctagggtcagggggccactggtgcgcagcctggcacagcctggcaggcttgaggcccagtgtgctgggggtggtcacacagccgtcagccacctccagctcttccagggcattctagatggggtcccgggagggggcaggttttggtgccaatttgagtgtataaagttttaggtaaatacc

SEQ ID NO: 48942 - DNA, 1523 bp, Artificial Sequence
  derived and/or modified sequence
gaatgcagctcgggaggagacttgatccagagcgccaggcactgcacctttgttctggagttgaaggggagccctggaaggctgtcgcgggaagagcactgggtgggatttgcctttgggtgggaggtggtgccaggagccagggagagcactggcttcccacaccgaaggggaacttccgcaaacacctgcgcatggtcggcagccggagggtgaaggcccagacgttcgctgagcggcgcgagcggagcttcagccggtcctggagcgaccccacccccatgaaagccgacacttcccacgactcccgagacagcagtgacctgcagagctcccactgcacgctggacgaggccttcgaggacctggactgggacactgagaagggcctggaggctgtggcctgcgacaccgaaggcttcgtgccaccaaaggtcatgctcatttcctccaaggtgcccaaggctgagtacatccccactatcatccgccgggatgacccctccatcatccccatcctctacgaccatgagcacgcaaccttcgaggacatccttgaggagatagagaggaagctgaacgtctaccacaagggagccaagatctggaaaatgctgattttctgccagggaggtcctggacacctctatctcctcaagaacaaggtggccacctttgccaaagtggagaaggaagaggacatgattcacttctggaagcggctgagccgcctgatgagcaaagtgaacccagagccgaacgtcatccacatcatgggctgctacattctggggaaccccaatggagagaagctgttccagaacctcaggaccctcatgactccttatagggtcaccttcgagtcacccctggagctctcagcccaagggaagcagatgatcgagacgtactttgacttccggttgtatcgcctgtggaagagccgccagcactcgaagctgctggactttgacgacgtcctgtgaggggcagaggcctccgcccagtcaccatcaggccactccctctgcaccgggacctggggctgggccgcctcgtgctccccgggactgtgtggctccggtctcgcctggagccacttcagggcacctcagacgttgctcaggttccccctgtgggttccggtcctcgctgcacccgtggccgcagaggctgcagtccctgggggccgggaggatcccgccctgtggcccgtggatgctcagcggccaggcactgacctgccatgcctcgcctggaggctcagctgtgggcatccctccatggggttcatagaaataagtgcaatttctacacccccgaaacaattcaaagggaagcagcatttcttgttaactagttaagcactatgctgctagttacagtgtaggcaccccggcccagcagcccagcagcccacatgtgttcaggaccctccctgcccaccccctccctgccgtatcgatcaccagcaccagggtggcccgtgtgcgtggggccagcgtcgccgggctgcccagcct

SEQ ID NO: 48943 - DNA, 1518 bp, Artificial Sequence
  derived and/or modified sequence
atgggcgccgccgccagccggcggcgggccctgcggagcgaggccatgtcttcagtggcagccaaagtccgggctgcgcgagcgtttggagagtaccttagccaatcacacccagaaaaccgcaacggcgccgaccaccttttggccgatgcatactccgggcacgacggaagcccggagatgcagccggccccccagaacaagagacggctctccctggtgtctaacggctgctacgagggtagcctgtctgaagaaccttccatccggaagcctgcgggcgaaggtccccagccccgcgtttacaccatttccggtgagcctgcccttcttccttcccctgaagccgaggccatcgaactcgctgttgttaaaggacggagacaaaggcatccccaccatcattctcaaccactgcgggccagccccggaggctctagggaagacgtatcccgaccttgccaaagttgggccggctcccgtcaagggagtaaggagtgccccggatgcgcgcagctggcaccgggcccgaccccaagagcattcgggctcgatcagcctcctcttccagagacatccggacggcgcaagaaactggaaagaatgtattccgtcgacagggtcagcgacgatattcctatacgcacgtggtttcctaaagagaaccttttctcgttccaaaccgccactactacgatgcaagcaaattttaggaaacatttgaggatggtagggtccaggcgggtgaaagcccagacgttcgctgaaaggcgggagagatctttttcccgctcctggtccgatccaactcctatgaaggcagatacgtctcatgacagcagagattcttccgacctgcaaagctcacactgcactttggacgaggcctttgaagatctggactgggacacagagaaaggactcgaggctgtggcgtgtgacactgaggggtttgtccctccaaaggtgatgctgatcagctccaaagtacccaaggcagaatatatccccacaatcatcaggcgagatgatccgtctattatacctatcctgtatgaccacgaacatgctacgttcgaggacatcctggaggagattgaacggaaactcaacgtgtaccataagggagcaaaaatctggaagatgctcatcttctgccaaggcgggcctggccatctatacctgctaaaaaataaggttgccacctttgctaaggtcgaaaaggaagaagatatgatacatttctggaagcggctatcacgcctgatgagtaaggtgaaccctgaacccaatgtgatccacatcatgggatgctacattctgggcaatcctaatggcgaaaagctcttccagaacctacgcaccctcatgacaccgtaccgggtgacttttgagagtcccctagaactctcggctcaagggaaacagatgatcgagacttactttgattttcggctttaccgtctttggaagagtaggcagcactcaaaacttttggactttgacgacgtgctgtag

SEQ ID NO: 48944 - DNA, 984 bp, Artificial Sequence
  derived and/or modified sequence
atgcagctgggccggcggctggaccccgagcggcaggccctgcacctgtgcagtggagtcgagggcgaaccctggaaagccgttgctggccgagccctggggggaatatgcctttgggtgggcggcggagcccgatcgcagggcgagcattggctgcctaccccgaagggaaacttcagaaagcacctgcgcatggtgggcagccggcgcgtcaaagcacagactttcgcagagagacgagagagaagtttctccaggtcatggagcgatcctactccaatgaaagccgatacatcccacgattcaagggacagctcggatctgcagtctagccactgtaccctggacgaagcttttgaggacctggactgggacactgaaaaaggactggaggcagtggcttgtgatacagagggcttcgtgccaccaaaggtcatgttgataagttctaaggtgccaaaagcagagtacatccctaccatcataagaagggacgaccctagcattatccctatcttatatgaccacgagcacgcaacgttcgaggatatccttgaagaaatcgagcgcaagttaaatgtgtatcacaaaggggcaaagatctggaaaatgctaatcttctgccagggtggtcctggccacctgtatctgctgaagaataaagttgcaacattcgctaaggttgagaaggaggaggacatgattcatttttggaaacgattatcgcgcctcatgagcaaggtcaatccagaacccaatgtgatccatatcatgggatgttatatcttgggaaacccaaatggcgagaaactctttcagaacctacgcaccctcatgacgccttatcgcgtgacttttgaatctccgcttgagcttagcgcgcagggcaagcaaatgatcgaaacatatttcgacttcagactctataggttgtggaagtctagacagcacagcaagctgctggatttcgacgacgtcctctag

SEQ ID NO: 48945 - DNA, 1518 bp, Artificial Sequence
  derived and/or modified sequence
atgggagccgctgcaagtagaagacgggctctcaggtcagaagcgatgtcaagtgtggcagccaaggtgagggctgctagagcttttggggaatacctctcccagagccaccctgagaataggaatggcgctgaccatctgctggcggatgcttactctggccacgacgggagccccgagatgcagcccgcaccgcaaaataagcgcagactgagtttggtcagtaatggatgctacgaaggaagcctctctgaagaacccagtattcgcaagccagccggtgaaggcccacaacccagggtctataccattagtggcgaacctgccctcctcccgagcccagaggccgaagcgatagagctcgcagtggtgaaaggcagacgacaacgacaccctcatcatcattcacagccactgagggccagtcctgggggatcacgggaagacgtgagccgcccatgccagagctgggctggctccaggcagggcagcaaggagtgtcccggttgtgcccagctcgcacctggaccaactccccgtgctttcggactggatcaacctcccttaccagagaccagcggacgtagaaagaagctggagcgtatgtacagcgtggatcgcgtgtctgacgacatccctatacgaacatggttcccaaaggagaaccttttctcgtttcaaacagcaacgactaccatgcaggccaattttcggaaacacttgcgtatggtcgggtctaggcgggtgaaagcccagacctttgctgaacgacgggaacggagtttcagccgctcctggagcgacccaacccccatgaaagcggacaccagccacgatagccgtgatagcagtgacctgcagagctcccactgcactctggatgaagccttcgaagatctggactgggatacagagaaaggattagaggcagtggcttgcgacacggaaggattcgtaccgcctaaagtcatgctgatctcctctaaggtcccgaaggccgagtacattccaacaattatcaggagggatgatccctccatcattccaattctgtacgaccatgaacacgctactttcgaggacatcctggaggaaattgaacgtaaacttaacgtgtaccacaagggggctaaaatatggaagatgctcatcttctgtcagggtggacccggtcacctgtacctcctgaaaaataaggtagcaacctttgccaaggtggaaaaggaggaggacatgattcacttctggaagcggctctcccgtctaatgtctaaggtgaacccggagccaaacgtaatacatatcatgggctgctacattctagggaatccaaatggcgaaaaacttttccagaacttaagaactttgatgacaccctatcgtgtgaccttcgagagtccactggagctgtcagcgcagggtaagcagatgattgaaacatatttcgacttccgcctgtacagactgtggaagtctaggcagcactcgaagctcctggactttgacgacgttctgtag

SEQ ID NO: 48946 - DNA, 984 bp, Artificial Sequence
  derived and/or modified sequence
atgcagttgggacggaggcttgacccagagcgccaggcactccacttgtgtagcggcgtagaaggcgaaccatggaaggcagttgccggacgggctttgggcggtatctgtctgtgggtcgggggaggagcacggtctcagggggaacactggcttcccacacctaagggtaatttccggaaacatttgaggatggtgggtagcagacgcgtcaaggcgcagaccttcgctgagagaagagaaagaagtttcagtcgatcttggagcgatcctacaccaatgaaggcagacacgtcacacgactcacgcgactccagtgacctgcagagctcgcattgtaccctggacgaagcctttgaggatttggattgggacacagaaaagggcctggaagccgtcgcctgcgacacggagggcttcgtcccaccaaaggttatgcttatcagtagcaaggtgcctaaggccgagtacattcctacaattatccgcagagatgacccctccatcatacccatcctgtacgatcacgagcacgctacctttgaggacattttggaagaaatagaacgaaaactgaatgtttaccataagggtgctaagatttggaagatgctgattttctgccagggaggcccagggcacctctatctgctcaaaaacaaagttgctacctttgctaaagtggaaaaggaagaggatatgatccacttttggaagcggctatctcggctcatgtcaaaggtgaaccctgaacccaacgtcatccatatcatgggatgctatatcctggggaacccaaacggagaaaagcttttccagaatctgaggacgctgatgacaccttatcgggtgacatttgagagtcccctcgagttgtccgcccaggggaagcagatgatcgaaacgtatttcgatttccgcctgtacagactgtggaagtctcgacaacactccaagctgttggacttcgatgacgtgttgtag

SEQ ID NO: 48947 - DNA, 1518 bp, Artificial Sequence
  derived and/or modified sequence
atgggcgccgccgccagcagaagaagagccctgagaagcgaggccatgagcagcgtggccgccaaggtgagagccgccagagccttcggcgagtacctgagccagagccaccccgagaacagaaacggcgccgaccacctgctggccgacgcctacagcggccacgacggcagccccgagatgcagcccgccccccagaacaagagaagactgagcctggtgagcaacggctgctacgagggcagcctgagcgaggagcccagcatcagaaagcccgccggcgagggcccccagcccagagtgtacaccatcagcggcgagcccgccctgctgcccagccccgaggccgaggccatcgagctggccgtggtgaagggcagaagacagagacacccccaccaccacagccagcccctgagagccagccccggcggcagcagagaggacgtgagcagaccctgccagagctgggccggcagcagacagggcagcaaggagtgccccggctgcgcccagctggcccccggccccacccccagagccttcggcctggaccagccccccctgcccgagaccagcggcagaagaaagaagctggagagaatgtacagcgtggacagagtgagcgacgacatccccatcagaacctggttccccaaggagaacctgttcagcttccagaccgccaccaccaccatgcaggccaacttcagaaagcacctgagaatggtgggcagcagaagagtgaaggcccagaccttcgccgagagaagagagagaagcttcagcagaagctggagcgaccccacccccatgaaggccgacaccagccacgacagcagagacagcagcgacctgcagagcagccactgcaccctggacgaggccttcgaggacctggactgggacaccgagaagggcctggaggccgtggcctgcgacaccgagggcttcgtgccccccaaggtgatgctgatcagcagcaaggtgcccaaggccgagtacatccccaccatcatcagaagagacgaccccagcatcatccccatcctgtacgaccacgagcacgccaccttcgaggacatcctggaggagatcgagagaaagctgaacgtgtaccacaagggcgccaagatctggaagatgctgatcttctgccagggcggccccggccacctgtacctgctgaagaacaaggtggccaccttcgccaaggtggagaaggaggaggacatgatccacttctggaagagactgagcagactgatgagcaaggtgaaccccgagcccaacgtgatccacatcatgggctgctacatcctgggcaaccccaacggcgagaagctgttccagaacctgagaaccctgatgaccccctacagagtgaccttcgagagccccctggagctgagcgcccagggcaagcagatgatcgagacctacttcgacttcagactgtacagactgtggaagagcagacagcacagcaagctgctggacttcgacgacgtgctgtag

SEQ ID NO: 48948 - DNA, 984 bp, Artificial Sequence
  derived and/or modified sequence
atgcagctgggcagaagactggaccccgagagacaggccctgcacctgtgcagcggcgtggagggcgagccctggaaggccgtggccggcagagccctgggcggcatctgcctgtgggtgggcggcggcgccagaagccagggcgagcactggctgcccacccccaagggcaacttcagaaagcacctgagaatggtgggcagcagaagagtgaaggcccagaccttcgccgagagaagagagagaagcttcagcagaagctggagcgaccccacccccatgaaggccgacaccagccacgacagcagagacagcagcgacctgcagagcagccactgcaccctggacgaggccttcgaggacctggactgggacaccgagaagggcctggaggccgtggcctgcgacaccgagggcttcgtgccccccaaggtgatgctgatcagcagcaaggtgcccaaggccgagtacatccccaccatcatcagaagagacgaccccagcatcatccccatcctgtacgaccacgagcacgccaccttcgaggacatcctggaggagatcgagagaaagctgaacgtgtaccacaagggcgccaagatctggaagatgctgatcttctgccagggcggccccggccacctgtacctgctgaagaacaaggtggccaccttcgccaaggtggagaaggaggaggacatgatccacttctggaagagactgagcagactgatgagcaaggtgaaccccgagcccaacgtgatccacatcatgggctgctacatcctgggcaaccccaacggcgagaagctgttccagaacctgagaaccctgatgaccccctacagagtgaccttcgagagccccctggagctgagcgcccagggcaagcagatgatcgagacctacttcgacttcagactgtacagactgtggaagagcagacagcacagcaagctgctggacttcgacgacgtgctgtag

SEQ ID NO: 48949 - DNA, 6848 bp, Artificial Sequence
  derived and/or modified sequence
gcggccgccgcccagccaggtgcaaaatgccgtgtcattgggagactccgcagccggagcattagattacagctcgacggagctcgggaagggcggcgggggtggaagatgagcagaagcccctgttctcggaacgccggctgacaagcggggtgagcgcagccggggcggggacccagcctagcccactggagcagccgggggtggcccgttcccctttaagagcaactgctctaagccaggagccagagattcgagccggcctcgcccagccagccctctccagcgaggggacccacaagcggcgcctcggccctcccgacctttccgagccctctttgcgccctgggcgcacggggccctacacgcgccaagcatgctgagggtcttcatcctctatgccgagaacgtccacacacccgacaccgacatcagcgatgcctactgctccgcggtgtttgcaggggtgaagaagagaaccaaagtcatcaagaacagcgtgaaccctgtatggaatgagggatttgaatgggacctcaagggcatccccctggaccagggctctgagcttcatgtggtggtcaaagaccatgagacgatggggaggaacaggttcctgggggaagccaaggtcccactccgagaggtcctcgccacccctagtctgtccgccagcttcaatgcccccctgctggacaccaagaagcagcccacaggggcctcgctggtcctgcaggtgtcctacacaccgctgcctggagctgtgcccctgttcccgccccctactcctctggagccctccccgactctgcctgacctggatgtagtggcagacacaggaggagaggaagacacagaggaccagggactcactggagatgaggcggagccattcctggatcaaagcggaggcccgggggctcccaccaccccaaggaaactaccttcacgtcctccgccccactaccccgggatcaaaagaaagcgaagtgcgcctacatctagaaagctgctgtcagacaaaccgcaggatttccagatcagggtccaggtgatcgaggggcgccagctgccgggggtgaacatcaagcctgtggtcaaggttaccgctgcagggcagaccaagcggacgcggatccacaagggaaacagcccactcttcaatgagactcttttcttcaacttgtttgactctcctggggagctgtttgatgagcccatctttatcacggtggtagactctcgttctctcaggacagatgctctcctcggggagttccggatggacgtgggcaccatttacagagagccccggcacgcctatctcaggaagtggctgctgctctcagaccctgatgacttctctgctggggccagaggctacctgaaaacaagcctttgtgtgctggggcctggggacgaagcgcctctggagagaaaagacccctctgaagacaaggaggacattgaaagcaacctgctccggcccacaggcgtagccctgcgaggagcccacttctgcctgaaggtcttccgggccgaggacttgccgcagatggacgatgccgtgatggacaacgtgaaacagatctttggcttcgagagtaacaagaagaacttggtggacccctttgtggaggtcagctttgcggggaaaatgctgtgcagcaagatcttggagaagacggccaaccctcagtggaaccagaacatcacactgcctgccatgtttccctccatgtgcgaaaaaatgaggattcgtatcatagactgggaccgcctgactcacaatgacatcgtggctaccacctacctgagtatgtcgaaaatctctgcccctggaggagaaatagaagtggatgactacctgggcttcctccccacttttgggccctgctacatcaacctctatggcagtcccagagagttcacaggcttcccagacccctacacagagctcaacacaggcaagggggaaggtgtggcttatcgtggccggcttctgctctccctggagaccaagctggtggagcacagtgaacagaaggtggaggaccttcctgcggatgacatcctccgggtggagaagtaccttaggaggcgcaagtactccctgtttgcggccttctactcagccaccatgctgcaggatgtggatgatgccatccagtttgaggtcagcatcgggaactacgggaacaagttcgacatgacctgcctgccgctggcctccaccactcagtacagccgtgcagtctttgacgggtgccactactactacctaccctggggtaacgtgaaacctgtggtggtgctgtcatcctactgggaggacatcagccatagaatcgagactcagaaccagctgcttgggattgctgaccggctggaagctggcctggagcaggtccacctggccctgaaggcgcagtgctccacggaggacgtggactcgctggtggctcagctgacggatgagctcatcgcaggctgcagccagcctctgggtgacatccatgagacaccctctgccacccacctggaccagtacctgtaccagctgcgcacccatcacctgagccaaatcactgaggctgccctggccctgaagctcggccacagtgagctccctgcagctctggagcaggcggaggactggctcctgcgtctgcgtgccctggcagaggagccccagaacagcctgccggacatcgtcatctggatgctgcagggagacaagcgtgtggcataccagcgggtgcccgcccaccaagtcctcttctcccggcggggtgccaactactgtggcaagaattgtgggaagctacagacaatctttctgaaatatccgatggagaaggtgcctggcgcccggatgccagtgcagatacgggtcaagctgtggtttgggctctcagtggatgagaaggagttcaaccagtttgctgaggggaagctgtctgtctttgctgaaacctatgagaacgagactaagttggcccttgttgggaactggggcacaacgggcctcacctaccccaagttttctgacgtcacgggcaagatcaagctacccaaggacagcttccgcccctcggccggctggacctgggctggagattggttcgtgtgtccggagaagactctgctccatgacatggacgccggtcacctgagcttcgtggaagaggtgtttgagaaccagacccggcttcccggaggccagtggatctacatgagtgacaactacaccgatgtgaacggggagaaggtgcttcccaaggatgacattgagtgcccactgggctggaagtgggaagatgaggaatggtccacagacctcaaccgggctgtcgatgagcaaggctgggagtatagcatcaccatccccccggagcggaagccgaagcactgggtccctgctgagaagatgtactacacacaccgacggcggcgctgggtgcgcctgcgcaggagggatctcagccaaatggaagcactgaaaaggcacaggcaggcggaggcggagggcgagggctgggagtacgcctctctttttggctggaagttccacctcgagtaccgcaagacagatgccttccgccgccgccgctggcgccgtcgcatggagccactggagaagacggggcctgcagctgtgtttgcccttgagggggccctgggcggcgtgatggatgacaagagtgaagattccatgtccgtctccaccttgagcttcggtgtgaacagacccacgatttcctgcatattcgactatgggaaccgctaccatctacgctgctacatgtaccaggcccgggacctggctgcgatggacaaggactctttttctgatccctatgccatcgtctccttcctgcaccagagccagaagacggtggtggtgaagaacacccttaaccccacctgggaccagacgctcatcttctacgagatcgagatctttggcgagccggccacagttgctgagcaaccgcccagcattgtggtggagctgtacgaccatgacacttatggtgcagacgagtttatgggtcgctgcatctgtcaaccgagtctggaacggatgccacggctggcctggttcccactgacgaggggcagccagccgtcgggggagctgctggcctcttttgagctcatccagagagagaagccggccatccaccatattcctggttttgaggtgcaggagacatcaaggatcctggatgagtctgaggacacagacctgccctacccaccaccccagagggaggccaacatctacatggttcctcagaacatcaagccagcgctccagcgtaccgccatcgagatcctggcatggggcctgcggaacatgaagagttaccagctggccaacatctcctcccccagcctcgtggtagagtgtgggggccagacggtgcagtcctgtgtcatcaggaacctccggaagaaccccaactttgacatctgcaccctcttcatggaagtgatgctgcccagggaggagctctactgcccccccatcaccgtcaaggtcatcgataaccgccagtttggccgccggcctgtggtgggccagtgtaccatccgctccctggagagcttcctgtgtgacccctactcggcggagagtccatccccacagggtggcccagacgatgtgagcctactcagtcctggggaagacgtgctcatcgacattgatgacaaggagcccctcatccccatccaggaggaagagttcatcgattggtggagcaaattctttgcctccataggggagagggaaaagtgcggctcctacctggagaaggattttgacaccctgaaggtctatgacacacagctggagaatgtggaggcctttgagggcctgtctgacttttgtaacaccttcaagctgtaccggggcaagacgcaggaggagacagaagatccatctgtgattggtgaatttaagggcctcttcaaaatttatcccctcccagaagacccagccatccccatgcccccaagacagttccaccagctggccgcccagggaccccaggagtgcttggtccgtatctacattgtccgagcatttggcctgcagcccaaggaccccaatggaaagtgtgatccttacatcaagatctccatagggaagaaatcagtgagtgaccaggataactacatcccctgcacgctggagcccgtatttggaaagatgttcgagctgacctgcactctgcctctggagaaggacctaaagatcactctctatgactatgacctcctctccaaggacgaaaagatcggtgagacggtcgtcgacctggagaacaggctgctgtccaagtttggggctcgctgtggactcccacagacctactgtgtctctggaccgaaccagtggcgggaccagctccgcccctcccagctcctccacctcttctgccagcagcatagagtcaaggcacctgtgtaccggacagaccgtgtaatgtttcaggataaagaatattccattgaagagatagaggctggcaggatcccaaacccacacctgggcccagtggaggagcgtctggctctgcatgtgcttcagcagcagggcctggtcccggagcacgtggagtcacggcccctctacagccccctgcagccagacatcgagcaggggaagctgcagatgtgggtcgacctatttccgaaggccctggggcggcctggacctcccttcaacatcaccccacggagagccagaaggtttttcctgcgttgtattatctggaataccagagatgtgatcctggatgacctgagcctcacgggggagaagatgagcgacatttatgtgaaaggttggatgattggctttgaagaacacaagcaaaagacagacgtgcattatcgttccctgggaggtgaaggcaacttcaactggaggttcattttccccttcgactacctgccagctgagcaagtctgtaccattgccaagaaggatgccttctggaggctggacaagactgagagcaaaatcccagcacgagtggtgttccagatctgggacaatgacaagttctcctttgatgattttctgggctccctgcagctcgatctcaaccgcatgcccaagccagccaagacagccaagaagtgctccttggaccagctggatgatgctttccacccagaatggtttgtgtccctttttgagcagaaaacagtgaagggctggtggccctgtgtagcagaagagggtgagaagaaaatactggcgggcaagctggaaatgaccttggagattgtagcagagagtgagcatgaggagcggcctgctggccagggccgggatgagcccaacatgaaccctaagcttgaggacccaaggcgccccgacacctccttcctgtggtttacctccccatacaagaccatgaagttcatcctgtggcggcgtttccggtgggccatcatcctcttcatcatcctcttcatcctgctgctgttcctggccatcttcatctacgccttcccgaactatgctgccatgaagctggtgaagcccttcagctgaggactctcctgccctgtagaaggggccgtggggtcccctccagcatgggactggcctgcctcctccgcccagctcggcgagctcctccagacctcctaggcctgattgtcctgccagggtgggcagacagacagatggaccggcccacactcccagagttgctaacatggagctctgagatcaccccacttccatcatttccttctcccccaacccaacgcttttttggatcagctcagacatatttcagtataaaacagttggaaccaca

SEQ ID NO: 48950 - DNA, 6911 bp, Artificial Sequence
  derived and/or modified sequence
gcggccgccgcccagccaggtgcaaaatgccgtgtcattgggagactccgcagccggagcattagattacagctcgacggagctcgggaagggcggcgggggtggaagatgagcagaagcccctgttctcggaacgccggctgacaagcggggtgagcgcagccggggcggggacccagcctagcccactggagcagccgggggtggcccgttcccctttaagagcaactgctctaagccaggagccagagattcgagccggcctcgcccagccagccctctccagcgaggggacccacaagcggcgcctcggccctcccgacctttccgagccctctttgcgccctgggcgcacggggccctacacgcgccaagcatgctgagggtcttcatcctctatgccgagaacgtccacacacccgacaccgacatcagcgatgcctactgctccgcggtgtttgcaggggtgaagaagagaaccaaagtcatcaagaacagcgtgaaccctgtatggaatgagggatttgaatgggacctcaagggcatccccctggaccagggctctgagcttcatgtggtggtcaaagaccatgagacgatggggaggaacaggttcctgggggaagccaaggtcccactccgagaggtcctcgccacccctagtctgtccgccagcttcaatgcccccctgctggacaccaagaagcagcccacaggggcctcgctggtcctgcaggtgtcctacacaccgctgcctggagctgtgcccctgttcccgccccctactcctctggagccctccccgactctgcctgacctggatgtagtggcagacacaggaggagaggaagacacagaggaccagggactcactggagatgaggcggagccattcctggatcaaagcggaggcccgggggctcccaccaccccaaggaaactaccttcacgtcctccgccccactaccccgggatcaaaagaaagcgaagtgcgcctacatctagaaagctgctgtcagacaaaccgcaggatttccagatcagggtccaggtgatcgaggggcgccagctgccgggggtgaacatcaagcctgtggtcaaggttaccgctgcagggcagaccaagcggacgcggatccacaagggaaacagcccactcttcaatgagactcttttcttcaacttgtttgactctcctggggagctgtttgatgagcccatctttatcacggtggtagactctcgttctctcaggacagatgctctcctcggggagttccggatggacgtgggcaccatttacagagagccccggcacgcctatctcaggaagtggctgctgctctcagaccctgatgacttctctgctggggccagaggctacctgaaaacaagcctttgtgtgctggggcctggggacgaagcgcctctggagagaaaagacccctctgaagacaaggaggacattgaaagcaacctgctccggcccacaggcgtagccctgcgaggagcccacttctgcctgaaggtcttccgggccgaggacttgccgcagatggacgatgccgtgatggacaacgtgaaacagatctttggcttcgagagtaacaagaagaacttggtggacccctttgtggaggtcagctttgcggggaaaatgctgtgcagcaagatcttggagaagacggccaaccctcagtggaaccagaacatcacactgcctgccatgtttccctccatgtgcgaaaaaatgaggattcgtatcatagactgggaccgcctgactcacaatgacatcgtggctaccacctacctgagtatgtcgaaaatctctgcccctggaggagaaatagaagtggatgactacctgggcttcctccccacttttgggccctgctacatcaacctctatggcagtcccagagagttcacaggcttcccagacccctacacagagctcaacacaggcaagggggaaggtgtggcttatcgtggccggcttctgctctccctggagaccaagctggtggagcacagtgaacagaaggtggaggaccttcctgcggatgacatcctccgggtggagaagtaccttaggaggcgcaagtactccctgtttgcggccttctactcagccaccatgctgcaggatgtggatgatgccatccagtttgaggtcagcatcgggaactacgggaacaagttcgacatgacctgcctgccgctggcctccaccactcagtacagccgtgcagtctttgacgggtgccactactactacctaccctggggtaacgtgaaacctgtggtggtgctgtcatcctactgggaggacatcagccatagaatcgagactcagaaccagctgcttgggattgctgaccggctggaagctggcctggagcaggtccacctggccctgaaggcgcagtgctccacggaggacgtggactcgctggtggctcagctgacggatgagctcatcgcaggctgcagccagcctctgggtgacatccatgagacaccctctgccacccacctggaccagtacctgtaccagctgcgcacccatcacctgagccaaatcactgaggctgccctggccctgaagctcggccacagtgagctccctgcagctctggagcaggcggaggactggctcctgcgtctgcgtgccctggcagaggagccccagaacagcctgccggacatcgtcatctggatgctgcagggagacaagcgtgtggcataccagcgggtgcccgcccaccaagtcctcttctcccggcggggtgccaactactgtggcaagaattgtgggaagctacagacaatctttctgaaatatccgatggagaaggtgcctggcgcccggatgccagtgcagatacgggtcaagctgtggtttgggctctcagtggatgagaaggagttcaaccagtttgctgaggggaagctgtctgtctttgctgaaacctatgagaacgagactaagttggcccttgttgggaactggggcacaacgggcctcacctaccccaagttttctgacgtcacgggcaagatcaagctacccaaggacagcttccgcccctcggccggctggacctgggctggagattggttcgtgtgtccggagaagactctgctccatgacatggacgccggtcacctgagcttcgtggaagaggtgtttgagaaccagacccggcttcccggaggccagtggatctacatgagtgacaactacaccgatgtgaacggggagaaggtgcttcccaaggatgacattgagtgcccactgggctggaagtgggaagatgaggaatggtccacagacctcaaccgggctgtcgatgagcaaggctgggagtatagcatcaccatccccccggagcggaagccgaagcactgggtccctgctgagaagatgtactacacacaccgacggcggcgctgggtgcgcctgcgcaggagggatctcagccaaatggaagcactgaaaaggcacaggcaggcggaggcggagggcgagggctgggagtacgcctctctttttggctggaagttccacctcgagtaccgcaagacagatgccttccgccgccgccgctggcgccgtcgcatggagccactggagaagacggggcctgcagctgtgtttgcccttgagggggccctgggcggcgtgatggatgacaagagtgaagattccatgtccgtctccaccttgagcttcggtgtgaacagacccacgatttcctgcatattcgactatgggaaccgctaccatctacgctgctacatgtaccaggcccgggacctggctgcgatggacaaggactctttttctgatccctatgccatcgtctccttcctgcaccagagccagaagacggtggtggtgaagaacacccttaaccccacctgggaccagacgctcatcttctacgagatcgagatctttggcgagccggccacagttgctgagcaaccgcccagcattgtggtggagctgtacgaccatgacacttatggtgcagacgagtttatgggtcgctgcatctgtcaaccgagtctggaacggatgccacggctggcctggttcccactgacgaggggcagccagccgtcgggggagctgctggcctcttttgagctcatccagagagagaagccggccatccaccatattcctggttttgaggtgcaggagacatcaaggatcctggatgagtctgaggacacagacctgccctacccaccaccccagagggaggccaacatctacatggttcctcagaacatcaagccagcgctccagcgtaccgccatcgagatcctggcatggggcctgcggaacatgaagagttaccagctggccaacatctcctcccccagcctcgtggtagagtgtgggggccagacggtgcagtcctgtgtcatcaggaacctccggaagaaccccaactttgacatctgcaccctcttcatggaagtgatgctgcccagggaggagctctactgcccccccatcaccgtcaaggtcatcgataaccgccagtttggccgccggcctgtggtgggccagtgtaccatccgctccctggagagcttcctgtgtgacccctactcggcggagagtccatccccacagggtggcccagacgatgtgagcctactcagtcctggggaagacgtgctcatcgacattgatgacaaggagcccctcatccccatccagcttgcagacggtctgtcgagcttggcccccactaacacggcttctcctccatccagtcctcatgaggaagagttcatcgattggtggagcaaattctttgcctccataggggagagggaaaagtgcggctcctacctggagaaggattttgacaccctgaaggtctatgacacacagctggagaatgtggaggcctttgagggcctgtctgacttttgtaacaccttcaagctgtaccggggcaagacgcaggaggagacagaagatccatctgtgattggtgaatttaagggcctcttcaaaatttatcccctcccagaagacccagccatccccatgcccccaagacagttccaccagctggccgcccagggaccccaggagtgcttggtccgtatctacattgtccgagcatttggcctgcagcccaaggaccccaatggaaagtgtgatccttacatcaagatctccatagggaagaaatcagtgagtgaccaggataactacatcccctgcacgctggagcccgtatttggaaagatgttcgagctgacctgcactctgcctctggagaaggacctaaagatcactctctatgactatgacctcctctccaaggacgaaaagatcggtgagacggtcgtcgacctggagaacaggctgctgtccaagtttggggctcgctgtggactcccacagacctactgtgtctctggaccgaaccagtggcgggaccagctccgcccctcccagctcctccacctcttctgccagcagcatagagtcaaggcacctgtgtaccggacagaccgtgtaatgtttcaggataaagaatattccattgaagagatagaggctggcaggatcccaaacccacacctgggcccagtggaggagcgtctggctctgcatgtgcttcagcagcagggcctggtcccggagcacgtggagtcacggcccctctacagccccctgcagccagacatcgagcaggggaagctgcagatgtgggtcgacctatttccgaaggccctggggcggcctggacctcccttcaacatcaccccacggagagccagaaggtttttcctgcgttgtattatctggaataccagagatgtgatcctggatgacctgagcctcacgggggagaagatgagcgacatttatgtgaaaggttggatgattggctttgaagaacacaagcaaaagacagacgtgcattatcgttccctgggaggtgaaggcaacttcaactggaggttcattttccccttcgactacctgccagctgagcaagtctgtaccattgccaagaaggatgccttctggaggctggacaagactgagagcaaaatcccagcacgagtggtgttccagatctgggacaatgacaagttctcctttgatgattttctgggctccctgcagctcgatctcaaccgcatgcccaagccagccaagacagccaagaagtgctccttggaccagctggatgatgctttccacccagaatggtttgtgtccctttttgagcagaaaacagtgaagggctggtggccctgtgtagcagaagagggtgagaagaaaatactggcgggcaagctggaaatgaccttggagattgtagcagagagtgagcatgaggagcggcctgctggccagggccgggatgagcccaacatgaaccctaagcttgaggacccaaggcgccccgacacctccttcctgtggtttacctccccatacaagaccatgaagttcatcctgtggcggcgtttccggtgggccatcatcctcttcatcatcctcttcatcctgctgctgttcctggccatcttcatctacgccttcccgaactatgctgccatgaagctggtgaagcccttcagctgaggactctcctgccctgtagaaggggccgtggggtcccctccagcatgggactggcctgcctcctccgcccagctcggcgagctcctccagacctcctaggcctgattgtcctgccagggtgggcagacagacagatggaccggcccacactcccagagttgctaacatggagctctgagatcaccccacttccatcatttccttctcccccaacccaacgcttttttggatcagctcagacatatttcagtataaaacagttggaaccaca

SEQ ID NO: 48951 - protein, 2101 aa, Artificial Sequence
  derived and/or modified sequence
MLRVFILYAENVHTPDTDISDAYCSAVFAGVKKRTKVIKNSVNPVWNEGFEWDLKGIPLDQGSELHVVVKDHETMGRNRFLGEAKVPLREVLATPSLSASFNAPLLDTKKQPTGASLVLQVSYTPLPGAVPLFPPPTPLEPSPTLPDLDVVADTGGEEDTEDQGLTGDEAEPFLDQSGGPGAPTTPRKLPSRPPPHYPGIKRKRSAPTSRKLLSDKPQDFQIRVQVIEGRQLPGVNIKPVVKVTAAGQTKRTRIHKGNSPLFNETLFFNLFDSPGELFDEPIFITVVDSRSLRTDALLGEFRMDVGTIYREPRHAYLRKWLLLSDPDDFSAGARGYLKTSLCVLGPGDEAPLERKDPSEDKEDIESNLLRPTGVALRGAHFCLKVFRAEDLPQMDDAVMDNVKQIFGFESNKKNLVDPFVEVSFAGKMLCSKILEKTANPQWNQNITLPAMFPSMCEKMRIRIIDWDRLTHNDIVATTYLSMSKISAPGGEIEEEPAGAVKPSKASDLDDYLGFLPTFGPCYINLYGSPREFTGFPDPYTELNTGKGEGVAYRGRLLLSLETKLVEHSEQKVEDLPADDILRVEKYLRRRKYSLFAAFYSATMLQDVDDAIQFEVSIGNYGNKFDMTCLPLASTTQYSRAVFDGCHYYYLPWGNVKPVVVLSSYWEDISHRIETQNQLLGIADRLEAGLEQVHLALKAQCSTEDVDSLVAQLTDELIAGCSQPLGDIHETPSATHLDQYLYQLRTHHLSQITEAALALKLGHSELPAALEQAEDWLLRLRALAEEPQNSLPDIVIWMLQGDKRVAYQRVPAHQVLFSRRGANYCGKNCGKLQTIFLKYPMEKVPGARMPVQIRVKLWFGLSVDEKEFNQFAEGKLSVFAETYENETKLALVGNWGTTGLTYPKFSDVTGKIKLPKDSFRPSAGWTWAGDWFVCPEKTLLHDMDAGHLSFVEEVFENQTRLPGGQWIYMSDNYTDVNGEKVLPKDDIECPLGWKWEDEEWSTDLNRAVDEQGWEYSITIPPERKPKHWVPAEKMYYTHRRRRWVRLRRRDLSQMEALKRHRQAEAEGEGWEYASLFGWKFHLEYRKTDAFRRRRWRRRMEPLEKTGPAAVFALEGALGGVMDDKSEDSMSVSTLSFGVNRPTISCIFDYGNRYHLRCYMYQARDLAAMDKDSFSDPYAIVSFLHQSQKTVVVKNTLNPTWDQTLIFYEIEIFGEPATVAEQPPSIVVELYDHDTYGADEFMGRCICQPSLERMPRLAWFPLTRGSQPSGELLASFELIQREKPAIHHIPGFEVQETSRILDESEDTDLPYPPPQREANIYMVPQNIKPALQRTAIEILAWGLRNMKSYQLANISSPSLVVECGGQTVQSCVIRNLRKNPNFDICTLFMEVMLPREELYCPPITVKVIDNRQFGRRPVVGQCTIRSLESFLCDPYSAESPSPQGGPDDVSLLSPGEDVLIDIDDKEPLIPIQLADGLSSLAPTNTASPPSSPHEEEFIDWWSKFFASIGEREKCGSYLEKDFDTLKVYDTQLENVEAFEGLSDFCNTFKLYRGKTQEETEDPSVIGEFKGLFKIYPLPEDPAIPMPPRQFHQLAAQGPQECLVRIYIVRAFGLQPKDPNGKCDPYIKISIGKKSVSDQDNYIPCTLEPVFGKMFELTCTLPLEKDLKITLYDYDLLSKDEKIGETVVDLENRLLSKFGARCGLPQTYCVSGPNQWRDQLRPSQLLHLFCQQHRVKAPVYRTDRVMFQDKEYSIEEIEAGRIPNPHLGPVEERLALHVLQQQGLVPEHVESRPLYSPLQPDIEQGKLQMWVDLFPKALGRPGPPFNITPRRARRFFLRCIIWNTRDVILDDLSLTGEKMSDIYVKGWMIGFEEHKQKTDVHYRSLGGEGNFNWRFIFPFDYLPAEQVCTIAKKDAFWRLDKTESKIPARVVFQIWDNDKFSFDDFLGSLQLDLNRMPKPAKTAKKCSLDQLDDAFHPEWFVSLFEQKTVKGWWPCVAEEGEKKILAGKLEMTLEIVAESEHEERPAGQGRDEPNMNPKLEDPRRPDTSFLWFTSPYKTMKFILWRRFRWAIILFIILFILLLFLAIFIYAFPNYAAMKLVKPFS

SEQ ID NO: 48952 - DNA, 6953 bp, Artificial Sequence
  derived and/or modified sequence
gcggccgccgcccagccaggtgcaaaatgccgtgtcattgggagactccgcagccggagcattagattacagctcgacggagctcgggaagggcggcgggggtggaagatgagcagaagcccctgttctcggaacgccggctgacaagcggggtgagcgcagccggggcggggacccagcctagcccactggagcagccgggggtggcccgttcccctttaagagcaactgctctaagccaggagccagagattcgagccggcctcgcccagccagccctctccagcgaggggacccacaagcggcgcctcggccctcccgacctttccgagccctctttgcgccctgggcgcacggggccctacacgcgccaagcatgctgagggtcttcatcctctatgccgagaacgtccacacacccgacaccgacatcagcgatgcctactgctccgcggtgtttgcaggggtgaagaagagaaccaaagtcatcaagaacagcgtgaaccctgtatggaatgagggatttgaatgggacctcaagggcatccccctggaccagggctctgagcttcatgtggtggtcaaagaccatgagacgatggggaggaacaggttcctgggggaagccaaggtcccactccgagaggtcctcgccacccctagtctgtccgccagcttcaatgcccccctgctggacaccaagaagcagcccacaggggcctcgctggtcctgcaggtgtcctacacaccgctgcctggagctgtgcccctgttcccgccccctactcctctggagccctccccgactctgcctgacctggatgtagtggcagacacaggaggagaggaagacacagaggaccagggactcactggagatgaggcggagccattcctggatcaaagcggaggcccgggggctcccaccaccccaaggaaactaccttcacgtcctccgccccactaccccgggatcaaaagaaagcgaagtgcgcctacatctagaaagctgctgtcagacaaaccgcaggatttccagatcagggtccaggtgatcgaggggcgccagctgccgggggtgaacatcaagcctgtggtcaaggttaccgctgcagggcagaccaagcggacgcggatccacaagggaaacagcccactcttcaatgagactcttttcttcaacttgtttgactctcctggggagctgtttgatgagcccatctttatcacggtggtagactctcgttctctcaggacagatgctctcctcggggagttccggatggacgtgggcaccatttacagagagccccggcacgcctatctcaggaagtggctgctgctctcagaccctgatgacttctctgctggggccagaggctacctgaaaacaagcctttgtgtgctggggcctggggacgaagcgcctctggagagaaaagacccctctgaagacaaggaggacattgaaagcaacctgctccggcccacaggcgtagccctgcgaggagcccacttctgcctgaaggtcttccgggccgaggacttgccgcagatggacgatgccgtgatggacaacgtgaaacagatctttggcttcgagagtaacaagaagaacttggtggacccctttgtggaggtcagctttgcggggaaaatgctgtgcagcaagatcttggagaagacggccaaccctcagtggaaccagaacatcacactgcctgccatgtttccctccatgtgcgaaaaaatgaggattcgtatcatagactgggaccgcctgactcacaatgacatcgtggctaccacctacctgagtatgtcgaaaatctctgcccctggaggagaaatagaagaggagcctgcaggtgctgtcaagccttcgaaagcctcagacttggatgactacctgggcttcctccccacttttgggccctgctacatcaacctctatggcagtcccagagagttcacaggcttcccagacccctacacagagctcaacacaggcaagggggaaggtgtggcttatcgtggccggcttctgctctccctggagaccaagctggtggagcacagtgaacagaaggtggaggaccttcctgcggatgacatcctccgggtggagaagtaccttaggaggcgcaagtactccctgtttgcggccttctactcagccaccatgctgcaggatgtggatgatgccatccagtttgaggtcagcatcgggaactacgggaacaagttcgacatgacctgcctgccgctggcctccaccactcagtacagccgtgcagtctttgacgggtgccactactactacctaccctggggtaacgtgaaacctgtggtggtgctgtcatcctactgggaggacatcagccatagaatcgagactcagaaccagctgcttgggattgctgaccggctggaagctggcctggagcaggtccacctggccctgaaggcgcagtgctccacggaggacgtggactcgctggtggctcagctgacggatgagctcatcgcaggctgcagccagcctctgggtgacatccatgagacaccctctgccacccacctggaccagtacctgtaccagctgcgcacccatcacctgagccaaatcactgaggctgccctggccctgaagctcggccacagtgagctccctgcagctctggagcaggcggaggactggctcctgcgtctgcgtgccctggcagaggagccccagaacagcctgccggacatcgtcatctggatgctgcagggagacaagcgtgtggcataccagcgggtgcccgcccaccaagtcctcttctcccggcggggtgccaactactgtggcaagaattgtgggaagctacagacaatctttctgaaatatccgatggagaaggtgcctggcgcccggatgccagtgcagatacgggtcaagctgtggtttgggctctcagtggatgagaaggagttcaaccagtttgctgaggggaagctgtctgtctttgctgaaacctatgagaacgagactaagttggcccttgttgggaactggggcacaacgggcctcacctaccccaagttttctgacgtcacgggcaagatcaagctacccaaggacagcttccgcccctcggccggctggacctgggctggagattggttcgtgtgtccggagaagactctgctccatgacatggacgccggtcacctgagcttcgtggaagaggtgtttgagaaccagacccggcttcccggaggccagtggatctacatgagtgacaactacaccgatgtgaacggggagaaggtgcttcccaaggatgacattgagtgcccactgggctggaagtgggaagatgaggaatggtccacagacctcaaccgggctgtcgatgagcaaggctgggagtatagcatcaccatccccccggagcggaagccgaagcactgggtccctgctgagaagatgtactacacacaccgacggcggcgctgggtgcgcctgcgcaggagggatctcagccaaatggaagcactgaaaaggcacaggcaggcggaggcggagggcgagggctgggagtacgcctctctttttggctggaagttccacctcgagtaccgcaagacagatgccttccgccgccgccgctggcgccgtcgcatggagccactggagaagacggggcctgcagctgtgtttgcccttgagggggccctgggcggcgtgatggatgacaagagtgaagattccatgtccgtctccaccttgagcttcggtgtgaacagacccacgatttcctgcatattcgactatgggaaccgctaccatctacgctgctacatgtaccaggcccgggacctggctgcgatggacaaggactctttttctgatccctatgccatcgtctccttcctgcaccagagccagaagacggtggtggtgaagaacacccttaaccccacctgggaccagacgctcatcttctacgagatcgagatctttggcgagccggccacagttgctgagcaaccgcccagcattgtggtggagctgtacgaccatgacacttatggtgcagacgagtttatgggtcgctgcatctgtcaaccgagtctggaacggatgccacggctggcctggttcccactgacgaggggcagccagccgtcgggggagctgctggcctcttttgagctcatccagagagagaagccggccatccaccatattcctggttttgaggtgcaggagacatcaaggatcctggatgagtctgaggacacagacctgccctacccaccaccccagagggaggccaacatctacatggttcctcagaacatcaagccagcgctccagcgtaccgccatcgagatcctggcatggggcctgcggaacatgaagagttaccagctggccaacatctcctcccccagcctcgtggtagagtgtgggggccagacggtgcagtcctgtgtcatcaggaacctccggaagaaccccaactttgacatctgcaccctcttcatggaagtgatgctgcccagggaggagctctactgcccccccatcaccgtcaaggtcatcgataaccgccagtttggccgccggcctgtggtgggccagtgtaccatccgctccctggagagcttcctgtgtgacccctactcggcggagagtccatccccacagggtggcccagacgatgtgagcctactcagtcctggggaagacgtgctcatcgacattgatgacaaggagcccctcatccccatccagcttgcagacggtctgtcgagcttggcccccactaacacggcttctcctccatccagtcctcatgaggaagagttcatcgattggtggagcaaattctttgcctccataggggagagggaaaagtgcggctcctacctggagaaggattttgacaccctgaaggtctatgacacacagctggagaatgtggaggcctttgagggcctgtctgacttttgtaacaccttcaagctgtaccggggcaagacgcaggaggagacagaagatccatctgtgattggtgaatttaagggcctcttcaaaatttatcccctcccagaagacccagccatccccatgcccccaagacagttccaccagctggccgcccagggaccccaggagtgcttggtccgtatctacattgtccgagcatttggcctgcagcccaaggaccccaatggaaagtgtgatccttacatcaagatctccatagggaagaaatcagtgagtgaccaggataactacatcccctgcacgctggagcccgtatttggaaagatgttcgagctgacctgcactctgcctctggagaaggacctaaagatcactctctatgactatgacctcctctccaaggacgaaaagatcggtgagacggtcgtcgacctggagaacaggctgctgtccaagtttggggctcgctgtggactcccacagacctactgtgtctctggaccgaaccagtggcgggaccagctccgcccctcccagctcctccacctcttctgccagcagcatagagtcaaggcacctgtgtaccggacagaccgtgtaatgtttcaggataaagaatattccattgaagagatagaggctggcaggatcccaaacccacacctgggcccagtggaggagcgtctggctctgcatgtgcttcagcagcagggcctggtcccggagcacgtggagtcacggcccctctacagccccctgcagccagacatcgagcaggggaagctgcagatgtgggtcgacctatttccgaaggccctggggcggcctggacctcccttcaacatcaccccacggagagccagaaggtttttcctgcgttgtattatctggaataccagagatgtgatcctggatgacctgagcctcacgggggagaagatgagcgacatttatgtgaaaggttggatgattggctttgaagaacacaagcaaaagacagacgtgcattatcgttccctgggaggtgaaggcaacttcaactggaggttcattttccccttcgactacctgccagctgagcaagtctgtaccattgccaagaaggatgccttctggaggctggacaagactgagagcaaaatcccagcacgagtggtgttccagatctgggacaatgacaagttctcctttgatgattttctgggctccctgcagctcgatctcaaccgcatgcccaagccagccaagacagccaagaagtgctccttggaccagctggatgatgctttccacccagaatggtttgtgtccctttttgagcagaaaacagtgaagggctggtggccctgtgtagcagaagagggtgagaagaaaatactggcgggcaagctggaaatgaccttggagattgtagcagagagtgagcatgaggagcggcctgctggccagggccgggatgagcccaacatgaaccctaagcttgaggacccaaggcgccccgacacctccttcctgtggtttacctccccatacaagaccatgaagttcatcctgtggcggcgtttccggtgggccatcatcctcttcatcatcctcttcatcctgctgctgttcctggccatcttcatctacgccttcccgaactatgctgccatgaagctggtgaagcccttcagctgaggactctcctgccctgtagaaggggccgtggggtcccctccagcatgggactggcctgcctcctccgcccagctcggcgagctcctccagacctcctaggcctgattgtcctgccagggtgggcagacagacagatggaccggcccacactcccagagttgctaacatggagctctgagatcaccccacttccatcatttccttctcccccaacccaacgcttttttggatcagctcagacatatttcagtataaaacagttggaaccaca

SEQ ID NO: 48953 - DNA, 6303 bp, Artificial Sequence
  derived and/or modified sequence
atgctgcgcgtgttcatcctgtacgccgagaacgtgcacacccccgacaccgacatcagcgacgcctactgcagcgccgtgttcgccggcgtgaagaagcgcaccaaggtgatcaagaacagcgtgaaccccgtgtggaacgagggcttcgagtgggacctgaagggcatccccctggaccagggcagcgagctgcacgtggtggtgaaggaccacgagaccatgggccgcaaccgcttcctgggcgaggccaaggtgcccctgcgcgaggtgctggccacccccagcctgagcgccagcttcaacgcccccctgctggacaccaagaagcagcccaccggcgccagcctggtgctgcaggtgagctacacccccctgcccggcgccgtgcccctgttccccccccccacccccctggagcccagccccaccctgcccgacctggacgtggtggccgacaccggcggcgaggaggacaccgaggaccagggcctgaccggcgacgaggccgagcccttcctggaccagagcggcggccccggcgcccccaccaccccccgcaagctgcccagccgcccccccccccactaccccggcatcaagcgcaagcgcagcgcccccaccagccgcaagctgctgagcgacaagccccaggacttccagatccgcgtgcaggtgatcgagggccgccagctgcccggcgtgaacatcaagcccgtggtgaaggtgaccgccgccggccagaccaagcgcacccgcatccacaagggcaacagccccctgttcaacgagaccctgttcttcaacctgttcgacagccccggcgagctgttcgacgagcccatcttcatcaccgtggtggacagccgcagcctgcgcaccgacgccctgctgggcgagttccgcatggacgtgggcaccatctaccgcgagccccgccacgcctacctgcgcaagtggctgctgctgagcgaccccgacgacttcagcgccggcgcccgcggctacctgaagaccagcctgtgcgtgctgggccccggcgacgaggcccccctggagcgcaaggaccccagcgaggacaaggaggacatcgagagcaacctgctgcgccccaccggcgtggccctgcgcggcgcccacttctgcctgaaggtgttccgcgccgaggacctgccccagatggacgacgccgtgatggacaacgtgaagcagatcttcggcttcgagagcaacaagaagaacctggtggaccccttcgtggaggtgagcttcgccggcaagatgctgtgcagcaagatcctggagaagaccgccaacccccagtggaaccagaacatcaccctgcccgccatgttccccagcatgtgcgagaagatgcgcatccgcatcatcgactgggaccgcctgacccacaacgacatcgtggccaccacctacctgagcatgagcaagatcagcgcccccggcggcgagatcgaggaggagcccgccggcgccgtgaagcccagcaaggccagcgacctggacgactacctgggcttcctgcccaccttcggcccctgctacatcaacctgtacggcagcccccgcgagttcaccggcttccccgacccctacaccgagctgaacaccggcaagggcgagggcgtggcctaccgcggccgcctgctgctgagcctggagaccaagctggtggagcacagcgagcagaaggtggaggacctgcccgccgacgacatcctgcgcgtggagaagtacctgcgccgccgcaagtacagcctgttcgccgccttctacagcgccaccatgctgcaggacgtggacgacgccatccagttcgaggtgagcatcggcaactacggcaacaagttcgacatgacctgcctgcccctggccagcaccacccagtacagccgcgccgtgttcgacggctgccactactactacctgccctggggcaacgtgaagcccgtggtggtgctgagcagctactgggaggacatcagccaccgcatcgagacccagaaccagctgctgggcatcgccgaccgcctggaggccggcctggagcaggtgcacctggccctgaaggcccagtgcagcaccgaggacgtggacagcctggtggcccagctgaccgacgagctgatcgccggctgcagccagcccctgggcgacatccacgagacccccagcgccacccacctggaccagtacctgtaccagctgcgcacccaccacctgagccagatcaccgaggccgccctggccctgaagctgggccacagcgagctgcccgccgccctggagcaggccgaggactggctgctgcgcctgcgcgccctggccgaggagccccagaacagcctgcccgacatcgtgatctggatgctgcagggcgacaagcgcgtggcctaccagcgcgtgcccgcccaccaggtgctgttcagccgccgcggcgccaactactgcggcaagaactgcggcaagctgcagaccatcttcctgaagtaccccatggagaaggtgcccggcgcccgcatgcccgtgcagatccgcgtgaagctgtggttcggcctgagcgtggacgagaaggagttcaaccagttcgccgagggcaagctgagcgtgttcgccgagacctacgagaacgagaccaagctggccctggtgggcaactggggcaccaccggcctgacctaccccaagttcagcgacgtgaccggcaagatcaagctgcccaaggacagcttccgccccagcgccggctggacctgggccggcgactggttcgtgtgccccgagaagaccctgctgcacgacatggacgccggccacctgagcttcgtggaggaggtgttcgagaaccagacccgcctgcccggcggccagtggatctacatgagcgacaactacaccgacgtgaacggcgagaaggtgctgcccaaggacgacatcgagtgccccctgggctggaagtgggaggacgaggagtggagcaccgacctgaaccgcgccgtggacgagcagggctgggagtacagcatcaccatcccccccgagcgcaagcccaagcactgggtgcccgccgagaagatgtactacacccaccgccgccgccgctgggtgcgcctgcgccgccgcgacctgagccagatggaggccctgaagcgccaccgccaggccgaggccgagggcgagggctgggagtacgccagcctgttcggctggaagttccacctggagtaccgcaagaccgacgccttccgccgccgccgctggcgccgccgcatggagcccctggagaagaccggccccgccgccgtgttcgccctggagggcgccctgggcggcgtgatggacgacaagagcgaggacagcatgagcgtgagcaccctgagcttcggcgtgaaccgccccaccatcagctgcatcttcgactacggcaaccgctaccacctgcgctgctacatgtaccaggcccgcgacctggccgccatggacaaggacagcttcagcgacccctacgccatcgtgagcttcctgcaccagagccagaagaccgtggtggtgaagaacaccctgaaccccacctgggaccagaccctgatcttctacgagatcgagatcttcggcgagcccgccaccgtggccgagcagccccccagcatcgtggtggagctgtacgaccacgacacctacggcgccgacgagttcatgggccgctgcatctgccagcccagcctggagcgcatgccccgcctggcctggttccccctgacccgcggcagccagcccagcggcgagctgctggccagcttcgagctgatccagcgcgagaagcccgccatccaccacatccccggcttcgaggtgcaggagaccagccgcatcctggacgagagcgaggacaccgacctgccctacccccccccccagcgcgaggccaacatctacatggtgccccagaacatcaagcccgccctgcagcgcaccgccatcgagatcctggcctggggcctgcgcaacatgaagagctaccagctggccaacatcagcagccccagcctggtggtggagtgcggcggccagaccgtgcagagctgcgtgatccgcaacctgcgcaagaaccccaacttcgacatctgcaccctgttcatggaggtgatgctgccccgcgaggagctgtactgcccccccatcaccgtgaaggtgatcgacaaccgccagttcggccgccgccccgtggtgggccagtgcaccatccgcagcctggagagcttcctgtgcgacccctacagcgccgagagccccagcccccagggcggccccgacgacgtgagcctgctgagccccggcgaggacgtgctgatcgacatcgacgacaaggagcccctgatccccatccagctggccgacggcctgagcagcctggcccccaccaacaccgccagcccccccagcagcccccacgaggaggagttcatcgactggtggagcaagttcttcgccagcatcggcgagcgcgagaagtgcggcagctacctggagaaggacttcgacaccctgaaggtgtacgacacccagctggagaacgtggaggccttcgagggcctgagcgacttctgcaacaccttcaagctgtaccgcggcaagacccaggaggagaccgaggaccccagcgtgatcggcgagttcaagggcctgttcaagatctaccccctgcccgaggaccccgccatccccatgcccccccgccagttccaccagctggccgcccagggcccccaggagtgcctggtgcgcatctacatcgtgcgcgccttcggcctgcagcccaaggaccccaacggcaagtgcgacccctacatcaagatcagcatcggcaagaagagcgtgagcgaccaggacaactacatcccctgcaccctggagcccgtgttcggcaagatgttcgagctgacctgcaccctgcccctggagaaggacctgaagatcaccctgtacgactacgacctgctgagcaaggacgagaagatcggcgagaccgtggtggacctggagaaccgcctgctgagcaagttcggcgcccgctgcggcctgccccagacctactgcgtgagcggccccaaccagtggcgcgaccagctgcgccccagccagctgctgcacctgttctgccagcagcaccgcgtgaaggcccccgtgtaccgcaccgaccgcgtgatgttccaggacaaggagtacagcatcgaggagatcgaggccggccgcatccccaacccccacctgggccccgtggaggagcgcctggccctgcacgtgctgcagcagcagggcctggtgcccgagcacgtggagagccgccccctgtacagccccctgcagcccgacatcgagcagggcaagctgcagatgtgggtggacctgttccccaaggccctgggccgccccggcccccccttcaacatcaccccccgccgcgcccgccgcttcttcctgcgctgcatcatctggaacacccgcgacgtgatcctggacgacctgagcctgaccggcgagaagatgagcgacatctacgtgaagggctggatgatcggcttcgaggagcacaagcagaagaccgacgtgcactaccgcagcctgggcggcgagggcaacttcaactggcgcttcatcttccccttcgactacctgcccgccgagcaggtgtgcaccatcgccaagaaggacgccttctggcgcctggacaagaccgagagcaagatccccgcccgcgtggtgttccagatctgggacaacgacaagttcagcttcgacgacttcctgggcagcctgcagctggacctgaaccgcatgcccaagcccgccaagaccgccaagaagtgcagcctggaccagctggacgacgccttccaccccgagtggttcgtgagcctgttcgagcagaagaccgtgaagggctggtggccctgcgtggccgaggagggcgagaagaagatcctggccggcaagctggagatgaccctggagatcgtggccgagagcgagcacgaggagcgccccgccggccagggccgcgacgagcccaacatgaaccccaagctggaggacccccgccgccccgacaccagcttcctgtggttcaccagcccctacaagaccatgaagttcatcctgtggcgccgcttccgctgggccatcatcctgttcatcatcctgttcatcctgctgctgttcctggccatcttcatctacgccttccccaactacgccgccatgaagctggtgaagcccttcagc

SEQ ID NO: 48954 - DNA, 6306 bp, Artificial Sequence
  derived and/or modified sequence
atgctgagagtgttcatcctgtacgccgagaacgtgcacacccccgacaccgacatcagcgacgcctactgcagcgccgtgttcgccggcgtgaagaagagaaccaaggtgatcaagaacagcgtgaaccccgtgtggaacgagggcttcgagtgggacctgaagggcatccccctggaccagggcagcgagctgcacgtggtggtgaaggaccacgagaccatgggcagaaacagattcctgggcgaggccaaggtgcccctgagagaggtgctggccacccccagcctgagcgccagcttcaacgcccccctgctggacaccaagaagcagcccaccggcgccagcctggtgctgcaggtgagctacacccccctgcccggcgccgtgcccctgttccccccccccacccccctggagcccagccccaccctgcccgacctggacgtggtggccgacaccggcggcgaggaggacaccgaggaccagggcctgaccggcgacgaggccgagcccttcctggaccagagcggcggccccggcgcccccaccacccccagaaagctgcccagcagaccccccccccactaccccggcatcaagagaaagagaagcgcccccaccagcagaaagctgctgagcgacaagccccaggacttccagatcagagtgcaggtgatcgagggcagacagctgcccggcgtgaacatcaagcccgtggtgaaggtgaccgccgccggccagaccaagagaaccagaatccacaagggcaacagccccctgttcaacgagaccctgttcttcaacctgttcgacagccccggcgagctgttcgacgagcccatcttcatcaccgtggtggacagcagaagcctgagaaccgacgccctgctgggcgagttcagaatggacgtgggcaccatctacagagagcccagacacgcctacctgagaaagtggctgctgctgagcgaccccgacgacttcagcgccggcgccagaggctacctgaagaccagcctgtgcgtgctgggccccggcgacgaggcccccctggagagaaaggaccccagcgaggacaaggaggacatcgagagcaacctgctgagacccaccggcgtggccctgagaggcgcccacttctgcctgaaggtgttcagagccgaggacctgccccagatggacgacgccgtgatggacaacgtgaagcagatcttcggcttcgagagcaacaagaagaacctggtggaccccttcgtggaggtgagcttcgccggcaagatgctgtgcagcaagatcctggagaagaccgccaacccccagtggaaccagaacatcaccctgcccgccatgttccccagcatgtgcgagaagatgagaatcagaatcatcgactgggacagactgacccacaacgacatcgtggccaccacctacctgagcatgagcaagatcagcgcccccggcggcgagatcgaggaggagcccgccggcgccgtgaagcccagcaaggccagcgacctggacgactacctgggcttcctgcccaccttcggcccctgctacatcaacctgtacggcagccccagagagttcaccggcttccccgacccctacaccgagctgaacaccggcaagggcgagggcgtggcctacagaggcagactgctgctgagcctggagaccaagctggtggagcacagcgagcagaaggtggaggacctgcccgccgacgacatcctgagagtggagaagtacctgagaagaagaaagtacagcctgttcgccgccttctacagcgccaccatgctgcaggacgtggacgacgccatccagttcgaggtgagcatcggcaactacggcaacaagttcgacatgacctgcctgcccctggccagcaccacccagtacagcagagccgtgttcgacggctgccactactactacctgccctggggcaacgtgaagcccgtggtggtgctgagcagctactgggaggacatcagccacagaatcgagacccagaaccagctgctgggcatcgccgacagactggaggccggcctggagcaggtgcacctggccctgaaggcccagtgcagcaccgaggacgtggacagcctggtggcccagctgaccgacgagctgatcgccggctgcagccagcccctgggcgacatccacgagacccccagcgccacccacctggaccagtacctgtaccagctgagaacccaccacctgagccagatcaccgaggccgccctggccctgaagctgggccacagcgagctgcccgccgccctggagcaggccgaggactggctgctgagactgagagccctggccgaggagccccagaacagcctgcccgacatcgtgatctggatgctgcagggcgacaagagagtggcctaccagagagtgcccgcccaccaggtgctgttcagcagaagaggcgccaactactgcggcaagaactgcggcaagctgcagaccatcttcctgaagtaccccatggagaaggtgcccggcgccagaatgcccgtgcagatcagagtgaagctgtggttcggcctgagcgtggacgagaaggagttcaaccagttcgccgagggcaagctgagcgtgttcgccgagacctacgagaacgagaccaagctggccctggtgggcaactggggcaccaccggcctgacctaccccaagttcagcgacgtgaccggcaagatcaagctgcccaaggacagcttcagacccagcgccggctggacctgggccggcgactggttcgtgtgccccgagaagaccctgctgcacgacatggacgccggccacctgagcttcgtggaggaggtgttcgagaaccagaccagactgcccggcggccagtggatctacatgagcgacaactacaccgacgtgaacggcgagaaggtgctgcccaaggacgacatcgagtgccccctgggctggaagtgggaggacgaggagtggagcaccgacctgaacagagccgtggacgagcagggctgggagtacagcatcaccatcccccccgagagaaagcccaagcactgggtgcccgccgagaagatgtactacacccacagaagaagaagatgggtgagactgagaagaagagacctgagccagatggaggccctgaagagacacagacaggccgaggccgagggcgagggctgggagtacgccagcctgttcggctggaagttccacctggagtacagaaagaccgacgccttcagaagaagaagatggagaagaagaatggagcccctggagaagaccggccccgccgccgtgttcgccctggagggcgccctgggcggcgtgatggacgacaagagcgaggacagcatgagcgtgagcaccctgagcttcggcgtgaacagacccaccatcagctgcatcttcgactacggcaacagataccacctgagatgctacatgtaccaggccagagacctggccgccatggacaaggacagcttcagcgacccctacgccatcgtgagcttcctgcaccagagccagaagaccgtggtggtgaagaacaccctgaaccccacctgggaccagaccctgatcttctacgagatcgagatcttcggcgagcccgccaccgtggccgagcagccccccagcatcgtggtggagctgtacgaccacgacacctacggcgccgacgagttcatgggcagatgcatctgccagcccagcctggagagaatgcccagactggcctggttccccctgaccagaggcagccagcccagcggcgagctgctggccagcttcgagctgatccagagagagaagcccgccatccaccacatccccggcttcgaggtgcaggagaccagcagaatcctggacgagagcgaggacaccgacctgccctacccccccccccagagagaggccaacatctacatggtgccccagaacatcaagcccgccctgcagagaaccgccatcgagatcctggcctggggcctgagaaacatgaagagctaccagctggccaacatcagcagccccagcctggtggtggagtgcggcggccagaccgtgcagagctgcgtgatcagaaacctgagaaagaaccccaacttcgacatctgcaccctgttcatggaggtgatgctgcccagagaggagctgtactgcccccccatcaccgtgaaggtgatcgacaacagacagttcggcagaagacccgtggtgggccagtgcaccatcagaagcctggagagcttcctgtgcgacccctacagcgccgagagccccagcccccagggcggccccgacgacgtgagcctgctgagccccggcgaggacgtgctgatcgacatcgacgacaaggagcccctgatccccatccagctggccgacggcctgagcagcctggcccccaccaacaccgccagcccccccagcagcccccacgaggaggagttcatcgactggtggagcaagttcttcgccagcatcggcgagagagagaagtgcggcagctacctggagaaggacttcgacaccctgaaggtgtacgacacccagctggagaacgtggaggccttcgagggcctgagcgacttctgcaacaccttcaagctgtacagaggcaagacccaggaggagaccgaggaccccagcgtgatcggcgagttcaagggcctgttcaagatctaccccctgcccgaggaccccgccatccccatgccccccagacagttccaccagctggccgcccagggcccccaggagtgcctggtgagaatctacatcgtgagagccttcggcctgcagcccaaggaccccaacggcaagtgcgacccctacatcaagatcagcatcggcaagaagagcgtgagcgaccaggacaactacatcccctgcaccctggagcccgtgttcggcaagatgttcgagctgacctgcaccctgcccctggagaaggacctgaagatcaccctgtacgactacgacctgctgagcaaggacgagaagatcggcgagaccgtggtggacctggagaacagactgctgagcaagttcggcgccagatgcggcctgccccagacctactgcgtgagcggccccaaccagtggagagaccagctgagacccagccagctgctgcacctgttctgccagcagcacagagtgaaggcccccgtgtacagaaccgacagagtgatgttccaggacaaggagtacagcatcgaggagatcgaggccggcagaatccccaacccccacctgggccccgtggaggagagactggccctgcacgtgctgcagcagcagggcctggtgcccgagcacgtggagagcagacccctgtacagccccctgcagcccgacatcgagcagggcaagctgcagatgtgggtggacctgttccccaaggccctgggcagacccggcccccccttcaacatcacccccagaagagccagaagattcttcctgagatgcatcatctggaacaccagagacgtgatcctggacgacctgagcctgaccggcgagaagatgagcgacatctacgtgaagggctggatgatcggcttcgaggagcacaagcagaagaccgacgtgcactacagaagcctgggcggcgagggcaacttcaactggagattcatcttccccttcgactacctgcccgccgagcaggtgtgcaccatcgccaagaaggacgccttctggagactggacaagaccgagagcaagatccccgccagagtggtgttccagatctgggacaacgacaagttcagcttcgacgacttcctgggcagcctgcagctggacctgaacagaatgcccaagcccgccaagaccgccaagaagtgcagcctggaccagctggacgacgccttccaccccgagtggttcgtgagcctgttcgagcagaagaccgtgaagggctggtggccctgcgtggccgaggagggcgagaagaagatcctggccggcaagctggagatgaccctggagatcgtggccgagagcgagcacgaggagagacccgccggccagggcagagacgagcccaacatgaaccccaagctggaggaccccagaagacccgacaccagcttcctgtggttcaccagcccctacaagaccatgaagttcatcctgtggagaagattcagatgggccatcatcctgttcatcatcctgttcatcctgctgctgttcctggccatcttcatctacgccttccccaactacgccgccatgaagctggtgaagcccttcagctag

SEQ ID NO: 48955 - DNA, 6306 bp, Artificial Sequence
  derived and/or modified sequence
atgctcagagtgtttattctgtatgccgaaaacgtccacaccccagataccgacatctcagatgcctattgttcagcagttttcgccggagtaaagaagaggaccaaagtcatcaagaatagtgtcaacccagtgtggaacgaggggtttgagtgggatctgaagggcattccgctggatcagggatccgagctccacgtagtggtgaaagaccacgaaaccatgggcaggaatcgtttccttggcgaggcaaaagtcccactcagggaagtcttggccaccccatcactgtccgcaagcttcaatgccccgctactcgatactaaaaagcagccaacgggtgcctccctagtgctccaggtatcctacacccctctccccggcgctgtaccactcttcccccctcccactcctctggagcccagccctacccttcctgatctcgacgtcgtagctgacaccggcggagaggaggacacagaggaccaggggctgacgggtgacgaagctgaaccctttttggatcagagcggggggccaggcgcaccgacgactccccggaaactgccatcacgtcctcccccccactatccgggcatcaaacgtaaacgctccgccccaaccagccggaaactgctatccgacaagccgcaggactttcagatacgggtgcaggttatcgaaggccgccagctacccggcgtcaacattaagccggtggtcaaggtgaccgccgcaggacagacaaaacggactcgaatccataagggcaattctccgctgttcaacgagactttgtttttcaacctcttcgactcccctggggagctatttgacgagccaatcttcattacagtggtggactcaaggtcccttcggactgatgcgctattgggcgaattcagaatggatgtgggtaccatctaccgggaacctcgccacgcctacctgaggaaatggctcctcttgtccgacccagacgacttttctgcgggagcacgcggctacctgaagactagcctgtgcgtgttggggcctggagatgaggcgccactggagcggaaggatccgtcagaggacaaggaggacattgaatctaacctgctgcgacccacaggggtagcattgagaggtgcacatttctgcctgaaggtatttagagccgaggatctgccacagatggatgatgccgttatggataatgtgaaacagatcttcgggttcgagagtaacaagaagaacctagtggacccttttgtagaggtgagcttcgctggtaagatgctgtgctctaaaattctggagaagacagccaacccgcagtggaaccagaatatcaccctcccagcaatgtttccgtcgatgtgcgagaagatgaggattcggattatcgactgggaccggttgacacacaatgacatagtggccaccacctatctgtctatgtcaaagattagcgcacctggtggggagattgaggaggaacccgccggcgctgtgaagccctcaaaagccagtgatctcgatgactatctcggtttcctgcccactttcggcccctgctatatcaacctgtatggtagcccccgtgagttcactggctttcctgatccatatacagagctcaacacagggaaaggcgagggcgttgcttaccgtggccgactactgctctcactggagacgaaattggtcgaacattctgaacaaaaggtggaggacctgcctgctgatgatatcttgcgcgtggaaaagtatttaaggcggcgcaagtactctcttttcgctgctttctattcggcaacaatgctgcaagatgtggatgacgctattcagttcgaggtcagcatcgggaattacgggaataagttcgacatgacctgtctgccgctcgctagcaccactcaatattccagagccgtcttcgatggctgtcattattattaccttccctggggcaacgttaagccggtcgtggtgctcagtagctactgggaagatatcagtcatcggatcgagactcagaatcaactcttaggcatcgctgacaggttggaagctggacttgagcaggtacacttagcattgaaagctcaatgtagcacagaggacgtggattccttggttgcacaactgacagatgagttaatcgccggctgctcccagcccctgggagacattcatgagacccccagcgctacacatttggaccagtacctgtaccagctgaggactcaccatctgagtcagataaccgaagctgctttagcgctaaaacttggccacagcgaactacccgcagcactcgagcaggcagaggactggcttctgcgcctcagggccctcgcggaggaaccccaaaattcactgcccgacatcgtaatttggatgttgcaaggagacaagagagtcgcctaccagcgagtgcccgcccatcaagtactgttcagccgtcggggtgccaactattgcgggaagaactgtggaaagctgcaaacaatctttctcaagtatcctatggaaaaggtacccggcgctcggatgcctgtccagatcagagtcaaattgtggttcggcctgtccgtggacgagaaagaatttaatcagtttgctgaggggaaactgtcagttttcgcagagacctacgaaaacgagaccaagctcgcactcgtcggcaactggggtacgactggccttacctacccaaaatttagcgatgtgactggaaagattaagctgccaaaggattccttcaggccatctgctggctggacatgggcgggcgattggttcgtgtgcccggaaaaaactctgctacatgatatggacgcgggacacctcagtttcgtggaagaggtgtttgaaaatcaaacccgcttgcctggcgggcagtggatttatatgtccgataattataccgacgtgaacggtgagaaggtcctacccaaggacgacattgagtgccccctaggctggaagtgggaggacgaggaatggagcacagatctgaaccgggccgtggacgaacagggttgggagtactccatcaccattcctcctgagcgaaagccgaaacactgggtgccggcagaaaagatgtattatactcacagacggcgtcgatgggtgcgcttgagaaggcgggacctgagccagatggaggctttgaaacggcaccgccaggctgaggctgagggagagggatgggagtacgcatcgctattcggatggaaattccaccttgagtacagaaagaccgacgcctttcgaagacgacggtggcgccgcagaatggaacctctcgagaagacagggcccgccgctgtgttcgcactggaaggcgcattaggcggagtgatggacgataaatcggaggactccatgtctgtctctacattgtccttcggagtgaacaggcctactatcagttgcattttcgattacggcaatcggtatcacctacgttgctacatgtatcaagctcgggatctcgctgctatggacaaggattcttttagcgatccatacgctatcgtgagcttcctgcaccaatcgcagaaaaccgtggtcgtgaaaaataccctcaacccaacttgggaccagactctcatcttttatgagatcgagatcttcggggaacctgccactgtcgccgaacagccgccgagtatcgtggtcgagctatacgaccacgacacttatggcgctgacgagtttatgggccgctgtatttgccagccttccctagagcgtatgccacgactggcgtggttcccactgactagaggttcccagcccagcggcgaattacttgccagcttcgaactgattcagcgtgagaagccagccattcatcacatacctggatttgaggtgcaagagaccagccgtatcttggacgaaagtgaggatacagatctcccttaccccccccctcaacgagaggcaaacatctacatggtgccacaaaatatcaagccggcattgcagaggactgctatcgaaatccttgcttgggggctgcgcaatatgaaatcgtatcagctagctaacatttcatccccatctctggtggtggagtgcggagggcagacggtgcagtcatgtgttattcgcaatctgaggaaaaacccaaatttcgacatttgcaccctgtttatggaggtgatgctcccgcgggaggaactatattgcccccccatcacagtgaaggttatcgataacagacagtttgggcgtcggccagtcgtgggtcagtgcactatccgatctcttgaatcctttctgtgcgatccgtattcagccgagtcaccaagtccccagggtggccctgacgatgtgagcctcctgagccccggagaggatgtcctcatcgacatcgatgataaggaaccactcattccaattcagctagctgatggcctgtctagcctagcgccaacgaacacggcctctcccccttctagcccccatgaagaagaatttattgactggtggagcaagttttttgcctctataggagagcgcgagaagtgcggcagctaccttgaaaaagactttgataccctcaaagtgtatgacacccaattagaaaacgttgaggcattcgagggactcagcgatttttgcaatacatttaagctctacaggggcaagacccaggaagaaaccgaggacccctctgtgattggagagttcaaaggccttttcaaaatctatccactgcccgaggatccggcaattcccatgcccccaaggcaattccatcaacttgctgctcagggccctcaggagtgtctggtgcgcatctatatcgttcgcgcattcggccttcagcccaaagacccaaatggtaaatgtgatccgtacattaaaatctcaatcgggaagaagagcgtgtcggaccaagataattacatcccttgcacgttagagccagtgttcggaaaaatgtttgaactgacgtgcacgctgcccctggaaaaggatcttaagattactctgtatgattacgacttgctgagcaaggacgagaaaatcggcgagacagtcgtcgacctcgagaacaggcttctttctaagttcggcgcgcgatgcggcctcccacagacttattgcgtgtcagggcccaatcagtggcgcgatcagctgcgtccatcccagctgttgcaccttttttgtcagcaacacagagtgaaagcccccgtctaccggaccgatcgcgttatgtttcaggataaggaatactccatcgaggagatcgaggcaggacgcatccctaaccctcacttaggaccagtggaggaacgactggctttgcacgtcctgcagcagcagggcctggtcccggagcacgtcgagtctcgtcctctatactcaccccttcagcccgacatagagcagggaaaactgcaaatgtgggtcgacctcttcccgaaggccttaggacgacccggacctccatttaacatcactccacgaagagctagacgcttctttctgaggtgcatcatctggaacacccgagacgtgattctggacgacttgtccctgaccggagagaagatgtcagacatatacgtaaagggctggatgatcggcttcgaggagcataagcagaaaaccgatgttcactataggtcccttggaggggagggtaatttcaactggaggtttatctttcctttcgattacctgcccgcagaacaagtatgcactatcgcgaagaaagacgcattttggaggttggataagacggaatccaagatccctgctcgagtagtgtttcagatatgggataacgacaagttctccttcgatgactttctcggttcattacagctggaccttaaccgcatgccaaagccagcaaagactgcaaagaaatgctctttggaccagctggacgatgccttccatccagagtggttcgtgagtctgtttgaacagaagactgtgaaaggatggtggccgtgcgtcgctgaggaaggggaaaagaagatcctggctggcaaactggaaatgactctcgaaattgtggccgagtctgaacacgaagaacgcccagctggacagggcagggacgagcctaatatgaacccaaagcttgaggatcctcgtaggcccgacacctccttcctttggtttacaagcccatacaaaactatgaagtttatcttgtggcgacgattcagatgggctatcattctgtttattatattgttcattctgctcttgtttctggccatatttatttacgcgttccctaattatgccgccatgaaactcgtcaaacccttttcctag

SEQ ID NO: 48956 - DNA, 6306 bp, Artificial Sequence
  derived and/or modified sequence
atgctgcgggtcttcatcctgtatgcagaaaatgtgcacaccccagacacagacatcagtgatgcctactgcagcgctgtgtttgctggggtgaagaagaggaccaaggtgatcaagaacagcgtgaaccctgtgtggaatgaaggatttgagtgggacctgaagggcatccccctggaccagggcagcgagctgcacgtggtggtgaaggaccacgagaccatgggcaggaaccgcttcctgggggaggccaaggtgcccctgcgggaggtgctggccacccccagcctgagcgccagcttcaatgcccccctgctggacaccaagaagcagcccactggagccagcctggtgctgcaggtgtcctacacccccctgcctggagctgtgcccctcttccccccacccacccccctggagcccagccccaccctgcctgacctggatgtggtggccgacaccggcggggaggaggacacagaggaccagggcctgactggagatgaggccgagcccttcctggaccagagcggcggccctggggcccccaccacccccaggaagctgcccagccggcccccaccccactacccaggcatcaagaggaagaggtctgcccccaccagcaggaagctgctgagtgacaagccccaggacttccagatccgggtgcaggtgattgagggccggcagctgcccggggtgaacatcaagcctgtggtgaaggtgacagctgctggccagaccaagaggacccgcatccacaagggcaacagccccctcttcaatgagaccctcttcttcaacctgtttgacagccctggagagctgtttgatgagcccatcttcatcaccgtggtggacagccgcagcctgaggacagatgccctgctgggggagttcaggatggatgtgggcaccatctaccgggagcccaggcatgcctacctgaggaagtggctgctgctgagtgaccctgatgacttctctgctggggcccggggctacctgaagaccagcctgtgtgtgctgggccctggagatgaggcccccctggagaggaaggaccccagcgaggacaaggaggacatcgagagcaacctgctgcggcccaccggggtggccctgcggggggcccacttctgcctgaaggtgttccgggcagaggacctgccccagatggatgatgctgtgatggacaacgtgaagcagatcttcggctttgagagcaacaagaagaacctggtggacccctttgtggaggtgtcctttgctgggaagatgctgtgcagcaagatcctggagaagacagccaacccccagtggaaccagaacatcaccctgcctgccatgttccccagcatgtgtgagaagatgaggatccgcatcatcgactgggaccggctgacccacaatgacatcgtggccaccacctacctgtccatgagcaagatcagcgcccctggaggagaaattgaggaggagcctgctggagctgtgaagcccagcaaggccagtgacctggatgactacctgggcttcctgcccaccttcggcccctgctacatcaacctgtatggcagcccccgggagttcaccggcttcccagacccctacacagagctgaacacaggcaagggggagggcgtggcctaccggggccgcctgctgctgagcctggagaccaagctggtggagcacagcgagcagaaggtggaggacctgcctgcagatgacatcctgcgggtggagaagtacctgcggcggaggaagtacagcctgtttgctgccttctacagcgccaccatgctgcaggatgtggatgatgccatccagtttgaggtgtccatcggcaactacggcaacaagtttgacatgacctgcctgcccctggccagcaccacccagtacagcagagctgtgtttgatggctgccactactactacctgccctggggcaatgtgaagcctgtggtggtgctgagcagctactgggaggacatcagccaccgcatcgagacccagaaccagctgctgggcattgctgaccggctggaggccggcctggagcaggtgcacctggccctgaaggcccagtgcagcacagaagatgtggacagcctggtggcccagctgacagatgagctgattgctggctgcagccagcccctgggggacatccacgagacccccagcgccacccacctggaccagtacctgtaccagctgcggacccaccacctgagccagatcacagaggccgccctggccctgaagctgggccacagcgagctgcctgctgccctggagcaggccgaggactggctgctgcggctgcgggccctggccgaggagccccagaacagcctgcctgacatcgtcatctggatgctgcagggcgacaagagggtggcctaccagagggtgcctgcccaccaggtgctcttcagccggcggggggccaactactgtgggaagaactgtgggaagctgcagaccatcttcctgaagtaccccatggagaaggtgcctggggccaggatgcctgtgcagatccgggtgaagctgtggtttggcctgtctgtggatgagaaggagttcaaccagtttgctgagggcaagctgtctgtgtttgctgagacctatgaaaatgagaccaagctggccctggtgggcaactggggcaccaccggcctgacctaccccaagttcagtgatgtgacaggcaagatcaagctgcccaaggacagcttccggcccagcgctggctggacctgggccggggactggtttgtgtgcccagagaagaccctgctgcatgacatggatgctggccacctgagctttgtggaggaggtgtttgagaaccagacccggctgcccggcggccagtggatctacatgtctgacaactacacagatgtgaatggagagaaggtgctgcccaaggatgacattgaatgtcccctgggctggaagtgggaggatgaggagtggagcacagacctgaacagagctgtggatgagcagggctgggagtacagcatcaccatccccccagagaggaagcccaagcactgggtgcctgctgagaagatgtactacacccacagaagaagacgctgggtgcggctgcggcggcgggacctgagccagatggaggccctgaagaggcaccggcaggccgaggccgagggggagggctgggagtatgccagcctgtttggctggaagttccacctggagtacaggaagacagatgccttcagaagaagacgctggaggaggaggatggagcccctggagaagacaggccctgctgctgtgtttgccctggagggcgccctgggcggcgtgatggatgacaagtcagaagattccatgtctgtgtccaccctgagctttggagtgaaccggcccaccatcagctgcatctttgattatggcaaccgctaccacctgcgctgctacatgtaccaggcccgggacctggccgccatggacaaggacagcttcagtgacccctatgccatcgtgtccttcctgcaccagagccagaagacagtggtggtgaagaacaccctgaaccccacctgggaccagaccctcatcttctatgaaattgagatctttggagagcccgccaccgtggccgagcagcccccatccatcgtggtggagctgtatgaccatgacacctacggggctgatgagttcatgggccgctgcatctgccagcccagcctggagaggatgccccggctggcctggttccccctgacccggggcagccagcccagcggggagctgctggccagctttgagctgatccagcgggagaagccagccatccaccacatccctggctttgaggtgcaggagaccagccgcatcctggatgaaagtgaggacacagacctgccctaccccccaccccagcgggaggccaacatctacatggtgccccagaacatcaagccagccctgcagaggacagccatcgagatcctggcctggggcctgaggaacatgaagagctaccagctggccaacatcagcagccccagcctggtggtggagtgtggcggccagacagtgcagagctgtgtgatccggaacctgaggaagaaccccaactttgacatctgcaccctcttcatggaggtgatgctgccccgggaggagctgtactgcccccccatcaccgtgaaggtgattgacaaccggcagtttggaagaagacctgtggtgggccagtgcaccatccgcagcctggagagcttcctgtgtgacccctacagcgctgagagccccagcccccagggcggcccagatgatgtgtccctgctgagccctggagaagatgtgctgattgatattgatgacaaggagcccctcatccccatccagctggctgatggcctgagcagcctggcccccaccaacacagccagcccccccagcagcccccatgaggaggagttcatcgactggtggagcaagttctttgccagcatcggggagcgggagaagtgtggcagctacctggagaaggactttgacaccctgaaggtgtatgacacccagctggagaatgtggaggcctttgagggcctgagtgacttctgcaacaccttcaagctgtaccggggcaagacccaggaggagacagaggaccccagcgtgattggagagttcaagggcctcttcaagatctaccccctgcctgaagatcctgccatccccatgccaccccggcagttccaccagctggccgcccagggcccccaggagtgcctggtgcgcatctacatcgtgcgggccttcggcctgcagcccaaggaccccaatggaaaatgtgacccctacatcaagatcagcatcggcaagaagtctgtgtctgaccaggacaactacatcccctgcaccctggagcctgtgtttgggaagatgtttgagctgacctgcaccctgcccctggagaaggacctgaagatcaccctgtatgactatgacctgctgagcaaggatgagaagatcggggagaccgtggtggacctggagaaccggctgctgagcaagtttggagcccgctgtggcctgccccagacctactgtgtgtctggccccaaccagtggagggaccagctgcggcccagccagctgctgcacctgttctgccagcagcaccgggtgaaggcccctgtgtacagaacagacagagtgatgttccaggacaaggagtacagcattgaggagattgaggccggccgcatccccaacccccacctgggccctgtggaggagcggctggccctgcacgtgctgcagcagcagggcctggtgcctgagcacgtggagagccggcccctgtacagccccctgcagcctgacatcgagcagggcaagctgcagatgtgggtggacctcttccccaaggccctgggccggcccggcccccccttcaacatcaccccaagaagagcccggcgcttcttcctgcgctgcatcatctggaacaccagagatgtgatcctggatgacctgagcctgaccggggagaagatgtctgacatctacgtgaagggctggatgattggatttgaggagcacaagcagaagacagatgtgcactaccgcagcctgggcggggagggcaacttcaactggaggttcatcttcccctttgactacctgcctgctgagcaggtgtgcaccatcgccaagaaggatgccttctggaggctggacaagacagagagcaagatcccagcccgggtggtgttccagatctgggacaatgacaagttctcctttgatgacttcctgggcagcctgcagctggacctgaacaggatgcccaagccagccaagacagccaagaagtgcagcctggaccagctggatgatgccttccaccctgagtggtttgtgtccctgtttgagcagaagacagtgaagggctggtggccctgtgtggccgaggagggggagaagaagatcctggccggcaagctggagatgaccctggagatcgtggccgagagcgagcacgaggagaggcctgctggccagggcagagatgagcccaacatgaaccccaagctggaggacccccggcggccagacaccagcttcctgtggttcaccagcccctacaagaccatgaagttcatcctgtggaggcgcttccgctgggccatcatcctcttcatcatcctcttcatcctgctgctcttcctggccatcttcatctatgccttccccaactatgctgccatgaagctggtgaagcccttctcctag

SEQ ID NO: 48957 - DNA, 6739 bp, Artificial Sequence
  derived and/or modified sequence
gggtggaagatgagcagaagcccctgttctcggaacgccggctgacaagcggggtgagcgcagccggggcggggacccagcctagcccactggagcagccgggggtggcccgttcccctttaagagcaactgctctaagccaggagccagagattcgagccggcctcgcccagccagccctctccagcgaggggacccacaagcggcgcctcggccctcccgacctttccgagccctctttgcgccctgggcgcacggggccctacacgcgccaagcatgctgagggtcttcatcctctatgccgagaacgtccacacacccgacaccgacatcagcgatgcctactgctccgcggtgtttgcaggggtgaagaagagaaccaaagtcatcaagaacagcgtgaaccctgtatggaatgagggatttgaatgggacctcaagggcatccccctggaccagggctctgagcttcatgtggtggtcaaagaccatgagacgatggggaggaacaggttcctgggggaagccaaggtcccactccgagaggtcctcgccacccctagtctgtccgccagcttcaatgcccccctgctggacaccaagaagcagcccacaggggcctcgctggtcctgcaggtgtcctacacaccgctgcctggagctgtgcccctgttcccgccccctactcctctggagccctccccgactctgcctgacctggatgtagtggcagacacaggaggagaggaagacacagaggaccagggactcactggagatgaggcggagccattcctggatcaaagcggaggcccgggggctcccaccaccccaaggaaactaccttcacgtcctccgccccactaccccgggatcaaaagaaagcgaagtgcgcctacatctagaaagctgctgtcagacaaaccgcaggatttccagatcagggtccaggtgatcgaggggcgccagctgccgggggtgaacatcaagcctgtggtcaaggttaccgctgcagggcagaccaagcggacgcggatccacaagggaaacagcccactcttcaatgagactcttttcttcaacttgtttgactctcctggggagctgtttgatgagcccatctttatcacggtggtagactctcgttctctcaggacagatgctctcctcggggagttccggatggacgtgggcaccatttacagagagccccggcacgcctatctcaggaagtggctgctgctctcagaccctgatgacttctctgctggggccagaggctacctgaaaacaagcctttgtgtgctggggcctggggacgaagcgcctctggagagaaaagacccctctgaagacaaggaggacattgaaagcaacctgctccggcccacaggcgtagccctgcgaggagcccacttctgcctgaaggtcttccgggccgaggacttgccgcagatggacgatgccgtgatggacaacgtgaaacagatctttggcttcgagagtaacaagaagaacttggtggacccctttgtggaggtcagctttgcggggaaaatgctgtgcagcaagatcttggagaagacggccaaccctcagtggaaccagaacatcacactgcctgccatgtttccctccatgtgcgaaaaaatgaggattcgtatcatagactgggaccgcctgactcacaatgacatcgtggctaccacctacctgagtatgtcgaaaatctctgcccctggaggagaaatagaagaggagcctgcaggtgctgtcaagccttcgaaagcctcagacttggatgactacctgggcttcctccccacttttgggccctgctacatcaacctctatggcagtcccagagagttcacaggcttcccagacccctacacagagctcaacacaggcaagggggaaggtgtggcttatcgtggccggcttctgctctccctggagaccaagctggtggagcacagtgaacagaaggtggaggaccttcctgcggatgacatcctccgggtggagaagtaccttaggaggcgcaagtactccctgtttgcggccttctactcagccaccatgctgcaggatgtggatgatgccatccagtttgaggtcagcatcgggaactacgggaacaagttcgacatgacctgcctgccgctggcctccaccactcagtacagccgtgcagtctttgacgggtgccactactactacctaccctggggtaacgtgaaacctgtggtggtgctgtcatcctactgggaggacatcagccatagaatcgagactcagaaccagctgcttgggattgctgaccggctggaagctggcctggagcaggtccacctggccctgaaggcgcagtgctccacggaggacgtggactcgctggtggctcagctgacggatgagctcatcgcaggctgcagccagcctctgggtgacatccatgagacaccctctgccacccacctggaccagtacctgtaccagctgcgcacccatcacctgagccaaatcactgaggctgccctggccctgaagctcggccacagtgagctccctgcagctctggagcaggcggaggactggctcctgcgtctgcgtgccctggcagaggagccccagaacagcctgccggacatcgtcatctggatgctgcagggagacaagcgtgtggcataccagcgggtgcccgcccaccaagtcctcttctcccggcggggtgccaactactgtggcaagaattgtgggaagctacagacaatctttctgaaatatccgatggagaaggtgcctggcgcccggatgccagtgcagatacgggtcaagctgtggtttgggctctcagtggatgagaaggagttcaaccagtttgctgaggggaagctgtctgtctttgctgaaacctatgagaacgagactaagttggcccttgttgggaactggggcacaacgggcctcacctaccccaagttttctgacgtcacgggcaagatcaagctacccaaggacagcttccgcccctcggccggctggacctgggctggagattggttcgtgtgtccggagaagactctgctccatgacatggacgccggtcacctgagcttcgtggaagaggtgtttgagaaccagacccggcttcccggaggccagtggatctacatgagtgacaactacaccgatgtgaacggggagaaggtgcttcccaaggatgacattgagtgcccactgggctggaagtgggaagatgaggaatggtccacagacctcaaccgggctgtcgatgagcaaggctgggagtatagcatcaccatccccccggagcggaagccgaagcactgggtccctgctgagaagatgtactacacacaccgacggcggcgctgggtgcgcctgcgcaggagggatctcagccaaatggaagcactgaaaaggcacaggcaggcggaggcggagggcgagggctgggagtacgcctctctttttggctggaagttccacctcgagtaccgcaagacagatgccttccgccgccgccgctggcgccgtcgcatggagccactggagaagacggggcctgcagctgtgtttgcccttgagggggccctgggcggcgtgatggatgacaagagtgaagattccatgtccgtctccaccttgagcttcggtgtgaacagacccacgatttcctgcatattcgactatgggaaccgctaccatctacgctgctacatgtaccaggcccgggacctggctgcgatggacaaggactctttttctgatccctatgccatcgtctccttcctgcaccagagccagaagacggtggtggtgaagaacacccttaaccccacctgggaccagacgctcatcttctacgagatcgagatctttggcgagccggccacagttgctgagcaaccgcccagcattgtggtggagctgtacgaccatgacacttatggtgcagacgagtttatgggtcgctgcatctgtcaaccgagtctggaacggatgccacggctggcctggttcccactgacgaggggcagccagccgtcgggggagctgctggcctcttttgagctcatccagagagagaagccggccatccaccatattcctggttttgaggtgcaggagacatcaaggatcctggatgagtctgaggacacagacctgccctacccaccaccccagagggaggccaacatctacatggttcctcagaacatcaagccagcgctccagcgtaccgccatcgagatcctggcatggggcctgcggaacatgaagagttaccagctggccaacatctcctcccccagcctcgtggtagagtgtgggggccagacggtgcagtcctgtgtcatcaggaacctccggaagaaccccaactttgacatctgcaccctcttcatggaagtgatgctgcccagggaggagctctactgcccccccatcaccgtcaaggtcatcgataaccgccagtttggccgccggcctgtggtgggccagtgtaccatccgctccctggagagcttcctgtgtgacccctactcggcggagagtccatccccacagggtggcccagacgatgtgagcctactcagtcctggggaagacgtgctcatcgacattgatgacaaggagcccctcatccccatccagcttgcagacggtctgtcgagcttggcccccactaacacggcttctcctccatccagtcctcatgaggaagagttcatcgattggtggagcaaattctttgcctccataggggagagggaaaagtgcggctcctacctggagaaggattttgacaccctgaaggtctatgacacacagctggagaatgtggaggcctttgagggcctgtctgacttttgtaacaccttcaagctgtaccggggcaagacgcaggaggagacagaagatccatctgtgattggtgaatttaagggcctcttcaaaatttatcccctcccagaagacccagccatccccatgcccccaagacagttccaccagctggccgcccagggaccccaggagtgcttggtccgtatctacattgtccgagcatttggcctgcagcccaaggaccccaatggaaagtgtgatccttacatcaagatctccatagggaagaaatcagtgagtgaccaggataactacatcccctgcacgctggagcccgtatttggaaagatgttcgagctgacctgcactctgcctctggagaaggacctaaagatcactctctatgactatgacctcctctccaaggacgaaaagatcggtgagacggtcgtcgacctggagaacaggctgctgtccaagtttggggctcgctgtggactcccacagacctactgtgtctctggaccgaaccagtggcgggaccagctccgcccctcccagctcctccacctcttctgccagcagcatagagtcaaggcacctgtgtaccggacagaccgtgtaatgtttcaggataaagaatattccattgaagagatagaggctggcaggatcccaaacccacacctgggcccagtggaggagcgtctggctctgcatgtgcttcagcagcagggcctggtcccggagcacgtggagtcacggcccctctacagccccctgcagccagacatcgagcaggggaagctgcagatgtgggtcgacctatttccgaaggccctggggcggcctggacctcccttcaacatcaccccacggagagccagaaggtttttcctgcgttgtattatctggaataccagagatgtgatcctggatgacctgagcctcacgggggagaagatgagcgacatttatgtgaaaggttggatgattggctttgaagaacacaagcaaaagacagacgtgcattatcgttccctgggaggtgaaggcaacttcaactggaggttcattttccccttcgactacctgccagctgagcaagtctgtaccattgccaagaaggatgccttctggaggctggacaagactgagagcaaaatcccagcacgagtggtgttccagatctgggacaatgacaagttctcctttgatgattttctgggctccctgcagctcgatctcaaccgcatgcccaagccagccaagacagccaagaagtgctccttggaccagctggatgatgctttccacccagaatggtttgtgtccctttttgagcagaaaacagtgaagggctggtggccctgtgtagcagaagagggtgagaagaaaatactggcgggcaagctggaaatgaccttggagattgtagcagagagtgagcatgaggagcggcctgctggccagggccgggatgagcccaacatgaaccctaagcttgaggacccaaggcgccccgacacctccttcctgtggtttacctccccatacaagaccatgaagttcatcctgtggcggcgtttccggtgggccatcatcctcttcatcatcctcttcatcctgctgctgttcctggccatcttcatctacgccttcccgaactatgctgccatgaagctggtgaagcccttcagctgaggactctcctgccctgtagaaggggccgtggggtcccctccagcatgggactggcctgcctcctccgcccagctcggcgagctcctccagacctcctaggcctgattgtcctgccagggtgggcagacagacagatggaccggcccacactcccag

SEQ ID NO: 48958 - DNA, 6306 bp, Artificial Sequence
  derived and/or modified sequence
atgctgcgggtgttcatcctgtacgccgagaacgtgcacacccccgataccgatatctccgatgcttattgcagtgcggtctttgccggggtgaagaagagaactaaagtcatcaagaatagtgtgaatcccgtgtggaatgaaggctttgagtgggacctgaaggggatccccctggatcaaggatctgagctgcacgtcgtggtgaaggatcatgaaaccatgggccgcaataggtttctaggggaggcaaaggtgccactgcgcgaagtcctggcaactcctagcctgagtgccagttttaatgcccctctgctagacacaaaaaagcagcctactggtgcgtctctcgtgctgcaggtaagttacacacctctgccaggggccgtgccactctttccaccaccaacgcccctggagcccagtcctactctgccagatcttgacgtcgtcgctgataccggtggcgaggaagatacagaagatcaggggctcaccggcgatgaggcagagcccttcttggaccagtccggtgggcccggggcgcctaccacccctagaaaactgccatcccgcccgcccccacactacccaggtataaaacgcaagcgctcagcacccacatccagaaaacttctgtccgataagccccaggacttccagatccgcgtgcaggtgatcgaaggtagacagcttcccggcgtgaacattaagccggttgtgaaagtgactgccgctggtcagaccaagcggactcgcatccacaagggtaactccccactgtttaatgaaaccctgttctttaacctgttcgattcaccgggcgaactttttgatgagcccatctttatcaccgtggtcgatagcagatcactacgcaccgatgccctgctcggcgagtttcgtatggacgtaggcactatttatagagagccccggcacgcctatctgaggaagtggctcctactctcagatcctgacgatttctccgccggtgcacgcgggtatctgaagacctcattatgcgtgctaggaccaggtgatgaggcaccgttggagcgaaaagatcctagcgaggacaaagaagatatcgagtctaatctgttacggcccacaggggtggccctgagaggggcccatttctgcttaaaggtgtttcgggccgaagacctgcctcagatggacgatgctgtcatggacaatgtgaaacagattttcggttttgaatcaaacaagaaaaacctggtggatccttttgtcgaagtatccttcgccggcaagatgctgtgctccaaaattctcgaaaagaccgcgaacccccagtggaaccagaacatcaccctgccggctatgttcccctctatgtgcgagaaaatgcgaatccggattatcgattgggaccgcctgacccacaatgatatagtcgcaaccacttacctcagtatgtccaagatttctgcacccggaggcgagattgaggaggagccagctggagctgtcaaaccatccaaggcatctgacctcgatgactatctaggtttcctcccaacatttgggccttgctatattaatctgtacggttctcccagagagttcacaggattcccagatccatataccgagttaaataccggcaagggcgaaggcgtggcatacaggggcagacttctactttctcttgaaaccaagcttgtcgaacattcggaacagaaggtggaggatttaccagccgatgatatcctgagggtggagaagtatctgcggcgccgcaagtacagcctgttcgccgccttttattcagctaccatgttgcaggacgtggatgacgccatccagttcgaggttagcatcgggaactacggcaacaagttcgatatgacatgtctgcctctcgcttcaacaactcagtacagccgggccgtgtttgacggatgtcactactactacctcccctgggggaatgtaaagcccgtagtcgtcctttcctcttattgggaagatatcagtcaccgaatcgagacccagaatcagctgctggggatcgccgaccgcctcgaagccgggctggagcaggtgcatctggcactgaaggcacagtgctcaaccgaggatgtcgactctctggtggcccagctcaccgatgagctgattgccggatgttctcagcctctcggagacattcatgagactcctagcgccacgcacctggatcaatacttgtaccagcttagaacacaccacttgtcccaaattacagaggccgccttagctttgaagcttggccacagcgagttgccagcagccctggagcaggcggaggactggttgctcaggctcagagccctcgctgaggagcctcagaactccctccctgacattgtcatctggatgctgcagggtgacaagcgggtcgcttaccaaagggtccctgcacatcaggtgttgttctcgcgacgaggcgctaattactgcgggaaaaattgcggaaaactacagactattttccttaagtaccccatggaaaaggtgcctggggcacgcatgcccgtccagattcgcgtcaaattgtggtttggcctgtctgtcgacgaaaaggaattcaatcaattcgctgaaggaaagctcagtgtgtttgcagaaacctacgaaaacgaaaccaaactggcactggtagggaactggggaactacaggcctgacctatcccaagttcagtgatgttacgggtaagatcaaactccctaaagactcttttaggccaagcgctggatggacctgggctggcgattggtttgtttgcccggagaaaactcttctgcatgacatggatgcgggccacctgtcttttgttgaagaagtgttcgagaaccaaacccgtctacccggcggccagtggatatatatgagtgataactacactgatgtgaacggtgaaaaagtactgcccaaggatgatatcgaatgtcccctgggatggaagtgggaggatgaagagtggtcgacagacttgaatagggccgtcgacgaacaaggctgggaatactcaataaccattcccccagagcgcaagcctaagcactgggtccccgccgaaaagatgtattacacacaccggcgccgtaggtgggtccgtttaagacgtagagatctgagtcagatggaagccctcaagaggcaccgtcaggccgaagctgagggtgaaggatgggagtatgcttcattgtttggttggaagtttcatctcgaataccgtaaaaccgatgccttcaggagacggagatggaggcgacggatggagcctctcgagaagactggaccagctgctgtgtttgcgctggagggggcgcttggtggggttatggacgataagtccgaggattctatgagcgtatcaacgctctctttcggtgtgaatcggcctaccatcagttgcatctttgactatgggaaccggtaccacctccggtgttatatgtaccaagcccgcgatctcgcagctatggataaagactctttttccgatccctatgcaatcgtgtctttcctgcatcagagtcagaagaccgtcgtagtgaaaaacaccctgaacccaacctgggaccaaactctcatcttttacgagatagaaatcttcggcgaacccgctacagtagccgaacagcctccaagcatagtggtcgaactgtacgatcacgatacatacggcgcagacgagtttatgggtcggtgtatctgccagccatcactcgaaagaatgccgcgattagcttggtttcccttgacccgcggcagccagccctccggagaactgctcgcaagtttcgaacttattcagcgggagaaaccagccattcatcacatacccggattcgaggtacaagagacgtcgagaatacttgacgaaagtgaagacactgacctcccctatcccccaccccagcgggaagctaatatctacatggtccctcagaacattaagccagcgcttcagagaacagcaatcgaaatcctggcgtggggacttaggaatatgaagagctaccagctagctaatattagttcgccctctctcgtcgtagagtgtggaggtcagaccgtgcaaagttgcgtgatcaggaacctccgtaagaatcctaactttgacatctgcaccctgttcatggaggtcatgctgcccagggaagagctgtactgtcctcctataacagtgaaagtgattgacaaccgccagttcggcaggcggcctgtagtggggcagtgcactatccggtctctggagtcctttctgtgtgacccttactcagcagagtctccctcgcctcaggggggtcccgatgatgtgtcactcctgtctccaggagaagacgtgttgatagacattgatgacaaggagcccctgattcccattcagctggcagacggactgagctcactggcacctacaaacactgcgtctcctccaagtagccctcacgaggaggagttcatcgattggtggtctaaattttttgcctctatcggggaaagagaaaaatgcggaagctacctggaaaaggatttcgacactctgaaggtgtatgacacccagctcgaaaatgtagaagcttttgagggattgtcggacttttgcaatacatttaagctctacagaggaaaaacacaggaggaaactgaagacccctctgtcataggcgaattcaaaggtctcttcaagatttaccccctccccgaggacccagcgatacctatgccgccacggcagttccatcaactggctgcgcagggccctcaggagtgcctggtgcgtatatacattgtcagggccttcggtttgcagccaaaggatcccaatggtaagtgtgatccatacatcaagatctcaattggaaagaaatccgttagcgatcaggataactacatcccttgtaccttggaacccgtattcggaaagatgtttgagcttacttgcactcttcccttggaaaaagacctaaaaatcaccttgtatgactacgacttgctgtccaaggatgagaagatcggggaaacagtggtggatctggagaacagactgctcagcaagtttggagcacgctgtggtctacctcaaacctattgcgtgagcggccctaatcaatggcgagatcagttaagaccttctcagctgctgcatctcttttgtcagcaacatagggtgaaagcgcctgtgtacagaaccgaccgggtcatgttccaggacaaggaatattccattgaggagattgaagcaggtagaattccaaatccacacctgggacctgtagaagagcgattggccttacatgttctgcaacagcaagggcttgtcccggagcacgtagaatcaagacccctctactctcctctgcagccggacattgagcaaggcaagcttcagatgtgggtcgacctcttccccaaagcactgggtaggcctgggcccccctttaacattactccgaggcgcgccagaaggtttttccttagatgcattatctggaacacccgtgacgtaattctcgacgatctctctctaacaggcgagaaaatgagcgacatctatgtcaagggatggatgataggattcgaggagcacaagcaaaaaacagacgtccactatcggtcactgggaggcgaaggcaacttcaattggcgatttatattccccttcgattatttaccagcagagcaggtgtgtaccatcgctaaaaaggatgccttttggcgactggataagacagaaagcaagattcctgcgcgagtggtctttcagatttgggacaacgacaaattcagctttgacgatttcctcggttcccttcagctggatcttaacaggatgcctaagcctgcgaagacagctaaaaagtgttccctggaccagctggacgacgcctttcatccagagtggttcgtatcactgttcgagcagaagacagtcaagggttggtggccttgcgtggccgaagaaggagagaagaagatcctggcgggcaagttagagatgaccctagaaatcgttgccgaatcagagcatgaagaacgaccagcagggcaaggacgtgatgagccaaatatgaatcccaagctggaagaccccagacgacctgacacctcgttcctgtggtttacatccccatacaaaaccatgaagttcatcctgtggcggcgattcaggtgggccattatcctgtttattattctgtttatccttctgctattccttgcaatatttatttatgcgttcccaaactacgcagcaatgaaattggttaagcctttctcatag

SEQ ID NO: 48959 - DNA, 6305 bp, Artificial Sequence
  derived and/or modified sequence
atgttgcgtgtattcatactctatgctgagaatgtccatacccccgacacagacatttctgatgcttactgctccgcggtgtttgctggggttaagaaacgcacaaaggtgatcaagaactccgtgaatcctgtatggaatgagggctttgaatgggatcttaaagggatccccctggatcaggggtctgagcttcacgtggtcgtgaaagaccacgaaacaatgggcagaaatcggtttctgggcgaagccaaagtcccccttcgcgaggttctggctaccccatctctgtcggctagcttcaacgctccattgctcgatacaaagaaacagccaaccggagctagcctggtactccaggtgtcctatacgcctttacctggggctgtgccattatttccacctcctacgcccttagagccgagcccaaccctacccgacctggatgtggtggcagataccggaggcgaggaagataccgaagaccagggactgaccggagatgaagccgaaccctttctggaccagagcggagggccaggggctcccacaactccccgtaagctcccatcccgccctccccctcactatcccggtataaagaggaagcgttcggctccaaccagtcggaagctcctgagtgataagcctcaggatttccagattagagtgcaggttatcgaagggaggcagctgccaggcgtgaatatcaagccggtggttaaggttactgcagccggtcagactaaaagaacacgtattcacaaaggcaatagtccacttttcaacgaaacactttttttcaacctctttgattcccctggtgagctgtttgacgaaccgattttcatcacggtggtggatagtcgcagcctgcggacagatgccttgctgggcgagtttagaatggatgttgggacaatatatagggagcccagacacgcttaccttcggaagtggctcctgctgagcgacccagacgacttttctgcaggagccaggggatacttgaaaacatccttgtgtgtcctgggtccaggcgatgaggcccctctcgaacgaaaggatcctagcgaagataaagaagacatcgaatcgaatttactgagacccacaggagttgcactgcgcggtgcccacttctgtctgaaggtgttccgggctgaagatttaccccagatggatgatgccgtcatggataacgtcaaacaaatcttcggctttgaaagcaacaaaaaaaatcttgtggacccttttgtagaggtcagttttgcaggaaaaatgctgtgctctaagattttagaaaagaccgccaacccccagtggaaccagaatatcacactacctgccatgtttccatctatgtgtgagaagatgagaattcggattatcgattgggataggctcacccataacgatattgtggccaccacatacctgtccatgagcaaaatctcggcgcctgggggagagatcgaggaagaacccgcaggagcggtgaagccctcaaaagctagcgacctggacgactacctgggttttctacccacgttcggaccttgttacatcaacctgtacggttcacctagagaatttaccgggtttccagatccgtacactgagctgaacaccggaaagggagaaggtgtagcttacagaggcaggctgctgctgtcgttggagaccaaattggttgagcattctgagcagaaagtggaggatcttcccgctgatgacattctacgggtagagaagtacttgagacgtagaaagtactcactgtttgctgctttttacagcgcaactatgcttcaagatgtagacgatgccatacagtttgaggtgtccattggaaattacggcaataagtttgatatgacatgtttgcctctggcgagcactacacaatacagtagagcagtctttgacggatgtcactactattatctgccgtggggaaatgtcaaacctgtggttgtcttgtcctcttattgggaggatataagccatagaattgagactcaaaaccaactcctgggtattgctgaccgccttgaggcgggtttagaacaggtccacctggccttaaaggctcagtgtagtacagaagacgtggattcgttggtagcacagctgacagatgaactgatagcaggatgctcacagccactgggggacatccacgagacccctagcgcaacacatctagaccagtatctgtaccagctgcgtacccatcatctgtcccagataactgaagctgcactagccctgaagctgggacattcggaacttccggcagcccttgaacaggctgaagattggttgcttcgactgcgggctctggccgaagaaccccaaaattccctgcccgatattgtgatttggatgctccagggagacaaacgtgtcgcttatcagcgagtgccagcgcaccaggtattattttcccggaggggcgctaattactgcggcaaaaattgcggcaaactccagaccattttcctgaagtaccccatggaaaaagtcccaggggctagaatgcctgtgcagattagagtgaaactgtggttcggtttaagcgtagatgaaaaggagttcaaccaattcgcggaaggcaaactctcagtgtttgcagaaacctacgagaatgaaacaaaactggccctggtgggcaactgggggacaaccggcctaacataccctaagttctcagacgtgactggcaagattaagttaccaaaagactctttccgcccaagcgcaggctggacctgggcaggcgactggttcgtgtgcccggaaaaaacactactgcacgacatggacgcaggccatctgtcattcgtcgaggaggtgttcgagaaccaaacaagactgcctggcggtcagtggatctatatgtccgacaactacacagacgtcaacggagagaaggtgctcccgaaggacgacattgagtgtcctctaggatggaagtgggaggacgaggaatggtcgaccgacctgaatcgcgcagtggacgagcaaggctgggagtatagtattacaattcctccagagagaaaaccgaagcactgggtccctgccgagaaaatgtactacacacacagaagacgtcgctgggtacgactcagacggagagacctcagtcagatggaggccttaaaaagacaccggcaggccgaggcagaaggcgaagggtgggagtacgcgagcttatttggctggaaatttcacctggagtaccgcaagaccgacgcattcaggaggcggagatggaggagaagaatggagcccttagaaaagacaggccctgctgccgtgttcgccttagaaggcgctctgggaggggtgatggatgataaatcagaggacagtatgtctgtatcaactctgtcttttggcgtgaataggccaaccataagctgcatatttgactacggtaatcgatatcatctcaggtgctatatgtatcaagccagagatctggccgcaatggacaaagacagcttttctgacccttatgccattgtttccttcctccaccagtctcagaagactgtcgtggtgaagaacactctcaaccccacttgggatcaaacccttatcttctacgagattgagatatttggcgagccagctactgtcgccgagcagcctcctagcattgtggtggagctatatgatcacgatacttatggagcagatgagttcatgggcaggtgtatctgtcaacccagcttggagcgcatgccaagattggcctggttcccactgacccggggaagtcagcccagtggtgaattattggcttctttcgagctcatccaaagagaaaagcctgccattcaccatatccccggtttcgaagtccaggagactagtcgcattttggacgaatccgaagacactgacctgccttaccccccacctcagcgcgaggccaatatttacatggtccctcagaacattaagcctgccttacagcgaacggctattgagatccttgcatgggggctcagaaacatgaaaagttaccaattagctaatatatctagcccatcactggtggtcgaatgtggcggacaaaccgtgcaaagctgtgtaatacggaatctgcgtaagaaccctaactttgacatttgcactctgtttatggaggtaatgctcccccgagaggaactgtattgtccaccgattacagtgaaagtgatcgataaccggcagtttggacggcgacccgtggtgggtcaatgcactattaggagcttagagtcgttcctatgcgatccctacagtgcagaatccccgtccccacagggcggacccgacgatgtgagtctattgagtccaggcgaggacgttttaatcgatattgacgacaaggaacccctgattcccatccagctcgcagacggcctgagctctctggcacccaccaataccgcttcgcccccttcctcacctcacgaggaagagttcattgactggtggtccaaattttttgcgagtattggcgagagagaaaaatgtggcagttacctggagaaggatttcgacacgctcaaagtgtacgacacacaacttgagaatgtggaagcctttgaaggactttcagacttttgtaatactttcaagctgtatcgtggcaagacccaggaggaaaccgaagaccccagcgtaataggggaatttaaaggactcttcaagatatacccactgcccgaggatccagccatccccatgcccccacgccagtttcaccaacttgcagctcaaggtccacaggagtgtttagtccgcatctatattgtccgcgcatttgggctgcaaccaaaagacccaaatggcaagtgcgacccctacataaagatctccattggaaagaaatctgtctccgatcaggacaactatatcccttgtaccttggagcccgtgttcggtaagatgtttgagttgacatgcacacttccactagagaaagacttgaagattacactgtacgactatgaccttctcagtaaagatgagaaaataggcgaaacggtggttgatctcgaaaaccgccttctgtccaagttcggcgctcgttgtggactcccccaaacatactgtgtgtcaggtcccaaccaatggcgagatcaactcagaccctctcaattgttgcatttgttctgccagcagcatagagtgaaggcgccagtgtaccgcactgaccgcgtcatgttccaagacaaagagtactcaatcgaagagattgaggccggaaggattccaaacccccacctgggcccagtggaggaacgtctggcccttcacgtgctgcagcagcaagggctagtgcctgagcatgtagagagccggcctctgtacagccctctgcagccagatattgaacagggaaaattacagatgtgggtcgatttatttccaaaagctctggggcgtcccggtcccccttttaacataacgcctcgtagggcgaggaggttcttcctacgttgtatcatatggaacacccgcgatgtaatactggatgatctttctctgactggcgagaagatgtcagatatctatgtaaagggatggatgattggatttgaggaacataaacaaaagactgatgtgcattacagatcactgggcggtgagggcaatttcaattggaggttcatctttccgttcgattacctccccgcagagcaggtgtgcacaattgcaaaaaaggatgctttctggcggctggataaaactgagagcaaaatccctgctagggtggtcttccaaatttgggacaacgacaagttttcatttgacgattttctcgggtccctccaactcgacttaaacaggatgccaaaaccagcaaaaactgccaaaaaatgcagtcttgaccagctggatgacgctttccacccagagtggtttgtatcactattcgaacagaaaacagtcaagggctggtggccttgtgtggccgaggagggcgagaaaaagatcctggccggtaaattggaaatgactctcgaaatcgtggcagaaagcgagcatgaagagcgtccagctggacaaggcagagatgagcccaatatgaaccccaaactggaggacccacgccgtcctgacacctcgtttctctggttcacatctccctataaaactatgaagttcatcttatggcgaagatttaggtgggcgatcattctcttcatcatactctttatcctgcttctgtttctcgcgatctttatatatgcctttcctaattatgcagccatgaaactggtaaagccttttagtta

SEQ ID NO: 48960 - DNA, 6306 bp, Artificial Sequence
  derived and/or modified sequence
atgctgcgcgtgtttatcctgtatgctgaaaacgtccacaccccggataccgatattagcgatgcctattgttcagctgttttcgccggtgtgaaaaagcgtacgaaagtcatcaaaaattcagttaaccctgtctggaatgaaggctttgaatgggacctgaaaggcattcccctcgaccagggctcggaacttcacgtggtggtgaaggaccacgaaactatgggcaggaacagatttttgggagaagccaaagtcccgctgcgtgaagttctcgctaccccgagtctgtccgcctccttcaacgcccccttgctcgacactaagaaacaacccacaggagcttcactggtgctccaggttagctacaccccactcccgggggccgtgccgctgttccctcctcccactcccctggaaccgtcccccactctgccagatctggatgtcgtggccgatactggcggcgaggaagataccgaggaccaaggattaactggggacgaggcagagccatttctcgatcagagcggaggcccaggcgcgcccaccacaccaagaaaactgcctagccgcccccctccccactatcctggcataaaaaggaagagaagcgccccaacctcccggaaacttctgtcagataaaccccaagatttccagatacgagttcaagtcatcgaggggcgacagttgcccggggtaaacatcaagccagtggtcaaagtgaccgctgcaggacagacgaagcgaactagaattcacaaagggaattcaccacttttcaatgagactctcttctttaatctgttcgactctccgggagagctattcgacgagcctatcttcatcactgtcgtggacagccgctccttgcggacagatgctctgttgggcgaattccggatggacgtcggaaccatctatcgtgagcctcgtcatgcatatctgagaaagtggctgttactgagcgatcctgacgacttcagcgctggcgctaggggatatctcaaaaccagtctatgtgtgttgggccctggcgacgaggcaccactagagcgtaaggacccgtccgaagataaagaggacatcgagtctaacctgctccgaccgacgggggtggctctcagaggggctcatttttgcctcaaggtgttccgcgccgaggatctgccccaaatggatgacgccgttatggacaatgtgaaacagatttttggctttgaatcaaataagaaaaacttggtggaccccttcgtcgaagtgtcctttgcaggaaaaatgttgtgctccaagatcctggaaaaaaccgctaacccccagtggaaccagaacatcacactcccagctatgtttccctctatgtgcgagaaaatgagaattcgtatcattgattgggaccgtctgacccataacgatatagttgccaccacttacctgagcatgtctaagatctctgcacctggcggcgaaatagaagaagaaccagccggagccgtgaaaccctctaaagccagtgatctggatgattatttaggatttttgcccacatttggcccctgttacatcaatttatacggcagccctcgcgaatttactggcttcccagatccatacaccgagttgaatactggaaagggtgagggcgtggcataccgtggaaggctactgctatcattggagaccaagctggtggaacattctgaacagaaggtcgaagatctccccgccgatgacatacttcgagtagagaaatacctgaggagacgcaaatactccctatttgccgccttttactcagcaacaatgctgcaggatgtcgatgatgccatccagttcgaggtcagcattggaaactatggaaacaaattcgacatgacctgcctgcctctagcctccactactcagtactcacgggccgtgttcgacggatgtcactactactatcttccttgggggaatgtaaaacccgttgtagtcctgtcctcgtactgggaagacataagccatagaatagagacccagaaccagctgcttggcatagcagatcggttggaggctggcctggagcaggtacacctggcccttaaggcacagtgctctacagaagacgtggactcactggtggcgcagctgacggatgagctaatcgccggctgctcacagccgctaggagacatacacgaaacacctagcgcaacgcatttggaccagtacctatatcagttgagaacgcatcacctgtctcaaattaccgaggctgccttggctctgaaactcggccactctgaactgcccgccgccctggagcaggccgaagattggctgctccggctcagggcactggcggaggagcctcagaactcccttcccgatatcgtgatctggatgttacaaggtgacaagcgggtagcctatcagcgcgtgccagcacatcaggtgcttttttcccgccgtggagccaactactgcggaaaaaactgtggaaagctgcagaccatcttcctcaagtacccgatggagaaggtacctggggcaaggatgcctgttcagatcagagtaaagctgtggtttgggctgagtgttgatgaaaaggaatttaatcagttcgcagaaggtaaactctcagtgtttgccgagacatacgagaatgagaccaagctggcactggtaggcaattgggggactacaggtcttacctatcccaagttctcagatgtaacaggcaaaatcaaactccccaaagatagctttagaccctccgcaggatggacttgggccggcgactggtttgtgtgccctgaaaagacccttcttcacgatatggatgcaggtcatctgtccttcgtggaagaagtatttgagaaccaaacgagactgcctggaggccagtggatctacatgtctgataattacacagatgttaatggtgaaaaagttttaccaaaggacgatattgaatgcccactcggctggaagtgggaagatgaggagtggtcaacagacctgaaccgggcagtcgacgagcagggatgggagtattccattaccattccaccagaacgcaagccaaagcattgggttcccgctgagaagatgtactacacccaccgccgacggaggtgggtcagattgaggaggcgtgatctaagtcagatggaggcccttaagagacatagacaagccgaagctgaaggggagggatgggagtacgcttccttgtttgggtggaaattccatctggagtatcgaaagaccgacgcctttcgccggagacgttggcggaggagaatggagccactcgagaaaaccggacccgcagccgttttcgccctggagggcgctcttggaggagtcatggacgataaatctgaggactctatgagtgtttcaacattgagttttggcgtgaaccgtccgaccatctcttgtatattcgactacggtaacagatatcatctccgctgctatatgtatcaggcacgggacttggccgcaatggataaagacagtttttcagacccctacgccatcgtttcctttcttcaccaatctcaaaagactgtagttgtcaaaaatactctgaatcctacttgggaccagacactaatcttctacgaaattgaaatctttggagaaccagctacagtagcggaacagcccccctcaattgtggtagaattatatgaccacgatacatatggggccgacgagttcatgggaaggtgcatatgtcagccatcccttgagcggatgccgcgcctagcatggttcccactcacaagagggagccagcctagcggggaactacttgctagctttgagctgattcagagagaaaaaccggccattcatcacatccctggtttcgaggtgcaggaaacctcacgaatactggatgaatcagaggacacagacctgccttatcctcccccccagcgcgaggccaacatctacatggttccccagaacatcaaaccagcactgcagcggaccgccatcgaaatcctagcctggggcctacgcaacatgaagtcctaccaattggccaacatctcttctcctagcctggtggtcgaatgcgggggccagaccgtgcaatcttgtgtgataaggaatctgaggaagaaccccaacttcgatatctgtaccctctttatggaagtgatgctcccccgagaagagctttattgccccccaataaccgttaaggtcatcgataacaggcagtttggaaggcgcccagttgtgggccagtgtaccatcaggtcattggagtcctttctatgcgatccttattctgccgagtcaccatcaccacaggggggtccagatgacgtctcacttctcagtcctggggaggacgtgttgattgatatcgatgacaaagaacctctcattccaatccaactggccgatggactgagctcactggccccaaccaacacagccagccctccaagttcacctcatgaggaagaatttatcgattggtggtcaaagttttttgctagcatcggagagcgcgaaaagtgcggcagctatctcgagaaggattttgataccctgaaggtgtacgatacacagctggagaatgtcgaagcttttgaggggctgagtgacttctgcaacacattcaaactgtatcgggggaaaacacaggaagagaccgaagatccctccgtgatcggggaattcaaaggcctcttcaagatctatccactgcctgaggatcctgccattcccatgccgcccaggcagtttcaccagttagctgcgcagggcccacaggagtgtctagtgagaatatatatcgtgagagcttttggcttgcaacccaaggaccctaatgggaaatgcgatccgtatataaaaatttccatcgggaaaaagtccgtaagcgaccaggacaactatatcccttgtactctggaacccgtattcggtaagatgtttgaactgacatgtactctgcccttggaaaaagacctgaaaataaccctgtacgactacgacttgctgtccaaagacgagaagatcggagaaactgttgttgaccttgaaaaccggctgctgtcaaagttcggagcccgatgcggcctcccacaaacgtactgtgtgtccggcccaaaccagtggcgcgaccaattgaggccaagtcagctcttacaccttttttgccagcagcatagggtgaaagctccagtatataggaccgatagggtgatgtttcaggataaagagtatagcattgaagaaatagaagcgggaaggattcctaatcctcaccttgggccagtggaagagcgattggcactgcacgtcttgcagcaacagggtttggtgcctgaacacgtcgagtcaagacctttatactcccctctacagcctgatattgaacaagggaagttgcagatgtgggttgatctgttcccaaaggccctgggtcggcctgggccccctttcaacatcacccctagacgcgcccgtcgcttcttcctcaggtgcattatatggaacacaagggacgtcatcttggacgatctgtcactgaccggggaaaagatgagcgacatctacgtgaaaggctggatgatagggttcgaagagcataagcagaaaaccgatgttcattatcgatccctggggggtgaagggaattttaactggcggtttattttccctttcgactaccttccagcagagcaggtctgcacaatagccaaaaaagatgcgttttggcgtcttgataagactgagagtaaaattcccgcccgagtcgtgttccaaatatgggataacgataagttctcatttgatgattttctgggctccctccaactggatctcaacagaatgcccaaacccgctaagacagctaagaagtgtagtctggatcagctggatgacgctttccatccggagtggttcgtctctctgtttgaacagaaaacagtgaagggctggtggccctgcgtggccgaggaaggggagaaaaagatattggccggtaaactcgagatgactcttgagattgtggccgagagcgaacatgaagagaggccagcgggccagggacgcgatgaacctaatatgaaccctaaattggaggaccctagacgaccggacacaagttttctctggttcacttctccctataaaaccatgaagttcatcctgtggagacgtttcaggtgggccatcattctcttcattattctgttcatcctattactgttcctggccattttcatttatgcctttccaaactatgctgctatgaaactcgttaagccattttcttag

SEQ ID NO: 48961 - DNA, 6306 bp, Artificial Sequence
  derived and/or modified sequence
atgttaagagtcttcatactgtatgccgaaaacgttcatacccccgacactgatatatcagatgcgtactgttcagcagttttcgcaggcgtgaagaagaggaccaaagtgataaaaaatagcgtgaacccagtatggaacgagggcttcgagtgggacctcaaggggatacccctggaccagggctcagaacttcatgtagtggttaaagatcacgaaaccatgggccggaatagatttttgggcgaggcgaaagtccccttgcgagaagttttggctacacccagcctgagtgcgagtttcaacgcgccattactagacaccaaaaaacagcccacgggcgcctctcttgtccttcaggtgtcttacactccactgcccggcgccgtcccactttttcccccccctacacctttagaaccatcgcctactctgcctgatctggacgtggtggccgataccggcggcgaggaggacacagaagaccagggcttaaccggcgacgaggcagagccgttcctagaccaaagtggcggacctggagccccgactacccccagaaaattgccaagcagaccaccaccccactaccccggcatcaaaaggaaacggtcagctcccacctctcgaaagctgctgtctgacaagccccaggatttccaaattagggttcaggtgatcgagggacgccagctacctggagttaacatcaagcccgtagtgaaggtcaccgccgctggacagaccaagagaacacggattcataaaggaaattcgcctctttttaacgaaacactcttcttcaacctgtttgactcacccggagagttattcgatgaacctattttcatcaccgtggtcgatagtagatccctgcgcacagatgcactgcttggcgaattcagaatggacgtgggaacaatctatcgggaaccccggcatgcctatcttagaaaatggttgctgttgtccgaccctgatgacttttccgccggtgcccgcggctatctgaagacaagtctgtgcgtgctgggccccggcgacgaggcgcccctggaacggaaagatcctagcgaggataaagaggatattgagtcgaatctcttgagacctactggcgtggccttgagaggggcacatttctgtttgaaagtgttccgtgcggaagatctgccccaaatggatgatgcggtgatggataatgttaaacagattttcggctttgaatctaacaaaaaaaacctggttgaccctttcgtagaggttagcttcgctggaaaaatgctctgcagcaagatcctagaaaagacggccaatccacaatggaaccaaaacatcacacttccagctatgtttccatctatgtgtgagaaaatgcgaatacgaatcatcgattgggatagactaacgcacaacgacatagtagcgactacttatctgtccatgagtaaaatatctgcacccggaggtgaaatcgaagaagagccagctggtgctgttaagccctctaaagcttcagacctggatgattaccttggatttctgccaaccttcggaccctgttacattaacctgtatggatctcctcgagaatttactgggtttcccgacccatacactgagctcaacaccggtaagggggagggagtagcctacagaggtagactgctgttgagcctggaaactaaactggtcgaacattctgaacaaaaagttgaagatttgccggcagacgacatccttcgggttgaaaaatacctgcggagacggaagtatagtttatttgctgcattttatagtgccacaatgctgcaggatgtggacgatgcaatacagttcgaggtaagcatcggaaactacgggaacaagtttgacatgacctgtctgccactcgcttcgaccacacagtactctagagccgtgttcgacggatgtcactactattacttgccatgggggaacgtcaaaccagttgttgtactgagctcatactgggaagatatatcccacagaattgagacccaaaaccagctgcttggcattgccgacaggctcgaagctggcctagagcaagttcacctcgctcttaaagcacaatgttcaacagaagacgtggattcactcgttgcccagctgacagatgagttgattgcaggatgctcacagcctctgggagatattcacgaaactccctccgctacacatctcgatcagtatctctatcaactccgaacacatcatctctcacagatcacggaagccgctcttgcgctgaaattggggcactctgagctccccgccgcactcgaacaggccgaagactggctgctgcggctgcgcgcattggccgaggaaccccagaactctctcccagatatcgtcatctggatgctccaaggtgataagagggtcgcctatcagagagttcccgctcaccaggtcctgtttagcaggcgaggagctaactattgtgggaaaaactgtggtaaactgcagacaattttcttgaaataccctatggaaaaagtgccaggagctcgcatgcctgtgcaaatccgagtgaagctgtggttcgggctgagcgttgatgagaaggagtttaaccagttcgccgagggaaaactcagcgttttcgccgagacatacgagaatgaaactaaactagcgctggtcggaaattggggaactaccggtttaacgtatcccaagttctcagatgtaacaggcaaaatcaaactccccaaagatagctttagaccctccgcaggatggacttgggccggcgactggtttgtgtgccctgaaaagacccttcttcacgatatggatgcaggtcatctgtccttcgtggaagaagtatttgagaaccaaacgagactgcctggaggccagtggatctacatgtctgataattacacagatgttaatggtgaaaaagttttaccaaaggacgatattgaatgcccactcggctggaagtgggaagatgaggagtggtcaacagatctaaaccgggccgtggatgaacaagggtgggagtacagtatcaccatcccccccgaaagaaaacctaaacattgggtgcctgcagagaaaatgtactatacgcacagacgcaggagatgggtgagactgaggaggcgggacctctcccagatggaggctctgaaaaggcaccgtcaagctgaagccgagggcgagggctgggagtacgcgagcctattcggctggaaattccacctagagtatcgtaagactgatgccttcaggagacgcagatggaggaggagaatggaacctctcgagaaaaccggacccgcagccgttttcgccctggagggcgctcttggaggagtcatggacgataaatctgaggactctatgagtgtttcaacattgagttttggcgtgaaccgtccgaccatctcttgtatattcgactacggtaacagatatcatctccgctgctatatgtatcaggcacgggacttggccgcaatggataaagacagtttttcagacccctacgccatcgtttcctttcttcaccaatctcaaaagactgtagttgtcaaaaatactctgaatcctacttgggaccagacactgatattctacgaaattgaaatcttcggcgaacccgccaccgtagccgaacagcccccctctattgtcgttgaactgtacgatcatgacacctacggcgctgatgaattcatgggaagatgtatatgccagccgtcactggaacgaatgccccgcctcgcctggttcccactgacccgaggttctcagccttccggggaactccttgctagcttcgagctgatccaaagagaaaaaccagcaatccatcacattccaggcttcgaagtgcaggagacgtccagaatcttagacgaatctgaggatactgacctgccctacccaccacctcagagagaggctaacatctacatggtgccccagaacattaaacccgctctgcaacgcacggcaattgaaatcctggcttgggggctgcgaaatatgaaaagctatcagttggccaacatctcctccccttcattagtcgtcgagtgtggcgggcagacagtgcagtcctgcgtcatcagaaatttgcgaaagaaccccaatttcgatatctgtactttatttatggaggtcatgctgccccgtgaagagctctattgccccccaattacagtgaaggtgatcgataacagacagttcggtaggagacccgtggtaggtcaatgcaccattaggtccctcgaatcatttctctgtgatccctattcagcggaatccccttctccacagggtggccccgatgatgtaagtctgttgtctcctggcgaagacgtgctgattgacatagacgataaagaacccctcattccaatccagctggcagacggactcagctcactggcacccacgaacacagcatctccaccctcttcacctcacgaagaagagttcattgactggtggtctaagtttttcgcatcaatcggcgagcgtgaaaaatgtggctcttacctggaaaaagattttgatacgttaaaagtttacgatactcagctcgagaacgttgaggcgtttgaaggcctttcagacttctgcaatacattcaaactgtatagaggcaagacgcaggaggaaactgaggatccatcagtaatcggtgaattcaaaggcttgttcaaaatatatcccttgccagaggatcccgccatcccaatgccccccagacaatttcaccagttggccgctcagggcccacaggagtgcctggttaggatttacatcgtccgggctttcggacttcagcctaaagaccccaatggaaagtgcgatccatacatcaaaataagcattggaaaaaagagtgttagtgatcaggacaattacattccctgtaccttggaacctgtcttcggtaagatgttcgaactgacctgtacgttgccactcgagaaagacttgaaaatcaccctatacgattatgatttgctcagtaaagatgaaaagatcggcgagactgtagtagacttggagaaccgactgctctcaaaatttggtgcccgttgtggtctcccacaaacgtactgtgtgtccggcccaaaccagtggcgcgaccaattgaggccaagtcagctcttacaccttttttgccagcagcatagggtgaaagctccagtatataggaccgatagggtgatgtttcaggataaagagtatagcattgaagaaatagaagcgggaaggattcctaatcctcaccttgggccagtggaagagcgattggcactgcacgtcttgcagcaacagggtttggtgcctgaacacgtcgagtcaagacctttatactcccctctacagcctgatattgaacaggggaaactgcagatgtgggttgacttattcccaaaagctctgggtaggcctggacctcccttcaatatcacaccaagacgagcccgaagattctttctgcgatgcatcatctggaacacacgcgatgtgatcttagatgacctgtcactgaccggggaaaaaatgagcgatatttatgtgaaaggctggatgattggttttgaggaacacaaacagaaaactgacgtgcactaccgatctctcggcggagaaggaaactttaactggagatttatcttccctttcgactatctccccgccgagcaagtttgcaccatcgccaagaaggatgcattttggagactcgataaaaccgaaagcaagatacctgctagagtcgtgtttcagatctgggataatgataagttcagtttcgacgacttcctgggaagcctccagcttgatctgaatagaatgcccaaacccgctaaaaccgcgaaaaaatgcagcctggaccaactcgacgacgcttttcaccctgagtggtttgtcagtctgttcgaacaaaagacagttaaagggtggtggccgtgtgtggcagaagagggtgagaagaagatcctggccgggaaattggaaatgacactagaaatcgttgctgaatccgagcatgaagaaagaccagccggccagggtcgcgacgaaccgaacatgaatccaaaattggaagatccacgaagaccagatacttcattcctctggttcacttcaccgtacaaaaccatgaaattcatcttgtggagacgcttccggtgggccatcatcctttttattatcctgtttattcttctcctgttccttgcaatcttcatttatgcctttccaaactatgcagccatgaagctggtcaaaccgtttagctag

SEQ ID NO: 48962 - RNA, 6306 nt, Artificial Sequence
  derived and/or modified sequence
augcugcgcguguuuauccuguaugcugaaaacguccacaccccggauaccgauauuagcgaugccuauuguucagcuguuuucgccggugugaaaaagcguacgaaagucaucaaaaauucaguuaacccugucuggaaugaaggcuuugaaugggaccugaaaggcauuccccucgaccagggcucggaacuucacgugguggugaaggaccacgaaacuaugggcaggaacagauuuuugggagaagccaaagucccgcugcgugaaguucucgcuaccccgagucuguccgccuccuucaacgcccccuugcucgacacuaagaaacaacccacaggagcuucacuggugcuccagguuagcuacaccccacucccgggggccgugccgcuguucccuccucccacuccccuggaaccgucccccacucugccagaucuggaugucguggccgauacuggcggcgaggaagauaccgaggaccaaggauuaacuggggacgaggcagagccauuucucgaucagagcggaggcccaggcgcgcccaccacaccaagaaaacugccuagccgccccccuccccacuauccuggcauaaaaaggaagagaagcgccccaaccucccggaaacuucugucagauaaaccccaagauuuccagauacgaguucaagucaucgaggggcgacaguugcccgggguaaacaucaagccaguggucaaagugaccgcugcaggacagacgaagcgaacuagaauucacaaagggaauucaccacuuuucaaugagacucucuucuuuaaucuguucgacucuccgggagagcuauucgacgagccuaucuucaucacugucguggacagccgcuccuugcggacagaugcucuguugggcgaauuccggauggacgucggaaccaucuaucgugagccucgucaugcauaucugagaaaguggcuguuacugagcgauccugacgacuucagcgcuggcgcuaggggauaucucaaaaccagucuauguguguugggcccuggcgacgaggcaccacuagagcguaaggacccguccgaagauaaagaggacaucgagucuaaccugcuccgaccgacggggguggcucucagaggggcucauuuuugccucaagguguuccgcgccgaggaucugccccaaauggaugacgccguuauggacaaugugaaacagauuuuuggcuuugaaucaaauaagaaaaacuugguggaccccuucgucgaaguguccuuugcaggaaaaauguugugcuccaagauccuggaaaaaaccgcuaacccccaguggaaccagaacaucacacucccagcuauguuucccucuaugugcgagaaaaugagaauucguaucauugauugggaccgucugacccauaacgauauaguugccaccacuuaccugagcaugucuaagaucucugcaccuggcggcgaaauagaagaagaaccagccggagccgugaaacccucuaaagccagugaucuggaugauuauuuaggauuuuugcccacauuuggccccuguuacaucaauuuauacggcagcccucgcgaauuuacuggcuucccagauccauacaccgaguugaauacuggaaagggugagggcguggcauaccguggaaggcuacugcuaucauuggagaccaagcugguggaacauucugaacagaaggucgaagaucuccccgccgaugacauacuucgaguagagaaauaccugaggagacgcaaauacucccuauuugccgccuuuuacucagcaacaaugcugcaggaugucgaugaugccauccaguucgaggucagcauuggaaacuauggaaacaaauucgacaugaccugccugccucuagccuccacuacucaguacucacgggccguguucgacggaugucacuacuacuaucuuccuugggggaauguaaaacccguuguaguccuguccucguacugggaagacauaagccauagaauagagacccagaaccagcugcuuggcauagcagaucgguuggaggcuggccuggagcagguacaccuggcccuuaaggcacagugcucuacagaagacguggacucacugguggcgcagcugacggaugagcuaaucgccggcugcucacagccgcuaggagacauacacgaaacaccuagcgcaacgcauuuggaccaguaccuauaucaguugagaacgcaucaccugucucaaauuaccgaggcugccuuggcucugaaacucggccacucugaacugcccgccgcccuggagcaggccgaagauuggcugcuccggcucagggcacuggcggaggagccucagaacucccuucccgauaucgugaucuggauguuacaaggugacaagcggguagccuaucagcgcgugccagcacaucaggugcuuuuuucccgccguggagccaacuacugcggaaaaaacuguggaaagcugcagaccaucuuccucaaguacccgauggagaagguaccuggggcaaggaugccuguucagaucagaguaaagcugugguuugggcugaguguugaugaaaaggaauuuaaucaguucgcagaagguaaacucucaguguuugccgagacauacgagaaugagaccaagcuggcacugguaggcaauugggggacuacaggucuuaccuaucccaaguucucagauguaacaggcaaaaucaaacuccccaaagauagcuuuagacccuccgcaggauggacuugggccggcgacugguuugugugcccugaaaagacccuucuucacgauauggaugcaggucaucuguccuucguggaagaaguauuugagaaccaaacgagacugccuggaggccaguggaucuacaugucugauaauuacacagauguuaauggugaaaaaguuuuaccaaaggacgauauugaaugcccacucggcuggaagugggaagaugaggaguggucaacagaccugaaccgggcagucgacgagcagggaugggaguauuccauuaccauuccaccagaacgcaagccaaagcauuggguucccgcugagaagauguacuacacccaccgccgacggaggugggucagauugaggaggcgugaucuaagucagauggaggcccuuaagagacauagacaagccgaagcugaaggggagggaugggaguacgcuuccuuguuuggguggaaauuccaucuggaguaucgaaagaccgacgccuuucgccggagacguuggcggaggagaauggagccacucgagaaaaccggacccgcagccguuuucgcccuggagggcgcucuuggaggagucauggacgauaaaucugaggacucuaugaguguuucaacauugaguuuuggcgugaaccguccgaccaucucuuguauauucgacuacgguaacagauaucaucuccgcugcuauauguaucaggcacgggacuuggccgcaauggauaaagacaguuuuucagaccccuacgccaucguuuccuuucuucaccaaucucaaaagacuguaguugucaaaaauacucugaauccuacuugggaccagacacuaaucuucuacgaaauugaaaucuuuggagaaccagcuacaguagcggaacagccccccucaauugugguagaauuauaugaccacgauacauauggggccgacgaguucaugggaaggugcauaugucagccaucccuugagcggaugccgcgccuagcaugguucccacucacaagagggagccagccuagcggggaacuacuugcuagcuuugagcugauucagagagaaaaaccggccauucaucacaucccugguuucgaggugcaggaaaccucacgaauacuggaugaaucagaggacacagaccugccuuauccucccccccagcgcgaggccaacaucuacaugguuccccagaacaucaaaccagcacugcagcggaccgccaucgaaauccuagccuggggccuacgcaacaugaaguccuaccaauuggccaacaucucuucuccuagccugguggucgaaugcgggggccagaccgugcaaucuugugugauaaggaaucugaggaagaaccccaacuucgauaucuguacccucuuuauggaagugaugcucccccgagaagagcuuuauugccccccaauaaccguuaaggucaucgauaacaggcaguuuggaaggcgcccaguugugggccaguguaccaucaggucauuggaguccuuucuaugcgauccuuauucugccgagucaccaucaccacagggggguccagaugacgucucacuucucaguccuggggaggacguguugauugauaucgaugacaaagaaccucucauuccaauccaacuggccgauggacugagcucacuggccccaaccaacacagccagcccuccaaguucaccucaugaggaagaauuuaucgauugguggucaaaguuuuuugcuagcaucggagagcgcgaaaagugcggcagcuaucucgagaaggauuuugauacccugaagguguacgauacacagcuggagaaugucgaagcuuuugaggggcugagugacuucugcaacacauucaaacuguaucgggggaaaacacaggaagagaccgaagaucccuccgugaucggggaauucaaaggccucuucaagaucuauccacugccugaggauccugccauucccaugccgcccaggcaguuucaccaguuagcugcgcagggcccacaggagugucuagugagaauauauaucgugagagcuuuuggcuugcaacccaaggacccuaaugggaaaugcgauccguauauaaaaauuuccaucgggaaaaaguccguaagcgaccaggacaacuauaucccuuguacucuggaacccguauucgguaagauguuugaacugacauguacucugcccuuggaaaaagaccugaaaauaacccuguacgacuacgacuugcuguccaaagacgagaagaucggagaaacuguuguugaccuugaaaaccggcugcugucaaaguucggagcccgaugcggccucccacaaacguacuguguguccggcccaaaccaguggcgcgaccaauugaggccaagucagcucuuacaccuuuuuugccagcagcauagggugaaagcuccaguauauaggaccgauagggugauguuucaggauaaagaguauagcauugaagaaauagaagcgggaaggauuccuaauccucaccuugggccaguggaagagcgauuggcacugcacgucuugcagcaacaggguuuggugccugaacacgucgagucaagaccuuuauacuccccucuacagccugauauugaacaagggaaguugcagauguggguugaucuguucccaaaggcccugggucggccugggcccccuuucaacaucaccccuagacgcgcccgucgcuucuuccucaggugcauuauauggaacacaagggacgucaucuuggacgaucugucacugaccggggaaaagaugagcgacaucuacgugaaaggcuggaugauaggguucgaagagcauaagcagaaaaccgauguucauuaucgaucccuggggggugaagggaauuuuaacuggcgguuuauuuucccuuucgacuaccuuccagcagagcaggucugcacaauagccaaaaaagaugcguuuuggcgucuugauaagacugagaguaaaauucccgcccgagucguguuccaaauaugggauaacgauaaguucucauuugaugauuuucugggcucccuccaacuggaucucaacagaaugcccaaacccgcuaagacagcuaagaaguguagucuggaucagcuggaugacgcuuuccauccggagugguucgucucucuguuugaacagaaaacagugaagggcugguggcccugcguggccgaggaaggggagaaaaagauauuggccgguaaacucgagaugacucuugagauuguggccgagagcgaacaugaagagaggccagcgggccagggacgcgaugaaccuaauaugaacccuaaauuggaggacccuagacgaccggacacaaguuuucucugguucacuucucccuauaaaaccaugaaguucauccuguggagacguuucaggugggccaucauucucuucauuauucuguucauccuauuacuguuccuggccauuuucauuuaugccuuuccaaacuaugcugcuaugaaacucguuaagccauuuucuuag

SEQ ID NO: 48963 - RNA, 6306 nt, Artificial Sequence
  derived and/or modified sequence
auguuaagagucuucauacuguaugccgaaaacguucauacccccgacacugauauaucagaugcguacuguucagcaguuuucgcaggcgugaagaagaggaccaaagugauaaaaaauagcgugaacccaguauggaacgagggcuucgagugggaccucaaggggauaccccuggaccagggcucagaacuucauguagugguuaaagaucacgaaaccaugggccggaauagauuuuugggcgaggcgaaaguccccuugcgagaaguuuuggcuacacccagccugagugcgaguuucaacgcgccauuacuagacaccaaaaaacagcccacgggcgccucucuuguccuucaggugucuuacacuccacugcccggcgccgucccacuuuuuccccccccuacaccuuuagaaccaucgccuacucugccugaucuggacgugguggccgauaccggcggcgaggaggacacagaagaccagggcuuaaccggcgacgaggcagagccguuccuagaccaaaguggcggaccuggagccccgacuacccccagaaaauugccaagcagaccaccaccccacuaccccggcaucaaaaggaaacggucagcucccaccucucgaaagcugcugucugacaagccccaggauuuccaaauuaggguucaggugaucgagggacgccagcuaccuggaguuaacaucaagcccguagugaaggucaccgccgcuggacagaccaagagaacacggauucauaaaggaaauucgccucuuuuuaacgaaacacucuucuucaaccuguuugacucacccggagaguuauucgaugaaccuauuuucaucaccguggucgauaguagaucccugcgcacagaugcacugcuuggcgaauucagaauggacgugggaacaaucuaucgggaaccccggcaugccuaucuuagaaaaugguugcuguuguccgacccugaugacuuuuccgccggugcccgcggcuaucugaagacaagucugugcgugcugggccccggcgacgaggcgccccuggaacggaaagauccuagcgaggauaaagaggauauugagucgaaucucuugagaccuacuggcguggccuugagaggggcacauuucuguuugaaaguguuccgugcggaagaucugccccaaauggaugaugcggugauggauaauguuaaacagauuuucggcuuugaaucuaacaaaaaaaaccugguugacccuuucguagagguuagcuucgcuggaaaaaugcucugcagcaagauccuagaaaagacggccaauccacaauggaaccaaaacaucacacuuccagcuauguuuccaucuaugugugagaaaaugcgaauacgaaucaucgauugggauagacuaacgcacaacgacauaguagcgacuacuuaucuguccaugaguaaaauaucugcacccggaggugaaaucgaagaagagccagcuggugcuguuaagcccucuaaagcuucagaccuggaugauuaccuuggauuucugccaaccuucggacccuguuacauuaaccuguauggaucuccucgagaauuuacuggguuucccgacccauacacugagcucaacaccgguaagggggagggaguagccuacagagguagacugcuguugagccuggaaacuaaacuggucgaacauucugaacaaaaaguugaagauuugccggcagacgacauccuucggguugaaaaauaccugcggagacggaaguauaguuuauuugcugcauuuuauagugccacaaugcugcaggauguggacgaugcaauacaguucgagguaagcaucggaaacuacgggaacaaguuugacaugaccugucugccacucgcuucgaccacacaguacucuagagccguguucgacggaugucacuacuauuacuugccaugggggaacgucaaaccaguuguuguacugagcucauacugggaagauauaucccacagaauugagacccaaaaccagcugcuuggcauugccgacaggcucgaagcuggccuagagcaaguucaccucgcucuuaaagcacaauguucaacagaagacguggauucacucguugcccagcugacagaugaguugauugcaggaugcucacagccucugggagauauucacgaaacucccuccgcuacacaucucgaucaguaucucuaucaacuccgaacacaucaucucucacagaucacggaagccgcucuugcgcugaaauuggggcacucugagcuccccgccgcacucgaacaggccgaagacuggcugcugcggcugcgcgcauuggccgaggaaccccagaacucucucccagauaucgucaucuggaugcuccaaggugauaagagggucgccuaucagagaguucccgcucaccagguccuguuuagcaggcgaggagcuaacuauugugggaaaaacugugguaaacugcagacaauuuucuugaaauacccuauggaaaaagugccaggagcucgcaugccugugcaaauccgagugaagcugugguucgggcugagcguugaugagaaggaguuuaaccaguucgccgagggaaaacucagcguuuucgccgagacauacgagaaugaaacuaaacuagcgcuggucggaaauuggggaacuaccgguuuaacguaucccaaguucucagauguaacaggcaaaaucaaacuccccaaagauagcuuuagacccuccgcaggauggacuugggccggcgacugguuugugugcccugaaaagacccuucuucacgauauggaugcaggucaucuguccuucguggaagaaguauuugagaaccaaacgagacugccuggaggccaguggaucuacaugucugauaauuacacagauguuaauggugaaaaaguuuuaccaaaggacgauauugaaugcccacucggcuggaagugggaagaugaggaguggucaacagaucuaaaccgggccguggaugaacaagggugggaguacaguaucaccaucccccccgaaagaaaaccuaaacauugggugccugcagagaaaauguacuauacgcacagacgcaggagaugggugagacugaggaggcgggaccucucccagauggaggcucugaaaaggcaccgucaagcugaagccgagggcgagggcugggaguacgcgagccuauucggcuggaaauuccaccuagaguaucguaagacugaugccuucaggagacgcagauggaggaggagaauggaaccucucgagaaaaccggacccgcagccguuuucgcccuggagggcgcucuuggaggagucauggacgauaaaucugaggacucuaugaguguuucaacauugaguuuuggcgugaaccguccgaccaucucuuguauauucgacuacgguaacagauaucaucuccgcugcuauauguaucaggcacgggacuuggccgcaauggauaaagacaguuuuucagaccccuacgccaucguuuccuuucuucaccaaucucaaaagacuguaguugucaaaaauacucugaauccuacuugggaccagacacugauauucuacgaaauugaaaucuucggcgaacccgccaccguagccgaacagccccccucuauugucguugaacuguacgaucaugacaccuacggcgcugaugaauucaugggaagauguauaugccagccgucacuggaacgaaugccccgccucgccugguucccacugacccgagguucucagccuuccggggaacuccuugcuagcuucgagcugauccaaagagaaaaaccagcaauccaucacauuccaggcuucgaagugcaggagacguccagaaucuuagacgaaucugaggauacugaccugcccuacccaccaccucagagagaggcuaacaucuacauggugccccagaacauuaaacccgcucugcaacgcacggcaauugaaauccuggcuugggggcugcgaaauaugaaaagcuaucaguuggccaacaucuccuccccuucauuagucgucgaguguggcgggcagacagugcaguccugcgucaucagaaauuugcgaaagaaccccaauuucgauaucuguacuuuauuuauggaggucaugcugccccgugaagagcucuauugccccccaauuacagugaaggugaucgauaacagacaguucgguaggagacccgugguaggucaaugcaccauuaggucccucgaaucauuucucugugaucccuauucagcggaauccccuucuccacaggguggccccgaugauguaagucuguugucuccuggcgaagacgugcugauugacauagacgauaaagaaccccucauuccaauccagcuggcagacggacucagcucacuggcacccacgaacacagcaucuccacccucuucaccucacgaagaagaguucauugacugguggucuaaguuuuucgcaucaaucggcgagcgugaaaaauguggcucuuaccuggaaaaagauuuugauacguuaaaaguuuacgauacucagcucgagaacguugaggcguuugaaggccuuucagacuucugcaauacauucaaacuguauagaggcaagacgcaggaggaaacugaggauccaucaguaaucggugaauucaaaggcuuguucaaaauauaucccuugccagaggaucccgccaucccaaugccccccagacaauuucaccaguuggccgcucagggcccacaggagugccugguuaggauuuacaucguccgggcuuucggacuucagccuaaagaccccaauggaaagugcgauccauacaucaaaauaagcauuggaaaaaagaguguuagugaucaggacaauuacauucccuguaccuuggaaccugucuucgguaagauguucgaacugaccuguacguugccacucgagaaagacuugaaaaucacccuauacgauuaugauuugcucaguaaagaugaaaagaucggcgagacuguaguagacuuggagaaccgacugcucucaaaauuuggugcccguuguggucucccacaaacguacuguguguccggcccaaaccaguggcgcgaccaauugaggccaagucagcucuuacaccuuuuuugccagcagcauagggugaaagcuccaguauauaggaccgauagggugauguuucaggauaaagaguauagcauugaagaaauagaagcgggaaggauuccuaauccucaccuugggccaguggaagagcgauuggcacugcacgucuugcagcaacaggguuuggugccugaacacgucgagucaagaccuuuauacuccccucuacagccugauauugaacaggggaaacugcagauguggguugacuuauucccaaaagcucuggguaggccuggaccucccuucaauaucacaccaagacgagcccgaagauucuuucugcgaugcaucaucuggaacacacgcgaugugaucuuagaugaccugucacugaccggggaaaaaaugagcgauauuuaugugaaaggcuggaugauugguuuugaggaacacaaacagaaaacugacgugcacuaccgaucucucggcggagaaggaaacuuuaacuggagauuuaucuucccuuucgacuaucuccccgccgagcaaguuugcaccaucgccaagaaggaugcauuuuggagacucgauaaaaccgaaagcaagauaccugcuagagucguguuucagaucugggauaaugauaaguucaguuucgacgacuuccugggaagccuccagcuugaucugaauagaaugcccaaacccgcuaaaaccgcgaaaaaaugcagccuggaccaacucgacgacgcuuuucacccugagugguuugucagucuguucgaacaaaagacaguuaaagggugguggccguguguggcagaagagggugagaagaagauccuggccgggaaauuggaaaugacacuagaaaucguugcugaauccgagcaugaagaaagaccagccggccagggucgcgacgaaccgaacaugaauccaaaauuggaagauccacgaagaccagauacuucauuccucugguucacuucaccguacaaaaccaugaaauucaucuuguggagacgcuuccggugggccaucauccuuuuuauuauccuguuuauucuucuccuguuccuugcaaucuucauuuaugccuuuccaaacuaugcagccaugaagcuggucaaaccguuuagcuag

SEQ ID NO: 48964 - protein, 2111 aa, Artificial Sequence
  derived and/or modified sequence
MLRVFILYAENVHTPDTDISDAYCSAVFAGVKKRTKVIKNSVNPVWNEGFEWDLKGIPLDQGSELHVVVKDHETMGRNRFLGEAKVPLREVLATPSLSASFNAPLLDTKKQPTGASLVLQVSYTPLPGAVPLFPPPTPLEPSPTLPDLDVVAGGGQSRAETWSLLSDSTMDTRYSGKKWPAPTDTGGEEDTEDQGLTGDEAEPFLDQSGGPGAPTTPRKLPSRPPPHYPGIKRKRSAPTSRKLLSDKPQDFQIRVQVIEGRQLPGVNIKPVVKVTAAGQTKRTRIHKGNSPLFNETLFFNLFDSPGELFDEPIFITVVDSRSLRTDALLGEFRMDVGTIYREPRHAYLRKWLLLSDPDDFSAGARGYLKTSLCVLGPGDEAPLERKDPSEDKEDIESNLLRPTGVALRGAHFCLKVFRAEDLPQMDDAVMDNVKQIFGFESNKKNLVDPFVEVSFAGKMLCSKILEKTANPQWNQNITLPAMFPSMCEKMRIRIIDWDRLTHNDIVATTYLSMSKISAPGGEIEEEPAGAVKPSKASDLDDYLGFLPTFGPCYINLYGSPREFTGFPDPYTELNTGKGEGVAYRGRLLLSLETKLVEHSEQKVEDLPADDILRVEKYLRRRKYSLFAAFYSATMLQDVDDAIQFEVSIGNYGNKFDMTCLPLASTTQYSRAVFDGCHYYYLPWGNVKPVVVLSSYWEDISHRIETQNQLLGIADRLEAGLEQVHLALKAQCSTEDVDSLVAQLTDELIAGCSQPLGDIHETPSATHLDQYLYQLRTHHLSQITEAALALKLGHSELPAALEQAEDWLLRLRALAEEPQNSLPDIVIWMLQGDKRVAYQRVPAHQVLFSRRGANYCGKNCGKLQTIFLKYPMEKVPGARMPVQIRVKLWFGLSVDEKEFNQFAEGKLSVFAETYENETKLALVGNWGTTGLTYPKFSDVTGKIKLPKDSFRPSAGWTWAGDWFVCPEKTLLHDMDAGHLSFVEEVFENQTRLPGGQWIYMSDNYTDVNGEKVLPKDDIECPLGWKWEDEEWSTDLNRAVDEQGWEYSITIPPERKPKHWVPAEKMYYTHRRRRWVRLRRRDLSQMEALKRHRQAEAEGEGWEYASLFGWKFHLEYRKTDAFRRRRWRRRMEPLEKTGPAAVFALEGALGGVMDDKSEDSMSVSTLSFGVNRPTISCIFDYGNRYHLRCYMYQARDLAAMDKDSFSDPYAIVSFLHQSQKTVVVKNTLNPTWDQTLIFYEIEIFGEPATVAEQPPSIVVELYDHDTYGADEFMGRCICQPSLERMPRLAWFPLTRGSQPSGELLASFELIQREKPAIHHIPGFEVQETSRILDESEDTDLPYPPPQREANIYMVPQNIKPALQRTAIEILAWGLRNMKSYQLANISSPSLVVECGGQTVQSCVIRNLRKNPNFDICTLFMEVMLPREELYCPPITVKVIDNRQFGRRPVVGQCTIRSLESFLCDPYSAESPSPQGGPDDVSLLSPGEDVLIDIDDKEPLIPIQEEEFIDWWSKFFASIGEREKCGSYLEKDFDTLKVYDTQLENVEAFEGLSDFCNTFKLYRGKTQEETEDPSVIGEFKGLFKIYPLPEDPAIPMPPRQFHQLAAQGPQECLVRIYIVRAFGLQPKDPNGKCDPYIKISIGKKSVSDQDNYIPCTLEPVFGKMFELTCTLPLEKDLKITLYDYDLLSKDEKIGETVVDLENRLLSKFGARCGLPQTYCVSGPNQWRDQLRPSQLLHLFCQQHRVKAPVYRTDRVMFQDKEYSIEEIEAGRIPNPHLGPVEERLALHVLQQQGLVPEHVESRPLYSPLQPDIEQGKLQMWVDLFPKALGRPGPPFNITPRRARRFFLRCIIWNTRDVILDDLSLTGEKMSDIYVKGWMIGFEEHKQKTDVHYRSLGGEGNFNWRFIFPFDYLPAEQVCTIAKKDAFWRLDKTESKIPARVVFQIWDNDKFSFDDFLGSLQLDLNRMPKPAKTAKKCSLDQLDDAFHPEWFVSLFEQKTVKGWWPCVAEEGEKKILAGKLEMTLEIVAESEHEERPAGQGRDEPNMNPKLEDPRRPDTSFLWFTSPYKTMKFILWRRFRWAIILFIILFILLLFLAIFIYAFPNYAAMKLVKPFS

SEQ ID NO: 48965 - DNA, 6983 bp, Artificial Sequence
  derived and/or modified sequence
gcggccgccgcccagccaggtgcaaaatgccgtgtcattgggagactccgcagccggagcattagattacagctcgacggagctcgggaagggcggcgggggtggaagatgagcagaagcccctgttctcggaacgccggctgacaagcggggtgagcgcagccggggcggggacccagcctagcccactggagcagccgggggtggcccgttcccctttaagagcaactgctctaagccaggagccagagattcgagccggcctcgcccagccagccctctccagcgaggggacccacaagcggcgcctcggccctcccgacctttccgagccctctttgcgccctgggcgcacggggccctacacgcgccaagcatgctgagggtcttcatcctctatgccgagaacgtccacacacccgacaccgacatcagcgatgcctactgctccgcggtgtttgcaggggtgaagaagagaaccaaagtcatcaagaacagcgtgaaccctgtatggaatgagggatttgaatgggacctcaagggcatccccctggaccagggctctgagcttcatgtggtggtcaaagaccatgagacgatggggaggaacaggttcctgggggaagccaaggtcccactccgagaggtcctcgccacccctagtctgtccgccagcttcaatgcccccctgctggacaccaagaagcagcccacaggggcctcgctggtcctgcaggtgtcctacacaccgctgcctggagctgtgcccctgttcccgccccctactcctctggagccctccccgactctgcctgacctggatgtagtggcaggcgggggacagagccgggccgagacttggtccctgctcagtgacagcaccatggacacgagatactctggaaagaagtggccggcccccacggacacaggaggagaggaagacacagaggaccagggactcactggagatgaggcggagccattcctggatcaaagcggaggcccgggggctcccaccaccccaaggaaactaccttcacgtcctccgccccactaccccgggatcaaaagaaagcgaagtgcgcctacatctagaaagctgctgtcagacaaaccgcaggatttccagatcagggtccaggtgatcgaggggcgccagctgccgggggtgaacatcaagcctgtggtcaaggttaccgctgcagggcagaccaagcggacgcggatccacaagggaaacagcccactcttcaatgagactcttttcttcaacttgtttgactctcctggggagctgtttgatgagcccatctttatcacggtggtagactctcgttctctcaggacagatgctctcctcggggagttccggatggacgtgggcaccatttacagagagccccggcacgcctatctcaggaagtggctgctgctctcagaccctgatgacttctctgctggggccagaggctacctgaaaacaagcctttgtgtgctggggcctggggacgaagcgcctctggagagaaaagacccctctgaagacaaggaggacattgaaagcaacctgctccggcccacaggcgtagccctgcgaggagcccacttctgcctgaaggtcttccgggccgaggacttgccgcagatggacgatgccgtgatggacaacgtgaaacagatctttggcttcgagagtaacaagaagaacttggtggacccctttgtggaggtcagctttgcggggaaaatgctgtgcagcaagatcttggagaagacggccaaccctcagtggaaccagaacatcacactgcctgccatgtttccctccatgtgcgaaaaaatgaggattcgtatcatagactgggaccgcctgactcacaatgacatcgtggctaccacctacctgagtatgtcgaaaatctctgcccctggaggagaaatagaagaggagcctgcaggtgctgtcaagccttcgaaagcctcagacttggatgactacctgggcttcctccccacttttgggccctgctacatcaacctctatggcagtcccagagagttcacaggcttcccagacccctacacagagctcaacacaggcaagggggaaggtgtggcttatcgtggccggcttctgctctccctggagaccaagctggtggagcacagtgaacagaaggtggaggaccttcctgcggatgacatcctccgggtggagaagtaccttaggaggcgcaagtactccctgtttgcggccttctactcagccaccatgctgcaggatgtggatgatgccatccagtttgaggtcagcatcgggaactacgggaacaagttcgacatgacctgcctgccgctggcctccaccactcagtacagccgtgcagtctttgacgggtgccactactactacctaccctggggtaacgtgaaacctgtggtggtgctgtcatcctactgggaggacatcagccatagaatcgagactcagaaccagctgcttgggattgctgaccggctggaagctggcctggagcaggtccacctggccctgaaggcgcagtgctccacggaggacgtggactcgctggtggctcagctgacggatgagctcatcgcaggctgcagccagcctctgggtgacatccatgagacaccctctgccacccacctggaccagtacctgtaccagctgcgcacccatcacctgagccaaatcactgaggctgccctggccctgaagctcggccacagtgagctccctgcagctctggagcaggcggaggactggctcctgcgtctgcgtgccctggcagaggagccccagaacagcctgccggacatcgtcatctggatgctgcagggagacaagcgtgtggcataccagcgggtgcccgcccaccaagtcctcttctcccggcggggtgccaactactgtggcaagaattgtgggaagctacagacaatctttctgaaatatccgatggagaaggtgcctggcgcccggatgccagtgcagatacgggtcaagctgtggtttgggctctcagtggatgagaaggagttcaaccagtttgctgaggggaagctgtctgtctttgctgaaacctatgagaacgagactaagttggcccttgttgggaactggggcacaacgggcctcacctaccccaagttttctgacgtcacgggcaagatcaagctacccaaggacagcttccgcccctcggccggctggacctgggctggagattggttcgtgtgtccggagaagactctgctccatgacatggacgccggtcacctgagcttcgtggaagaggtgtttgagaaccagacccggcttcccggaggccagtggatctacatgagtgacaactacaccgatgtgaacggggagaaggtgcttcccaaggatgacattgagtgcccactgggctggaagtgggaagatgaggaatggtccacagacctcaaccgggctgtcgatgagcaaggctgggagtatagcatcaccatccccccggagcggaagccgaagcactgggtccctgctgagaagatgtactacacacaccgacggcggcgctgggtgcgcctgcgcaggagggatctcagccaaatggaagcactgaaaaggcacaggcaggcggaggcggagggcgagggctgggagtacgcctctctttttggctggaagttccacctcgagtaccgcaagacagatgccttccgccgccgccgctggcgccgtcgcatggagccactggagaagacggggcctgcagctgtgtttgcccttgagggggccctgggcggcgtgatggatgacaagagtgaagattccatgtccgtctccaccttgagcttcggtgtgaacagacccacgatttcctgcatattcgactatgggaaccgctaccatctacgctgctacatgtaccaggcccgggacctggctgcgatggacaaggactctttttctgatccctatgccatcgtctccttcctgcaccagagccagaagacggtggtggtgaagaacacccttaaccccacctgggaccagacgctcatcttctacgagatcgagatctttggcgagccggccacagttgctgagcaaccgcccagcattgtggtggagctgtacgaccatgacacttatggtgcagacgagtttatgggtcgctgcatctgtcaaccgagtctggaacggatgccacggctggcctggttcccactgacgaggggcagccagccgtcgggggagctgctggcctcttttgagctcatccagagagagaagccggccatccaccatattcctggttttgaggtgcaggagacatcaaggatcctggatgagtctgaggacacagacctgccctacccaccaccccagagggaggccaacatctacatggttcctcagaacatcaagccagcgctccagcgtaccgccatcgagatcctggcatggggcctgcggaacatgaagagttaccagctggccaacatctcctcccccagcctcgtggtagagtgtgggggccagacggtgcagtcctgtgtcatcaggaacctccggaagaaccccaactttgacatctgcaccctcttcatggaagtgatgctgcccagggaggagctctactgcccccccatcaccgtcaaggtcatcgataaccgccagtttggccgccggcctgtggtgggccagtgtaccatccgctccctggagagcttcctgtgtgacccctactcggcggagagtccatccccacagggtggcccagacgatgtgagcctactcagtcctggggaagacgtgctcatcgacattgatgacaaggagcccctcatccccatccaggaggaagagttcatcgattggtggagcaaattctttgcctccataggggagagggaaaagtgcggctcctacctggagaaggattttgacaccctgaaggtctatgacacacagctggagaatgtggaggcctttgagggcctgtctgacttttgtaacaccttcaagctgtaccggggcaagacgcaggaggagacagaagatccatctgtgattggtgaatttaagggcctcttcaaaatttatcccctcccagaagacccagccatccccatgcccccaagacagttccaccagctggccgcccagggaccccaggagtgcttggtccgtatctacattgtccgagcatttggcctgcagcccaaggaccccaatggaaagtgtgatccttacatcaagatctccatagggaagaaatcagtgagtgaccaggataactacatcccctgcacgctggagcccgtatttggaaagatgttcgagctgacctgcactctgcctctggagaaggacctaaagatcactctctatgactatgacctcctctccaaggacgaaaagatcggtgagacggtcgtcgacctggagaacaggctgctgtccaagtttggggctcgctgtggactcccacagacctactgtgtctctggaccgaaccagtggcgggaccagctccgcccctcccagctcctccacctcttctgccagcagcatagagtcaaggcacctgtgtaccggacagaccgtgtaatgtttcaggataaagaatattccattgaagagatagaggctggcaggatcccaaacccacacctgggcccagtggaggagcgtctggctctgcatgtgcttcagcagcagggcctggtcccggagcacgtggagtcacggcccctctacagccccctgcagccagacatcgagcaggggaagctgcagatgtgggtcgacctatttccgaaggccctggggcggcctggacctcccttcaacatcaccccacggagagccagaaggtttttcctgcgttgtattatctggaataccagagatgtgatcctggatgacctgagcctcacgggggagaagatgagcgacatttatgtgaaaggttggatgattggctttgaagaacacaagcaaaagacagacgtgcattatcgttccctgggaggtgaaggcaacttcaactggaggttcattttccccttcgactacctgccagctgagcaagtctgtaccattgccaagaaggatgccttctggaggctggacaagactgagagcaaaatcccagcacgagtggtgttccagatctgggacaatgacaagttctcctttgatgattttctgggctccctgcagctcgatctcaaccgcatgcccaagccagccaagacagccaagaagtgctccttggaccagctggatgatgctttccacccagaatggtttgtgtccctttttgagcagaaaacagtgaagggctggtggccctgtgtagcagaagagggtgagaagaaaatactggcgggcaagctggaaatgaccttggagattgtagcagagagtgagcatgaggagcggcctgctggccagggccgggatgagcccaacatgaaccctaagcttgaggacccaaggcgccccgacacctccttcctgtggtttacctccccatacaagaccatgaagttcatcctgtggcggcgtttccggtgggccatcatcctcttcatcatcctcttcatcctgctgctgttcctggccatcttcatctacgccttcccgaactatgctgccatgaagctggtgaagcccttcagctgaggactctcctgccctgtagaaggggccgtggggtcccctccagcatgggactggcctgcctcctccgcccagctcggcgagctcctccagacctcctaggcctgattgtcctgccagggtgggcagacagacagatggaccggcccacactcccagagttgctaacatggagctctgagatcaccccacttccatcatttccttctcccccaacccaacgcttttttggatcagctcagacatatttcagtataaaacagttggaaccaca

SEQ ID NO: 48966 - DNA, 6333 bp, Artificial Sequence
  derived and/or modified sequence
atgctgcgcgtgttcatcctgtacgccgagaacgtgcacacccccgacaccgacatcagcgacgcctactgcagcgccgtgttcgccggcgtgaagaagcgcaccaaggtgatcaagaacagcgtgaaccccgtgtggaacgagggcttcgagtgggacctgaagggcatccccctggaccagggcagcgagctgcacgtggtggtgaaggaccacgagaccatgggccgcaaccgcttcctgggcgaggccaaggtgcccctgcgcgaggtgctggccacccccagcctgagcgccagcttcaacgcccccctgctggacaccaagaagcagcccaccggcgccagcctggtgctgcaggtgagctacacccccctgcccggcgccgtgcccctgttccccccccccacccccctggagcccagccccaccctgcccgacctggacgtggtggccggcggcggccagagccgcgccgagacctggagcctgctgagcgacagcaccatggacacccgctacagcggcaagaagtggcccgcccccaccgacaccggcggcgaggaggacaccgaggaccagggcctgaccggcgacgaggccgagcccttcctggaccagagcggcggccccggcgcccccaccaccccccgcaagctgcccagccgcccccccccccactaccccggcatcaagcgcaagcgcagcgcccccaccagccgcaagctgctgagcgacaagccccaggacttccagatccgcgtgcaggtgatcgagggccgccagctgcccggcgtgaacatcaagcccgtggtgaaggtgaccgccgccggccagaccaagcgcacccgcatccacaagggcaacagccccctgttcaacgagaccctgttcttcaacctgttcgacagccccggcgagctgttcgacgagcccatcttcatcaccgtggtggacagccgcagcctgcgcaccgacgccctgctgggcgagttccgcatggacgtgggcaccatctaccgcgagccccgccacgcctacctgcgcaagtggctgctgctgagcgaccccgacgacttcagcgccggcgcccgcggctacctgaagaccagcctgtgcgtgctgggccccggcgacgaggcccccctggagcgcaaggaccccagcgaggacaaggaggacatcgagagcaacctgctgcgccccaccggcgtggccctgcgcggcgcccacttctgcctgaaggtgttccgcgccgaggacctgccccagatggacgacgccgtgatggacaacgtgaagcagatcttcggcttcgagagcaacaagaagaacctggtggaccccttcgtggaggtgagcttcgccggcaagatgctgtgcagcaagatcctggagaagaccgccaacccccagtggaaccagaacatcaccctgcccgccatgttccccagcatgtgcgagaagatgcgcatccgcatcatcgactgggaccgcctgacccacaacgacatcgtggccaccacctacctgagcatgagcaagatcagcgcccccggcggcgagatcgaggaggagcccgccggcgccgtgaagcccagcaaggccagcgacctggacgactacctgggcttcctgcccaccttcggcccctgctacatcaacctgtacggcagcccccgcgagttcaccggcttccccgacccctacaccgagctgaacaccggcaagggcgagggcgtggcctaccgcggccgcctgctgctgagcctggagaccaagctggtggagcacagcgagcagaaggtggaggacctgcccgccgacgacatcctgcgcgtggagaagtacctgcgccgccgcaagtacagcctgttcgccgccttctacagcgccaccatgctgcaggacgtggacgacgccatccagttcgaggtgagcatcggcaactacggcaacaagttcgacatgacctgcctgcccctggccagcaccacccagtacagccgcgccgtgttcgacggctgccactactactacctgccctggggcaacgtgaagcccgtggtggtgctgagcagctactgggaggacatcagccaccgcatcgagacccagaaccagctgctgggcatcgccgaccgcctggaggccggcctggagcaggtgcacctggccctgaaggcccagtgcagcaccgaggacgtggacagcctggtggcccagctgaccgacgagctgatcgccggctgcagccagcccctgggcgacatccacgagacccccagcgccacccacctggaccagtacctgtaccagctgcgcacccaccacctgagccagatcaccgaggccgccctggccctgaagctgggccacagcgagctgcccgccgccctggagcaggccgaggactggctgctgcgcctgcgcgccctggccgaggagccccagaacagcctgcccgacatcgtgatctggatgctgcagggcgacaagcgcgtggcctaccagcgcgtgcccgcccaccaggtgctgttcagccgccgcggcgccaactactgcggcaagaactgcggcaagctgcagaccatcttcctgaagtaccccatggagaaggtgcccggcgcccgcatgcccgtgcagatccgcgtgaagctgtggttcggcctgagcgtggacgagaaggagttcaaccagttcgccgagggcaagctgagcgtgttcgccgagacctacgagaacgagaccaagctggccctggtgggcaactggggcaccaccggcctgacctaccccaagttcagcgacgtgaccggcaagatcaagctgcccaaggacagcttccgccccagcgccggctggacctgggccggcgactggttcgtgtgccccgagaagaccctgctgcacgacatggacgccggccacctgagcttcgtggaggaggtgttcgagaaccagacccgcctgcccggcggccagtggatctacatgagcgacaactacaccgacgtgaacggcgagaaggtgctgcccaaggacgacatcgagtgccccctgggctggaagtgggaggacgaggagtggagcaccgacctgaaccgcgccgtggacgagcagggctgggagtacagcatcaccatcccccccgagcgcaagcccaagcactgggtgcccgccgagaagatgtactacacccaccgccgccgccgctgggtgcgcctgcgccgccgcgacctgagccagatggaggccctgaagcgccaccgccaggccgaggccgagggcgagggctgggagtacgccagcctgttcggctggaagttccacctggagtaccgcaagaccgacgccttccgccgccgccgctggcgccgccgcatggagcccctggagaagaccggccccgccgccgtgttcgccctggagggcgccctgggcggcgtgatggacgacaagagcgaggacagcatgagcgtgagcaccctgagcttcggcgtgaaccgccccaccatcagctgcatcttcgactacggcaaccgctaccacctgcgctgctacatgtaccaggcccgcgacctggccgccatggacaaggacagcttcagcgacccctacgccatcgtgagcttcctgcaccagagccagaagaccgtggtggtgaagaacaccctgaaccccacctgggaccagaccctgatcttctacgagatcgagatcttcggcgagcccgccaccgtggccgagcagccccccagcatcgtggtggagctgtacgaccacgacacctacggcgccgacgagttcatgggccgctgcatctgccagcccagcctggagcgcatgccccgcctggcctggttccccctgacccgcggcagccagcccagcggcgagctgctggccagcttcgagctgatccagcgcgagaagcccgccatccaccacatccccggcttcgaggtgcaggagaccagccgcatcctggacgagagcgaggacaccgacctgccctacccccccccccagcgcgaggccaacatctacatggtgccccagaacatcaagcccgccctgcagcgcaccgccatcgagatcctggcctggggcctgcgcaacatgaagagctaccagctggccaacatcagcagccccagcctggtggtggagtgcggcggccagaccgtgcagagctgcgtgatccgcaacctgcgcaagaaccccaacttcgacatctgcaccctgttcatggaggtgatgctgccccgcgaggagctgtactgcccccccatcaccgtgaaggtgatcgacaaccgccagttcggccgccgccccgtggtgggccagtgcaccatccgcagcctggagagcttcctgtgcgacccctacagcgccgagagccccagcccccagggcggccccgacgacgtgagcctgctgagccccggcgaggacgtgctgatcgacatcgacgacaaggagcccctgatccccatccaggaggaggagttcatcgactggtggagcaagttcttcgccagcatcggcgagcgcgagaagtgcggcagctacctggagaaggacttcgacaccctgaaggtgtacgacacccagctggagaacgtggaggccttcgagggcctgagcgacttctgcaacaccttcaagctgtaccgcggcaagacccaggaggagaccgaggaccccagcgtgatcggcgagttcaagggcctgttcaagatctaccccctgcccgaggaccccgccatccccatgcccccccgccagttccaccagctggccgcccagggcccccaggagtgcctggtgcgcatctacatcgtgcgcgccttcggcctgcagcccaaggaccccaacggcaagtgcgacccctacatcaagatcagcatcggcaagaagagcgtgagcgaccaggacaactacatcccctgcaccctggagcccgtgttcggcaagatgttcgagctgacctgcaccctgcccctggagaaggacctgaagatcaccctgtacgactacgacctgctgagcaaggacgagaagatcggcgagaccgtggtggacctggagaaccgcctgctgagcaagttcggcgcccgctgcggcctgccccagacctactgcgtgagcggccccaaccagtggcgcgaccagctgcgccccagccagctgctgcacctgttctgccagcagcaccgcgtgaaggcccccgtgtaccgcaccgaccgcgtgatgttccaggacaaggagtacagcatcgaggagatcgaggccggccgcatccccaacccccacctgggccccgtggaggagcgcctggccctgcacgtgctgcagcagcagggcctggtgcccgagcacgtggagagccgccccctgtacagccccctgcagcccgacatcgagcagggcaagctgcagatgtgggtggacctgttccccaaggccctgggccgccccggcccccccttcaacatcaccccccgccgcgcccgccgcttcttcctgcgctgcatcatctggaacacccgcgacgtgatcctggacgacctgagcctgaccggcgagaagatgagcgacatctacgtgaagggctggatgatcggcttcgaggagcacaagcagaagaccgacgtgcactaccgcagcctgggcggcgagggcaacttcaactggcgcttcatcttccccttcgactacctgcccgccgagcaggtgtgcaccatcgccaagaaggacgccttctggcgcctggacaagaccgagagcaagatccccgcccgcgtggtgttccagatctgggacaacgacaagttcagcttcgacgacttcctgggcagcctgcagctggacctgaaccgcatgcccaagcccgccaagaccgccaagaagtgcagcctggaccagctggacgacgccttccaccccgagtggttcgtgagcctgttcgagcagaagaccgtgaagggctggtggccctgcgtggccgaggagggcgagaagaagatcctggccggcaagctggagatgaccctggagatcgtggccgagagcgagcacgaggagcgccccgccggccagggccgcgacgagcccaacatgaaccccaagctggaggacccccgccgccccgacaccagcttcctgtggttcaccagcccctacaagaccatgaagttcatcctgtggcgccgcttccgctgggccatcatcctgttcatcatcctgttcatcctgctgctgttcctggccatcttcatctacgccttccccaactacgccgccatgaagctggtgaagcccttcagc

SEQ ID NO: 48967 - DNA, 6336 bp, Artificial Sequence
  derived and/or modified sequence
atgctgagagtgttcatcctgtacgccgagaacgtgcacacccccgacaccgacatcagcgacgcctactgcagcgccgtgttcgccggcgtgaagaagagaaccaaggtgatcaagaacagcgtgaaccccgtgtggaacgagggcttcgagtgggacctgaagggcatccccctggaccagggcagcgagctgcacgtggtggtgaaggaccacgagaccatgggcagaaacagattcctgggcgaggccaaggtgcccctgagagaggtgctggccacccccagcctgagcgccagcttcaacgcccccctgctggacaccaagaagcagcccaccggcgccagcctggtgctgcaggtgagctacacccccctgcccggcgccgtgcccctgttccccccccccacccccctggagcccagccccaccctgcccgacctggacgtggtggccggcggcggccagagcagagccgagacctggagcctgctgagcgacagcaccatggacaccagatacagcggcaagaagtggcccgcccccaccgacaccggcggcgaggaggacaccgaggaccagggcctgaccggcgacgaggccgagcccttcctggaccagagcggcggccccggcgcccccaccacccccagaaagctgcccagcagaccccccccccactaccccggcatcaagagaaagagaagcgcccccaccagcagaaagctgctgagcgacaagccccaggacttccagatcagagtgcaggtgatcgagggcagacagctgcccggcgtgaacatcaagcccgtggtgaaggtgaccgccgccggccagaccaagagaaccagaatccacaagggcaacagccccctgttcaacgagaccctgttcttcaacctgttcgacagccccggcgagctgttcgacgagcccatcttcatcaccgtggtggacagcagaagcctgagaaccgacgccctgctgggcgagttcagaatggacgtgggcaccatctacagagagcccagacacgcctacctgagaaagtggctgctgctgagcgaccccgacgacttcagcgccggcgccagaggctacctgaagaccagcctgtgcgtgctgggccccggcgacgaggcccccctggagagaaaggaccccagcgaggacaaggaggacatcgagagcaacctgctgagacccaccggcgtggccctgagaggcgcccacttctgcctgaaggtgttcagagccgaggacctgccccagatggacgacgccgtgatggacaacgtgaagcagatcttcggcttcgagagcaacaagaagaacctggtggaccccttcgtggaggtgagcttcgccggcaagatgctgtgcagcaagatcctggagaagaccgccaacccccagtggaaccagaacatcaccctgcccgccatgttccccagcatgtgcgagaagatgagaatcagaatcatcgactgggacagactgacccacaacgacatcgtggccaccacctacctgagcatgagcaagatcagcgcccccggcggcgagatcgaggaggagcccgccggcgccgtgaagcccagcaaggccagcgacctggacgactacctgggcttcctgcccaccttcggcccctgctacatcaacctgtacggcagccccagagagttcaccggcttccccgacccctacaccgagctgaacaccggcaagggcgagggcgtggcctacagaggcagactgctgctgagcctggagaccaagctggtggagcacagcgagcagaaggtggaggacctgcccgccgacgacatcctgagagtggagaagtacctgagaagaagaaagtacagcctgttcgccgccttctacagcgccaccatgctgcaggacgtggacgacgccatccagttcgaggtgagcatcggcaactacggcaacaagttcgacatgacctgcctgcccctggccagcaccacccagtacagcagagccgtgttcgacggctgccactactactacctgccctggggcaacgtgaagcccgtggtggtgctgagcagctactgggaggacatcagccacagaatcgagacccagaaccagctgctgggcatcgccgacagactggaggccggcctggagcaggtgcacctggccctgaaggcccagtgcagcaccgaggacgtggacagcctggtggcccagctgaccgacgagctgatcgccggctgcagccagcccctgggcgacatccacgagacccccagcgccacccacctggaccagtacctgtaccagctgagaacccaccacctgagccagatcaccgaggccgccctggccctgaagctgggccacagcgagctgcccgccgccctggagcaggccgaggactggctgctgagactgagagccctggccgaggagccccagaacagcctgcccgacatcgtgatctggatgctgcagggcgacaagagagtggcctaccagagagtgcccgcccaccaggtgctgttcagcagaagaggcgccaactactgcggcaagaactgcggcaagctgcagaccatcttcctgaagtaccccatggagaaggtgcccggcgccagaatgcccgtgcagatcagagtgaagctgtggttcggcctgagcgtggacgagaaggagttcaaccagttcgccgagggcaagctgagcgtgttcgccgagacctacgagaacgagaccaagctggccctggtgggcaactggggcaccaccggcctgacctaccccaagttcagcgacgtgaccggcaagatcaagctgcccaaggacagcttcagacccagcgccggctggacctgggccggcgactggttcgtgtgccccgagaagaccctgctgcacgacatggacgccggccacctgagcttcgtggaggaggtgttcgagaaccagaccagactgcccggcggccagtggatctacatgagcgacaactacaccgacgtgaacggcgagaaggtgctgcccaaggacgacatcgagtgccccctgggctggaagtgggaggacgaggagtggagcaccgacctgaacagagccgtggacgagcagggctgggagtacagcatcaccatcccccccgagagaaagcccaagcactgggtgcccgccgagaagatgtactacacccacagaagaagaagatgggtgagactgagaagaagagacctgagccagatggaggccctgaagagacacagacaggccgaggccgagggcgagggctgggagtacgccagcctgttcggctggaagttccacctggagtacagaaagaccgacgccttcagaagaagaagatggagaagaagaatggagcccctggagaagaccggccccgccgccgtgttcgccctggagggcgccctgggcggcgtgatggacgacaagagcgaggacagcatgagcgtgagcaccctgagcttcggcgtgaacagacccaccatcagctgcatcttcgactacggcaacagataccacctgagatgctacatgtaccaggccagagacctggccgccatggacaaggacagcttcagcgacccctacgccatcgtgagcttcctgcaccagagccagaagaccgtggtggtgaagaacaccctgaaccccacctgggaccagaccctgatcttctacgagatcgagatcttcggcgagcccgccaccgtggccgagcagccccccagcatcgtggtggagctgtacgaccacgacacctacggcgccgacgagttcatgggcagatgcatctgccagcccagcctggagagaatgcccagactggcctggttccccctgaccagaggcagccagcccagcggcgagctgctggccagcttcgagctgatccagagagagaagcccgccatccaccacatccccggcttcgaggtgcaggagaccagcagaatcctggacgagagcgaggacaccgacctgccctacccccccccccagagagaggccaacatctacatggtgccccagaacatcaagcccgccctgcagagaaccgccatcgagatcctggcctggggcctgagaaacatgaagagctaccagctggccaacatcagcagccccagcctggtggtggagtgcggcggccagaccgtgcagagctgcgtgatcagaaacctgagaaagaaccccaacttcgacatctgcaccctgttcatggaggtgatgctgcccagagaggagctgtactgcccccccatcaccgtgaaggtgatcgacaacagacagttcggcagaagacccgtggtgggccagtgcaccatcagaagcctggagagcttcctgtgcgacccctacagcgccgagagccccagcccccagggcggccccgacgacgtgagcctgctgagccccggcgaggacgtgctgatcgacatcgacgacaaggagcccctgatccccatccaggaggaggagttcatcgactggtggagcaagttcttcgccagcatcggcgagagagagaagtgcggcagctacctggagaaggacttcgacaccctgaaggtgtacgacacccagctggagaacgtggaggccttcgagggcctgagcgacttctgcaacaccttcaagctgtacagaggcaagacccaggaggagaccgaggaccccagcgtgatcggcgagttcaagggcctgttcaagatctaccccctgcccgaggaccccgccatccccatgccccccagacagttccaccagctggccgcccagggcccccaggagtgcctggtgagaatctacatcgtgagagccttcggcctgcagcccaaggaccccaacggcaagtgcgacccctacatcaagatcagcatcggcaagaagagcgtgagcgaccaggacaactacatcccctgcaccctggagcccgtgttcggcaagatgttcgagctgacctgcaccctgcccctggagaaggacctgaagatcaccctgtacgactacgacctgctgagcaaggacgagaagatcggcgagaccgtggtggacctggagaacagactgctgagcaagttcggcgccagatgcggcctgccccagacctactgcgtgagcggccccaaccagtggagagaccagctgagacccagccagctgctgcacctgttctgccagcagcacagagtgaaggcccccgtgtacagaaccgacagagtgatgttccaggacaaggagtacagcatcgaggagatcgaggccggcagaatccccaacccccacctgggccccgtggaggagagactggccctgcacgtgctgcagcagcagggcctggtgcccgagcacgtggagagcagacccctgtacagccccctgcagcccgacatcgagcagggcaagctgcagatgtgggtggacctgttccccaaggccctgggcagacccggcccccccttcaacatcacccccagaagagccagaagattcttcctgagatgcatcatctggaacaccagagacgtgatcctggacgacctgagcctgaccggcgagaagatgagcgacatctacgtgaagggctggatgatcggcttcgaggagcacaagcagaagaccgacgtgcactacagaagcctgggcggcgagggcaacttcaactggagattcatcttccccttcgactacctgcccgccgagcaggtgtgcaccatcgccaagaaggacgccttctggagactggacaagaccgagagcaagatccccgccagagtggtgttccagatctgggacaacgacaagttcagcttcgacgacttcctgggcagcctgcagctggacctgaacagaatgcccaagcccgccaagaccgccaagaagtgcagcctggaccagctggacgacgccttccaccccgagtggttcgtgagcctgttcgagcagaagaccgtgaagggctggtggccctgcgtggccgaggagggcgagaagaagatcctggccggcaagctggagatgaccctggagatcgtggccgagagcgagcacgaggagagacccgccggccagggcagagacgagcccaacatgaaccccaagctggaggaccccagaagacccgacaccagcttcctgtggttcaccagcccctacaagaccatgaagttcatcctgtggagaagattcagatgggccatcatcctgttcatcatcctgttcatcctgctgctgttcctggccatcttcatctacgccttccccaactacgccgccatgaagctggtgaagcccttcagctag

SEQ ID NO: 48968 - DNA, 6336 bp, Artificial Sequence
  derived and/or modified sequence
atgttgcgagtgttcatcctatatgctgagaacgtacatactcccgataccgacataagcgatgcctactgctctgccgtctttgcgggtgtgaaaaaacgaacgaaagtgatcaaaaatagcgtgaaccccgtctggaacgagggtttcgaatgggacttaaagggaattcctctagatcaaggctctgagctgcatgttgtcgttaaagaccacgagacaatgggtagaaataggtttcttggtgaagcaaaggtccccctgcgcgaggtcctggccaccccctccctctcagcttccttcaatgctccattgctcgacaccaaaaaacagcctacgggagcaagcctggtgttacaggtcagttacacacctctgccgggagctgtgccgctctttccgccgcctacccctttggagccctctcccacgttgcccgatctggacgtggttgccggcggcgggcaatcccgcgccgaaacatggtcccttctttccgatagcactatggacacacgttacagcgggaagaaatggccagctcctaccgacactggtggtgaagaagacaccgaagatcagggactcactggcgatgaagctgagcccttcctggaccagtcgggtgggcctggcgcgcctacgactccccggaagctgccgtcccggcccccccctcattacccaggcatcaagaggaaacgcagcgcacctacctctagaaaactcctctcagacaaaccccaagatttccagattagagtccaggtcattgaggggagacagctccctggtgtgaatattaagcccgtagtaaaagtgacagctgcaggccagacaaaaagaacccggatccacaaaggaaactctccgctcttcaatgagacactgttcttcaatttatttgatagccccggcgagctgtttgacgagcccattttcattaccgtggtagactccaggtcattgagaaccgatgctttgctcggcgaatttaggatggacgtcggcacgatttatcgggaacctcggcacgcctaccttcgcaagtggctgcttctgtctgaccctgacgacttttcagccggcgctcgcgggtatttaaaaacctcactgtgcgtgctcgggcctggggatgaagctcctctcgaaagaaaggacccctccgaggacaaggaagacatcgagagtaatctgctaagaccaaccggtgtggctctgcggggcgcacacttctgcttgaaggtgttccgcgctgaggacttgccacagatggacgatgccgtaatggataacgtgaagcagatcttcggcttcgaaagtaataagaaaaacctggtggatccatttgtggaggtttcctttgccggaaagatgctgtgcagcaagattctcgagaagacagcaaaccctcagtggaaccagaatattactcttcctgccatgtttcctagcatgtgcgaaaagatgcggattcgaatcatcgactgggacagactgacccacaacgacattgtggccacaacatatctttcgatgagcaagatctcagcaccaggcggcgagatcgaggaggagccggcaggggcagtgaaaccaagtaaggcaagcgacctggatgactatctggggtttttgcctacattcggcccatgctacattaatctgtatgggtctccaagagaattcacaggctttcccgatccatacacagagctgaacactggcaaaggcgaaggtgtcgcctaccgcggcaggttactgctctccttagaaacgaaactcgtcgaacactctgagcaaaaagtcgaagatcttccagccgatgacatcctgagagtggaaaaataccttcgacggagaaaatatagcctcttcgctgccttttactcagccactatgctgcaagatgtggacgatgcaatccaattcgaggtaagcatcggcaactacggcaacaagtttgatatgacgtgcttacccctcgcctctacgacgcagtactccagggctgttttcgacgggtgccactactattatcttccctggggcaacgtgaaacccgtagttgttcttagttcttactgggaagatatctctcacaggattgagacgcaaaatcaattattggggatcgccgatcgccttgaggccggcctggaacaggtccacctggccctgaaagcacagtgtagtactgaggacgttgacagcctggtagcgcaactcactgatgagctgattgcgggatgttcacagcccctgggggatatccatgagacgccttcagccactcacctggaccagtatctttaccaattaaggacccaccacctttctcaaattaccgaagctgcgctggcactgaagcttgggcattccgagctacctgctgcactcgaacaggccgaggactggctgctgaggctgcgagccctggccgaagaacctcaaaatagcctcccagacattgttatttggatgctgcaaggggacaagagggtagcctaccaaagagtgcctgcccaccaagttttattttcccgtagaggggctaactactgtggcaaaaattgtggtaaattgcagactattttcctgaaatatccgatggagaaggtgcccggtgccagaatgcccgttcagattcgagttaaattgtggtttggcctttccgtcgacgagaaggaatttaatcagtttgcagaagggaaactgtccgtgttcgccgaaacttacgaaaacgaaactaagctagcgctggtgggtaactggggcaccaccgggctcacatacccaaaattctcagacgtgactgggaaaattaaactgcctaaggacagcttcaggcctagcgccggctggacatgggctggcgactggtttgtctgtccagaaaaaaccctgttacacgacatggacgcaggccatctgagctttgtggaagaggtgtttgagaatcaaacaagactgccgggcggccagtggatatacatgtcagataattacaccgacgtcaacggagagaaggtcctgccaaaggatgacatagagtgcccgctgggatggaaatgggaagatgaagaatggagcacagacctgaatagagcggtcgatgagcaaggatgggagtactccatcactatccccccagaaaggaaacccaagcattgggttcccgcggaaaagatgtactatacccaccgcagaaggagatgggtaaggcttagacgccgggatctcagtcaaatggaggctttgaaaaggcaccgtcaggcagaagctgaaggcgagggatgggaatatgcctcactgtttgggtggaaatttcatttagagtaccgcaagactgatgcattccggagacggagatggcgccgtcgcatggaacctctagagaagacaggtcctgccgctgtgtttgccttagaaggcgcactcgggggggttatggatgataaatccgaggatagcatgagcgtttccactctgagcttcggcgttaatagaccaaccatctcatgcatttttgactacggcaaccggtaccacctccggtgctacatgtaccaagctagagacctggctgctatggacaaagatagcttctctgatccttacgctattgtgagctttctgcatcaatctcagaaaacagtggtcgttaagaatacactgaacccgacctgggaccagacactcatcttctatgaaattgagatcttcggagaacctgccacggttgccgaacagccccctagtattgtggtggaactgtacgatcatgatacttatggcgcggatgagttcatgggacggtgcatctgccagccctccctagaaagaatgccgagactggcgtggttcccgctgacacgcggatctcagcccagcggggaactgttagcttcgttcgagctaatccagcgcgagaaacccgccattcaccatattcccgggtttgaggtccaggagaccagccggatcctcgatgaaagtgaggatacagacctgccgtatccccccccgcagagagaggccaatatctatatggtacctcaaaacataaaacccgccctccagaggaccgccatcgaaatattagcttgggggctgcggaacatgaagtcttaccaactcgccaacatctcaagcccatctcttgtggtggagtgtggcggacaaacggtgcagagttgcgtgataaggaaccttaggaaaaaccccaatttcgacatttgcacactgttcatggaagtgatgctgccccgtgaagaactttactgtcctcctatcacagtgaaagtcatcgacaatcgtcagttcggacgccgccctgtcgtcggacagtgtacgatccgatcgctcgagtccttcctgtgtgatccctactcagccgaaagcccgtccccccaagggggccccgacgacgtgtcgctcttgtcccccggcgaagatgtcctaatcgacattgacgataaagagccacttatacctatacaggaagaggaattcattgactggtggagcaagttcttcgcttctattggcgagagagagaaatgcggcagctaccttgagaaggacttcgatactctgaaagtatatgatacacagctcgagaacgttgaggcgtttgaaggcctgtctgatttttgcaacacattcaagctttacagggggaagacccaagaggagaccgaggatccctctgtaatcggagagtttaagggcctttttaaaatatacccccttcctgaagaccccgccattccgatgcctccccggcagtttcaccaactagctgcccagggaccccaggaatgtctggttcggatttacatagtgagggcttttgggcttcaacccaaagaccccaatggcaagtgtgatccatatataaagataagtatcgggaagaagtctgtgtcagaccaagataattatataccttgcaccttggaacccgtgttcggtaagatgttcgagctcacatgcactttgccccttgaaaaggatctgaaaatcacactctatgattacgatctgttgtctaaggacgagaaaattggtgagaccgtcgtggatttggagaaccggctgttatccaagttcggagctaggtgtggcctgccacaaacatactgcgtgagcggtccgaatcagtggcgagatcagctccgaccatcccagctgttacatctgttttgccagcagcacagagtgaaagccccagtatacaggacggaccgagtaatgttccaggataaggagtactcaatcgaagagatcgaggcgggcagaattcccaacccgcatttagggccagtggaagaacggctagctctgcatgtcctgcagcagcagggcttggtgcccgagcatgtcgaatctcggcccctctactcacctcttcagcccgatattgaacaggggaagctacaaatgtgggtcgacctgttccccaaggccctcggtaggccaggcccgccctttaatataacgccccgtcgcgcccgcagattctttttaaggtgtataatctggaacacacgggacgtgatcctggatgacttatcacttactggcgagaaaatgtctgacatctatgtgaagggatggatgatcggatttgaagaacacaagcagaagaccgatgtgcactaccgcagtcttggcggagaaggcaacttcaattggcgattcatcttccctttcgattacctgcccgctgagcaggtctgcactatcgccaagaaggatgcattttggcggctcgataagaccgagtcaaaaatacccgctagagtggtgttccagatctgggacaacgacaaattctccttcgatgattttttaggctccctgcagcttgacctcaaccgcatgcctaaaccggcgaaaaccgccaagaaatgcagcttggaccagctggatgacgcatttcaccccgagtggtttgtgtccctcttcgagcaaaagacagttaagggttggtggccttgtgtggccgaagagggcgagaagaagatcctggctggcaaacttgaaatgaccctggagattgtggctgagtcagagcacgaggaacgtccagctggacaggggcgggatgagcctaatatgaatccaaaactggaagacccgcgcaggccagatactagctttctgtggtttacatctccgtataaaacaatgaagttcattttgtggcgtcgattccggtgggcgattattctgttcattattttgttcattctgcttttgtttctggctattttcatctacgctttcccgaattacgcagccatgaagctggtgaagccctttagctag

SEQ ID NO: 48969 - DNA, 6336 bp, Artificial Sequence
  derived and/or modified sequence
atgctgcgggtcttcatcctgtatgcagaaaatgtgcacaccccagacacagacatcagtgatgcctactgcagcgctgtgtttgctggggtgaagaagaggaccaaggtgatcaagaacagcgtgaaccctgtgtggaatgaaggatttgagtgggacctgaagggcatccccctggaccagggcagcgagctgcacgtggtggtgaaggaccacgagaccatgggcaggaaccgcttcctgggggaggccaaggtgcccctgcgggaggtgctggccacccccagcctgagcgccagcttcaatgcccccctgctggacaccaagaagcagcccactggagccagcctggtgctgcaggtgtcctacacccccctgcctggagctgtgcccctcttccccccacccacccccctggagcccagccccaccctgcctgacctggatgtggtggccggcggcggccagagcagagctgagacctggagcctgctgagtgacagcaccatggacacccgctacagcggcaagaagtggccagcccccacagacacaggaggagaggaggacacagaggaccagggcctgactggagatgaagctgagcccttcctggaccagagcggcggccctggggcccccaccacccccaggaagctgcccagccggcccccaccccactacccaggcatcaagaggaagaggtctgcccccaccagcaggaagctgctgagtgacaagccccaggacttccagatccgggtgcaggtgattgagggccggcagctgcccggggtgaacatcaagcctgtggtgaaggtgacagctgctggccagaccaagaggacccgcatccacaagggcaacagccccctcttcaatgagaccctcttcttcaacctgtttgacagccctggagagctgtttgatgagcccatcttcatcaccgtggtggacagccgcagcctgaggacagatgccctgctgggggagttcaggatggatgtgggcaccatctaccgggagcccaggcatgcctacctgaggaagtggctgctgctgagtgaccctgatgacttctctgctggggcccggggctacctgaagaccagcctgtgtgtgctgggccctggagatgaggcccccctggagaggaaggaccccagcgaggacaaggaggacatcgagagcaacctgctgcggcccactggagtggccctgcggggggcccacttctgcctgaaggtgttccgggcagaggacctgccccagatggatgatgctgtgatggacaacgtgaagcagatctttggatttgagagcaacaagaagaacctggtggacccctttgtggaggtgtcctttgctgggaagatgctgtgcagcaagatcctggagaagacagccaacccccagtggaaccagaacatcaccctgcctgccatgttccccagcatgtgtgagaagatgaggatccgcatcatcgactgggaccggctgacccacaatgacatcgtggccaccacctacctgtccatgagcaagatcagcgcccctggaggagaaattgaggaggagcctgctggagctgtgaagcccagcaaggccagtgacctggatgactacctgggcttcctgcccaccttcggcccctgctacatcaacctgtatggcagcccccgggagttcaccggcttcccagacccctacacagagctgaacacaggaaaaggagagggcgtggcctaccggggccgcctgctgctgagcctggagaccaagctggtggagcacagcgagcagaaggtggaggacctgcctgcagatgacatcctgcgggtggagaagtacctgcggcggaggaagtacagcctgtttgctgccttctacagcgccaccatgctgcaggatgtggatgatgccatccagtttgaggtgtccatcggcaactacggcaacaagtttgacatgacctgcctgcccctggccagcaccacccagtacagcagagctgtgtttgatggctgccactactactacctgccctggggcaatgtgaagcctgtggtggtgctgagcagctactgggaggacatcagccacagaattgagacccagaaccagctgctgggcattgctgaccggctggaggccggcctggagcaggtgcacctggccctgaaggcccagtgcagcacagaagatgtggacagcctggtggcccagctgacagatgagctgattgctggctgcagccagcccctgggggacatccacgagaccccatctgccacccacctggaccagtacctgtaccagctgcggacccaccacctgagccagatcacagaagctgccctggccctgaagctgggccacagcgagctgcctgctgccctggagcaggccgaggactggctgctgcggctgcgggccctggccgaggagccccagaacagcctgcctgacatcgtcatctggatgctgcagggcgacaagagggtggcctaccagagggtgcctgcccaccaggtgctcttcagcagaagaggagccaactactgcggcaagaactgtgggaagctgcagaccatcttcctgaagtaccccatggagaaggtgcctggggccaggatgcctgtgcagatccgggtgaagctgtggtttggcctgtctgtggatgagaaggagttcaaccagtttgctgagggcaagctgtctgtgtttgctgagacctatgaaaatgagaccaagctggccctggtgggcaactggggcaccaccggcctgacctaccccaagttcagtgatgtgacaggcaagatcaagctgcccaaggacagcttccggcccagcgctggctggacctgggccggggactggtttgtgtgcccagagaagaccctgctgcatgacatggatgctggccacctgagctttgtggaggaggtgtttgagaaccagacccggctgcccggcggccagtggatctacatgtctgacaactacacagatgtgaatggagagaaggtgctgcccaaggatgacatcgagtgccccctgggctggaagtgggaggatgaggagtggagcacagacctgaacagagctgtggatgagcagggctgggagtacagcatcaccatccccccagagaggaagcccaagcactgggtgcctgctgagaagatgtactacacccacagaagaagacgctgggtgcggctgcggcggcgggacctgagccagatggaggccctgaagaggcaccggcaggccgaggccgagggggagggctgggagtatgccagcctgtttggctggaagttccacctggagtacaggaagacagatgccttcagaagaagacgctggaggaggaggatggagcccctggagaagacaggccctgctgctgtgtttgccctggagggcgccctgggcggcgtgatggatgacaagtctgaggacagcatgtctgtgtccaccctgagctttggagtgaaccggcccaccatcagctgcatctttgattatggcaaccgctaccacctgcgctgctacatgtaccaggcccgggacctggccgccatggacaaggacagcttcagtgacccctatgccatcgtgtccttcctgcaccagagccagaagacagtggtggtgaagaacaccctgaaccccacctgggaccagaccctcatcttctatgaaattgagatctttggagagcccgccaccgtggccgagcagccccccagcatcgtggtggagctgtatgaccatgacacctatggagcagatgagttcatgggccgctgcatctgccagcccagcctggagaggatgccccggctggcctggttccccctgacccggggcagccagcccagcggggagctgctggccagctttgagctgatccagcgggagaagccagccatccaccacatccctggctttgaggtgcaggagaccagccgcatcctggatgaaagtgaggacacagacctgccctaccccccaccccagcgggaggccaacatctacatggtgccccagaacatcaagccagccctgcagaggacagccatcgagatcctggcctggggcctgaggaacatgaagagctaccagctggccaacatcagcagccccagcctggtggtggagtgtggcggccagacagtgcagagctgtgtgatccggaacctgaggaagaaccccaactttgacatctgcaccctcttcatggaggtgatgctgccccgggaggagctgtactgcccccccatcaccgtgaaggtgattgacaaccggcagtttggccggcggcctgtggtgggccagtgcaccatccgcagcctggagagcttcctgtgtgacccctacagcgctgagagccccagcccccagggcggcccagatgatgtgtccctgctgagccctggagaagatgtgctgattgatattgatgacaaggagcccctcatccccatccaggaggaggagttcatcgactggtggagcaagttctttgccagcatcggggagcgggagaagtgtggcagctacctggagaaggactttgacaccctgaaggtgtatgacacccagctggagaatgtggaggcctttgagggcctgagtgacttctgcaacaccttcaagctgtaccggggcaagacccaggaggagacagaggaccccagcgtgattggagagttcaagggcctcttcaagatctaccccctgcctgaagatcctgccatccccatgccaccccggcagttccaccagctggccgcccagggcccccaggagtgcctggtgcgcatctacatcgtgcgggccttcggcctgcagcccaaggaccccaatggaaaatgtgacccctacatcaagatcagcatcggcaagaagtctgtgtctgaccaggacaactacatcccctgcaccctggagcctgtgtttgggaagatgtttgagctgacctgcaccctgcccctggagaaggacctgaagatcaccctgtatgactatgacctgctgagcaaggatgagaagatcggggagaccgtggtggacctggagaaccggctgctgagcaagtttggagcccgctgtggcctgccccagacctactgtgtgtctggccccaaccagtggagggaccagctgcggcccagccagctgctgcacctgttctgccagcagcaccgggtgaaggcccctgtgtacagaacagacagagtgatgttccaggacaaggagtacagcattgaggagattgaggccggccgcatccccaacccccacctgggccctgtggaggagcggctggccctgcacgtgctgcagcagcagggcctggtgcctgagcacgtggagagccggcccctgtacagccccctgcagcctgacatcgagcagggcaagctgcagatgtgggtggacctcttccccaaggccctgggccggcccggcccccccttcaacatcaccccaagaagagcccggcgcttcttcctgcgctgcatcatctggaacaccagagatgtgatcctggatgacctgagcctgaccggggagaagatgtctgacatctacgtgaagggctggatgattggatttgaggagcacaagcagaagacagatgtgcactaccgcagcctgggcggggagggcaacttcaactggaggttcatcttcccctttgactacctgcctgctgagcaggtgtgcaccatcgccaagaaggatgccttctggaggctggacaagacagagagcaagatcccagcccgggtggtgttccagatctgggacaatgacaagttctcctttgatgacttcctgggcagcctgcagctggacctgaacaggatgcccaagccagccaagacagccaagaagtgcagcctggaccagctggatgatgccttccaccctgagtggtttgtgtccctgtttgagcagaagacagtgaagggctggtggccctgtgtggccgaggagggggagaagaagatcctggccggcaagctggagatgaccctggagatcgtggccgagagcgagcacgaggagaggcctgctggccagggcagagatgagcccaacatgaaccccaagctggaggacccccggcggccagacaccagcttcctgtggttcaccagcccctacaagaccatgaagttcatcctgtggaggcgcttccgctgggccatcatcctcttcatcatcctcttcatcctgctgctcttcctggccatcttcatctatgccttccccaactatgctgccatgaagctggtgaagcccttctcctag

SEQ ID NO: 48970 - DNA, 6769 bp, Artificial Sequence
  derived and/or modified sequence
gggtggaagatgagcagaagcccctgttctcggaacgccggctgacaagcggggtgagcgcagccggggcggggacccagcctagcccactggagcagccgggggtggcccgttcccctttaagagcaactgctctaagccaggagccagagattcgagccggcctcgcccagccagccctctccagcgaggggacccacaagcggcgcctcggccctcccgacctttccgagccctctttgcgccctgggcgcacggggccctacacgcgccaagcatgctgagggtcttcatcctctatgccgagaacgtccacacacccgacaccgacatcagcgatgcctactgctccgcggtgtttgcaggggtgaagaagagaaccaaagtcatcaagaacagcgtgaaccctgtatggaatgagggatttgaatgggacctcaagggcatccccctggaccagggctctgagcttcatgtggtggtcaaagaccatgagacgatggggaggaacaggttcctgggggaagccaaggtcccactccgagaggtcctcgccacccctagtctgtccgccagcttcaatgcccccctgctggacaccaagaagcagcccacaggggcctcgctggtcctgcaggtgtcctacacaccgctgcctggagctgtgcccctgttcccgccccctactcctctggagccctccccgactctgcctgacctggatgtagtggcaggcgggggacagagccgggccgagacttggtccctgctcagtgacagcaccatggacacgagatactctggaaagaagtggccggcccccacggacacaggaggagaggaagacacagaggaccagggactcactggagatgaggcggagccattcctggatcaaagcggaggcccgggggctcccaccaccccaaggaaactaccttcacgtcctccgccccactaccccgggatcaaaagaaagcgaagtgcgcctacatctagaaagctgctgtcagacaaaccgcaggatttccagatcagggtccaggtgatcgaggggcgccagctgccgggggtgaacatcaagcctgtggtcaaggttaccgctgcagggcagaccaagcggacgcggatccacaagggaaacagcccactcttcaatgagactcttttcttcaacttgtttgactctcctggggagctgtttgatgagcccatctttatcacggtggtagactctcgttctctcaggacagatgctctcctcggggagttccggatggacgtgggcaccatttacagagagccccggcacgcctatctcaggaagtggctgctgctctcagaccctgatgacttctctgctggggccagaggctacctgaaaacaagcctttgtgtgctggggcctggggacgaagcgcctctggagagaaaagacccctctgaagacaaggaggacattgaaagcaacctgctccggcccacaggcgtagccctgcgaggagcccacttctgcctgaaggtcttccgggccgaggacttgccgcagatggacgatgccgtgatggacaacgtgaaacagatctttggcttcgagagtaacaagaagaacttggtggacccctttgtggaggtcagctttgcggggaaaatgctgtgcagcaagatcttggagaagacggccaaccctcagtggaaccagaacatcacactgcctgccatgtttccctccatgtgcgaaaaaatgaggattcgtatcatagactgggaccgcctgactcacaatgacatcgtggctaccacctacctgagtatgtcgaaaatctctgcccctggaggagaaatagaagaggagcctgcaggtgctgtcaagccttcgaaagcctcagacttggatgactacctgggcttcctccccacttttgggccctgctacatcaacctctatggcagtcccagagagttcacaggcttcccagacccctacacagagctcaacacaggcaagggggaaggtgtggcttatcgtggccggcttctgctctccctggagaccaagctggtggagcacagtgaacagaaggtggaggaccttcctgcggatgacatcctccgggtggagaagtaccttaggaggcgcaagtactccctgtttgcggccttctactcagccaccatgctgcaggatgtggatgatgccatccagtttgaggtcagcatcgggaactacgggaacaagttcgacatgacctgcctgccgctggcctccaccactcagtacagccgtgcagtctttgacgggtgccactactactacctaccctggggtaacgtgaaacctgtggtggtgctgtcatcctactgggaggacatcagccatagaatcgagactcagaaccagctgcttgggattgctgaccggctggaagctggcctggagcaggtccacctggccctgaaggcgcagtgctccacggaggacgtggactcgctggtggctcagctgacggatgagctcatcgcaggctgcagccagcctctgggtgacatccatgagacaccctctgccacccacctggaccagtacctgtaccagctgcgcacccatcacctgagccaaatcactgaggctgccctggccctgaagctcggccacagtgagctccctgcagctctggagcaggcggaggactggctcctgcgtctgcgtgccctggcagaggagccccagaacagcctgccggacatcgtcatctggatgctgcagggagacaagcgtgtggcataccagcgggtgcccgcccaccaagtcctcttctcccggcggggtgccaactactgtggcaagaattgtgggaagctacagacaatctttctgaaatatccgatggagaaggtgcctggcgcccggatgccagtgcagatacgggtcaagctgtggtttgggctctcagtggatgagaaggagttcaaccagtttgctgaggggaagctgtctgtctttgctgaaacctatgagaacgagactaagttggcccttgttgggaactggggcacaacgggcctcacctaccccaagttttctgacgtcacgggcaagatcaagctacccaaggacagcttccgcccctcggccggctggacctgggctggagattggttcgtgtgtccggagaagactctgctccatgacatggacgccggtcacctgagcttcgtggaagaggtgtttgagaaccagacccggcttcccggaggccagtggatctacatgagtgacaactacaccgatgtgaacggggagaaggtgcttcccaaggatgacattgagtgcccactgggctggaagtgggaagatgaggaatggtccacagacctcaaccgggctgtcgatgagcaaggctgggagtatagcatcaccatccccccggagcggaagccgaagcactgggtccctgctgagaagatgtactacacacaccgacggcggcgctgggtgcgcctgcgcaggagggatctcagccaaatggaagcactgaaaaggcacaggcaggcggaggcggagggcgagggctgggagtacgcctctctttttggctggaagttccacctcgagtaccgcaagacagatgccttccgccgccgccgctggcgccgtcgcatggagccactggagaagacggggcctgcagctgtgtttgcccttgagggggccctgggcggcgtgatggatgacaagagtgaagattccatgtccgtctccaccttgagcttcggtgtgaacagacccacgatttcctgcatattcgactatgggaaccgctaccatctacgctgctacatgtaccaggcccgggacctggctgcgatggacaaggactctttttctgatccctatgccatcgtctccttcctgcaccagagccagaagacggtggtggtgaagaacacccttaaccccacctgggaccagacgctcatcttctacgagatcgagatctttggcgagccggccacagttgctgagcaaccgcccagcattgtggtggagctgtacgaccatgacacttatggtgcagacgagtttatgggtcgctgcatctgtcaaccgagtctggaacggatgccacggctggcctggttcccactgacgaggggcagccagccgtcgggggagctgctggcctcttttgagctcatccagagagagaagccggccatccaccatattcctggttttgaggtgcaggagacatcaaggatcctggatgagtctgaggacacagacctgccctacccaccaccccagagggaggccaacatctacatggttcctcagaacatcaagccagcgctccagcgtaccgccatcgagatcctggcatggggcctgcggaacatgaagagttaccagctggccaacatctcctcccccagcctcgtggtagagtgtgggggccagacggtgcagtcctgtgtcatcaggaacctccggaagaaccccaactttgacatctgcaccctcttcatggaagtgatgctgcccagggaggagctctactgcccccccatcaccgtcaaggtcatcgataaccgccagtttggccgccggcctgtggtgggccagtgtaccatccgctccctggagagcttcctgtgtgacccctactcggcggagagtccatccccacagggtggcccagacgatgtgagcctactcagtcctggggaagacgtgctcatcgacattgatgacaaggagcccctcatccccatccaggaggaagagttcatcgattggtggagcaaattctttgcctccataggggagagggaaaagtgcggctcctacctggagaaggattttgacaccctgaaggtctatgacacacagctggagaatgtggaggcctttgagggcctgtctgacttttgtaacaccttcaagctgtaccggggcaagacgcaggaggagacagaagatccatctgtgattggtgaatttaagggcctcttcaaaatttatcccctcccagaagacccagccatccccatgcccccaagacagttccaccagctggccgcccagggaccccaggagtgcttggtccgtatctacattgtccgagcatttggcctgcagcccaaggaccccaatggaaagtgtgatccttacatcaagatctccatagggaagaaatcagtgagtgaccaggataactacatcccctgcacgctggagcccgtatttggaaagatgttcgagctgacctgcactctgcctctggagaaggacctaaagatcactctctatgactatgacctcctctccaaggacgaaaagatcggtgagacggtcgtcgacctggagaacaggctgctgtccaagtttggggctcgctgtggactcccacagacctactgtgtctctggaccgaaccagtggcgggaccagctccgcccctcccagctcctccacctcttctgccagcagcatagagtcaaggcacctgtgtaccggacagaccgtgtaatgtttcaggataaagaatattccattgaagagatagaggctggcaggatcccaaacccacacctgggcccagtggaggagcgtctggctctgcatgtgcttcagcagcagggcctggtcccggagcacgtggagtcacggcccctctacagccccctgcagccagacatcgagcaggggaagctgcagatgtgggtcgacctatttccgaaggccctggggcggcctggacctcccttcaacatcaccccacggagagccagaaggtttttcctgcgttgtattatctggaataccagagatgtgatcctggatgacctgagcctcacgggggagaagatgagcgacatttatgtgaaaggttggatgattggctttgaagaacacaagcaaaagacagacgtgcattatcgttccctgggaggtgaaggcaacttcaactggaggttcattttccccttcgactacctgccagctgagcaagtctgtaccattgccaagaaggatgccttctggaggctggacaagactgagagcaaaatcccagcacgagtggtgttccagatctgggacaatgacaagttctcctttgatgattttctgggctccctgcagctcgatctcaaccgcatgcccaagccagccaagacagccaagaagtgctccttggaccagctggatgatgctttccacccagaatggtttgtgtccctttttgagcagaaaacagtgaagggctggtggccctgtgtagcagaagagggtgagaagaaaatactggcgggcaagctggaaatgaccttggagattgtagcagagagtgagcatgaggagcggcctgctggccagggccgggatgagcccaacatgaaccctaagcttgaggacccaaggcgccccgacacctccttcctgtggtttacctccccatacaagaccatgaagttcatcctgtggcggcgtttccggtgggccatcatcctcttcatcatcctcttcatcctgctgctgttcctggccatcttcatctacgccttcccgaactatgctgccatgaagctggtgaagcccttcagctgaggactctcctgccctgtagaaggggccgtggggtcccctccagcatgggactggcctgcctcctccgcccagctcggcgagctcctccagacctcctaggcctgattgtcctgccagggtgggcagacagacagatggaccggcccacactcccag

SEQ ID NO: 48971 - DNA, 6336 bp, Artificial Sequence
  derived and/or modified sequence
atgctgcgggtgttcatcctgtacgccgagaacgtgcacacccccgatacagacatctccgatgcctattgttcggcagtgtttgccggcgtaaaaaagcgaaccaaggtcattaagaattcagttaatcccgtctggaacgagggcttcgagtgggacttaaaaggaatcccactcgaccagggcagcgagctgcatgtcgtggtcaaagatcacgaaacaatgggccgaaatcgattcttgggggaggccaaggtcccattgagggaggtcctcgccacaccctcactgagcgcttcatttaacgccccgttgctggacactaaaaagcagcccactggggcatccttggtgcttcaggtatcctataccccgttaccaggcgcagtgccactgttccctcctccaacccctttagagccgagccctactttacctgatctggatgtagttgcaggtggcggtcaatccagagccgagacttggagcctcttaagtgactctacaatggatacacgttactccgggaagaaatggcccgcccctactgacacgggtggtgaagaggatacagaagaccaaggcctgacaggcgacgaagccgagccttttctggaccagagcggggggcctggggcgccaactaccccgaggaagttgcctagccggcccccaccccactatccaggtattaagcggaagaggagtgcacctactagcagaaagctcctttcagataaaccccaggattttcagataagggttcaagtcattgaaggtcggcagcttcccggcgtgaatataaaaccagtggtgaaagtgacggcagcaggacagaccaagcgtactcgtatacacaaagggaattccccactgttcaacgaaacactattttttaatctttttgatagtcctggcgaactgtttgatgagccgatctttattacagtggtggatagtagaagtctcagaactgatgcactgttgggcgaatttcgcatggatgtgggcactatttaccgagagcctcgccacgcttatctgcggaagtggctcttactgtcagatccggatgatttctctgccggagctcggggctatctcaaaacgagtctctgtgtcttaggccccggggacgaagcgcctttagagagaaaagacccatccgaggataaggaggacatagagtctaacctgttgcggccaaccggagtggcactccgtggagcccacttttgtctaaaagtgtttcgcgctgaggacctcccacagatggacgacgcagtgatggacaatgtcaagcagatcttcggtttcgagtcaaataaaaaaaacctcgtggacccattcgtggaggtctcattcgctggtaaaatgctgtgttctaaaatcttggagaaaacggccaatccacaatggaaccagaatatcacactccccgctatgttccccagtatgtgcgagaaaatgaggatccggatcatagactgggaccgtctgacccacaacgacatcgtggcaacaacttatctctccatgtcaaagatttcggcgccaggaggcgagatcgaggaggagccggccggagcagtgaaaccttctaaggcaagcgaccttgacgattacctgggatttttgcctacgttcggtccttgctacattaatctatatgggagtccccgggagtttacaggattccccgacccgtatacagagttgaatacagggaagggagagggcgtggcttacagaggacggttgctgctctctttggagactaaactggtggaacactccgagcagaaagtagaagacttgccagccgatgacatcctaagggtcgagaaatacctacgccggcgtaaatatagcctcttcgccgccttctactctgcgacaatgttgcaggacgtggatgacgccattcaattcgaagtcagcattggcaattacggtaataaattcgacatgacttgcctgcccttggcctctactacccagtacagcagagcagtgtttgatggctgtcactattactacttgccctggggcaacgtgaagcccgtcgtggtgctcagttcctattgggaagacatctctcatagaatcgaaacccagaatcaactcctgggaatcgccgaccggcttgaggcaggcctcgaacaggtccatcttgccttgaaagcccaatgttcaacagaggatgtcgacagcctcgtagcacaactgactgacgagctaatcgccggatgttctcagcctctcggagatatccacgagacgcccagtgccacccatcttgaccagtacctgtatcagctgaggacacatcacctttcccaaatcaccgaagccgcactcgcacttaaactaggacacagcgagcttccagctgcactggagcaggcagaggattggctgctccggctacgggctcttgctgaggaaccccagaactccctgccagacattgtgatctggatgctgcagggggacaagagggtcgcttaccaacgagtgcccgcacatcaggtcctcttttcccgaaggggtgcaaactactgcggcaagaactgcggtaaactacaaactatctttcttaagtacccaatggaaaaggtccctggagccagaatgcctgtgcagatccgggttaaactctggttcggactgagcgttgacgagaaggagttcaaccagtttgctgaaggcaaactctcggtatttgctgaaacctatgagaatgaaactaagctggccctcgtgggcaactggggtacaactggactgacctaccctaaattctcggatgtaacgggcaagatcaaactaccaaaagactcgttcagacctagtgctggatggacctgggctggagactggtttgtgtgcccagaaaagaccttgttgcacgacatggacgcagggcacctgtcctttgtcgaagaagtgtttgagaaccagacacgattgccaggggggcaatggatctacatgagcgacaactacaccgatgttaatggcgagaaagtattgccaaaggacgatattgagtgccccttgggctggaaatgggaggatgaggaatggtccaccgacctgaaccgcgccgtagatgaacagggatgggaatactcaataactatcccccccgagcgcaagccgaaacactgggtgcccgccgaaaagatgtattacacacatcggagacggcggtgggtgcggcttcggcgtcgtgacctcagccagatggaagcactcaaacgccaccggcaggctgaggctgagggcgaggggtgggaatacgcttctctctttggatggaaattccatttggagtatagaaagactgacgctttcaggagacggaggtggcggaggcggatggagcccttagaaaaaacaggaccggccgctgttttcgctctagaaggtgctctgggcggcgttatggatgacaagtctgaggactctatgtcagtgagtaccctcagctttggggtgaatagaccgaccatcagttgtatcttcgattatggcaacaggtatcatttacgctgctacatgtatcaggcgcgtgacttggccgcaatggacaaggacagcttctcagacccttacgcaattgtatcttttttgcaccagtcacagaaaactgtggttgtcaagaacaccctcaatccaacctgggaccagacccttatattttacgaaattgaaatttttggtgaacccgctacagtggctgagcagccaccaagcatagtggtcgagctctatgatcacgacacttacggagctgacgaatttatggggagatgcatatgtcagccttcactcgaacgtatgccccggctggcttggttccccctcacccgcggctcccagccttctggtgagcttctggcaagctttgagctgatccagcgagaaaagcctgccatacaccatatcccaggcttcgaggtgcaagagacctctagaatattagatgagtcggaagataccgatttgccctaccccccacctcagagagaggccaacatttacatggtcccgcagaacattaagcctgctttgcaaagaaccgccatcgagattttagcgtggggattgagaaatatgaaaagttaccagctcgctaatattagttcaccaagtctggtagtggaatgcggggggcagaccgtgcagtcttgtgtgatacggaacctgcggaagaatcctaattttgatatatgtacgctcttcatggaggtcatgctgccacgggaggagctttactgtccgcctatcaccgtaaaggttatcgacaaccggcagtttggccggaggcccgtggtgggccagtgtacgataaggtccctggaatctttcttatgcgatccctattccgcagaatctccaagccctcagggggggccggacgatgtgtcactgctgtctcccggcgaagacgtcctcatcgacattgatgataaagaaccactgatccctatccaagaggaggagttcattgactggtggagcaagtttttcgcctctattggcgaaagggagaaatgcggctcttacctcgaaaaagattttgacacgctgaaagtatacgatacacagctggagaacgttgaggccttcgagggactgagcgacttctgtaacacatttaagctgtatcgcggaaagacacaggaagagactgaggacccaagtgtcattggcgagttcaagggcctcttcaagatttatccattgcccgaggatccagctatccccatgcctccacgccaattccaccagctggctgcacagggtcctcaagaatgtctagtcagaatatacatcgtgagggcctttggattacagcctaaagatccgaatggtaagtgtgatccctatataaagatcagcatcggaaagaaatcagttagcgaccaggacaactatattccctgcaccctggagccagtcttcggtaagatgttcgagctgacctgcactctgccacttgagaaggatctcaagattactctttacgattacgatctgctctccaaagacgaaaagataggggaaaccgtagtcgatctcgagaaccggttgctttccaagttcggcgctagatgtggcctgccacaaacttattgcgtctccggtcccaatcagtggagagaccagctgcggccttctcaactgctccatcttttttgccaacagcatcgcgtcaaagcaccagtatatcggaccgatagagtgatgtttcaagataaagagtattcaatcgaagagattgaagcaggtcggatccccaacccacatttgggcccagtcgaggagaggcttgccctccacgttcttcaacagcagggactggtgcctgaacacgtagaaagccgccctctctattcacccctgcagcctgacattgaacaaggaaagttgcagatgtgggtggacttatttcctaaagcgcttggccggcctggcccaccttttaacatcacgcctcggcgtgctcggaggttttttctgcgctgcattatctggaacacgcgggacgtgatcttggacgacctcagcctcaccggggagaaaatgtccgatatatatgtcaaaggatggatgatcggtttcgaggagcacaagcagaagaccgacgtgcactaccggtccttggggggggagggcaacttcaattggcgttttatttttccctttgactacctcccagctgagcaggtgtgcaccatagcgaaaaaggatgccttttggagactggataagacggagagcaaaattccggcccgagtggtgttccagatctgggacaatgataagttttccttcgacgatttcctggggagcctgcagctcgatctgaatagaatgccgaaacccgccaagacagctaagaaatgttcattggatcagctggatgatgcatttcatcctgagtggttcgttagtttattcgagcagaagacagtgaaagggtggtggccgtgcgtggcagaggaaggcgagaaaaagattttggccgggaagctcgagatgaccctagagatcgtggcagaatcagagcacgaagagcggcccgccggtcaggggcgggatgaacccaatatgaatcctaagctggaagatcccagaagacccgatacttcctttctttggttcaccagtccttacaagactatgaagttcatcctctggcggaggttccgttgggctataattctgttcattatcctgtttattctgcttctctttttggctattttcatttatgcctttccgaactacgcggccatgaagttggtaaagcccttctcttag

SEQ ID NO: 48972 - DNA, 6335 bp, Artificial Sequence
  derived and/or modified sequence
atgctgagggtctttatactgtacgctgagaacgtgcatacccctgacaccgatattagcgatgcttattgttcagcagtctttgcaggcgttaaaaagcggactaaggttattaagaacagtgtcaacccggtttggaatgagggctttgaatgggatttaaagggtatcccgttggaccaaggcagcgagcttcacgtggtggtcaaggaccatgagaccatgggaaggaacaggttcctgggagaagcgaaagtgccccttcgggaagtgctggcaacaccctcactgagcgcatcgtttaatgcacccctgttggataccaagaaacagcccaccggggcatcattagtcctgcaggtttcatatacacccctgcctggcgctgttccacttttcccaccccctactcctttagagccatcacctaccctgccagaccttgacgtcgtggctggcggaggccagagtcgggcagagacatggtccctgttgtccgactccactatggacactaggtattccggcaagaagtggcctgcgccaaccgataccggcggagaggaagacaccgaagatcagggcctcacaggcgatgaggccgagccatttctggatcagagtggagggcctggggctcctacaacaccacgcaaactcccgagtaggccgccaccacactatccgggaatcaaacggaaaaggtccgcccctacctccaggaagcttctgtctgacaagcctcaggactttcaaattcgtgtgcaggtaatcgaagggcgacagcttcctggagtgaacattaagccggtcgttaaggttactgctgcgggacagacaaaacggaccagaatacacaagggtaattctccgctttttaacgaaaccttgtttttcaacctgttcgacagcccaggcgagctctttgacgagcccatcttcattaccgtcgtcgactcacggtcactgcgtaccgacgcccttttaggagagttccgaatggatgtgggcaccatctaccgggaaccgaggcacgcataccttcgaaaatggcttctgctcagcgatccggatgacttttctgctggggcacggggatacctcaagacctctctctgtgttctcggccctggcgatgaagccccattggagaggaaggatccttccgaagataaagaagacattgagtcaaacctgcttcggcctacaggtgtggcccttcgaggcgctcatttctgcctaaaagtcttcagggctgaggacctgccgcagatggatgacgcggtgatggataacgtaaagcagattttcgggttcgaatcaaataaaaagaacttggtggaccccttcgtcgaagtctcatttgctggcaaaatgttgtgctcaaaaattctggagaagacagcaaacccccagtggaatcaaaatatcacattaccagcaatgtttccctctatgtgcgagaagatgcggatacgtatcatcgactgggatcgactcactcataacgatattgtggcaacgacctatctgtctatgtccaagattagtgctccaggtggcgagatagaagaagagccagctggagctgtaaagccatcgaaggccagcgacctcgatgactaccttgggttcttaccgaccttcggaccatgttatatcaacctgtacggcagcccacgggaattcaccggttttccagacccctatacggagctcaataccggaaagggtgagggcgtagcctaccgcggacggttattactatcccttgagacaaagcttgttgaacactcagagcaaaaggtggaggatcttcccgctgacgatatactaagggtggaaaagtacctgagacggcgtaaatactctctcttcgcagctttttattcggctaccatgctgcaggacgtggatgatgctatccaatttgaggtctcaattggaaactatggaaacaaattcgatatgacatgtctccctttggccagcactacacagtacagccgtgctgtcttcgacgggtgccattactattacctgccctgggggaacgtgaagcccgtagttgtactgtccagctattgggaagatataagccacaggatcgagacgcagaaccagctgctgggaatcgccgatcggctagaggccggtctcgagcaagttcacctcgcactcaaggcacaatgctcgaccgaggacgtcgacagcttagtggcacaactgaccgacgaactgatcgctggatgtagccagcctttgggcgatatccatgaaactccctccgccactcacctggaccagtacctgtaccagcttcggacgcaccaccttagccagattaccgaagctgctctggccctcaaactaggacactcggagcttcctgcagcactagaacaggcagaggactggctcttgaggctccgggcactagctgaggaaccacagaattctctgccggacatcgtaatttggatgctccagggtgataaaagagttgcttaccagagggttcccgctcatcaagttctgtttagccgcagaggggcaaactactgcggcaaaaattgcggaaaacttcaaacaatctttttgaaatacccgatggaaaaagttccgggagcccgtatgcccgttcagattagagtcaagctgtggttcggtttatccgtggacgaaaaagagtttaaccagttcgccgaaggcaagctatctgtctttgctgaaacatatgaaaatgaaaccaagctggctcttgtgggtaactgggggactactggcctgacatatccaaagttttctgacgtgaccggcaagatcaagctgccaaaggacagctttcggccatctgccggttggacctgggccggtgattggttcgtgtgtcctgaaaagacgctgctccatgacatggatgcaggacacctgtctttcgtggaggaggtatttgagaaccagactagactgccagggggacagtggatctatatgagtgataattacactgatgtcaatggggaaaaggttctcccaaaggatgacatcgagtgtccattggggtggaagtgggaggatgaggagtggtctacagacctgaacagggcggtcgatgaacaaggttgggagtatagcattacaatccctcccgaaagaaagcctaaacactgggtgccagcagaaaaaatgtactatacacataggcgcaggcggtgggttcggctccgaaggcgcgacctgagccaaatggaggccttgaagagacaccgccaggctgaagccgaaggagaaggctgggagtacgcgtcactcttcggatggaagtttcacctggagtataggaaaaccgatgcgtttcgcaggagaagatggcgtaggcgaatggagcccttggagaagacagggcctgcagccgtctttgccctcgaaggggcactgggtggagtgatggatgacaaaagcgaggatagtatgtctgtgtccacactgtcctttggcgtgaatcggccaactataagctgtatctttgactatgggaaccgttatcatctcagatgttacatgtaccaggctcgcgatcttgcagcgatggataaggatagcttttcagacccgtatgccattgtctcgtttcttcaccagagccagaaaacagtagttgtaaagaacaccctcaatccaacctgggaccagactttaattttctatgaaattgagatcttcggggaaccagcaaccgttgcagagcagccccctagtattgtggtcgagttgtatgaccatgatacttatggggctgacgaatttatggggcgatgtatctgtcagccctcactagaacgaatgccgcgattagcctggttccccctaactcggggatctcagccttccggtgagttgctggcctcgtttgagcttatccaaagggagaagccggcaatccaccacattcctggattcgaggtccaagagacatcgcggattctggacgagtctgaggacacggacctgccctaccccccaccccagagagaggccaacatttacatggttcctcagaatatcaaacccgcactccagcgaaccgctatagagatcctggcatggggactgcgcaacatgaagagctaccagctggccaatataagtagcccttccctcgtggtagaatgcgggggacagacagtgcagtcctgcgttataagaaacctgagaaaaaatccaaacttcgacatatgcacgctcttcatggaggtcatgctgcccagggaagaattatactgcccccctatcaccgttaaggtcatagataaccgtcagttcgggagaagaccagtggtaggtcagtgcacaatccgctctctggaaagcttcctgtgcgacccttactctgcggagtccccgtcaccacaggggggacctgacgacgtctctctgctgagtcccggtgaggacgtcctgattgatatagacgataaagagcctctgattccaatccaagaagaagagttcattgactggtggtccaagttttttgcctctattggcgagcgggaaaagtgtggtagttacctcgaaaaagacttcgatactctcaaggtatacgatacccagctggagaatgtggaggcttttgaagggctctcagatttttgtaacaccttcaaactctatcgcggaaagacacaggaagagacagaggacccctccgtgataggcgaatttaagggcctgttcaaaatctacccacttccagaggatccagccattcctatgccgccaaggcagtttcaccagttggcagctcaggggcctcaagaatgcttggtgcgaatttatattgtgcgcgcatttggactgcagccaaaagatccaaacggcaagtgtgacccttatatcaagatcagcatcggtaagaagtccgtctccgaccaggataactacatcccttgtactctggagccagtcttcgggaaaatgtttgaactgacatgcaccttgcccctggagaaggacctcaagataacactttatgactatgatttgctaagcaaagacgagaaaataggagagaccgtggtagatcttgaaaacaggctcttatctaaatttggagctaggtgtggacttccccaaacctactgcgtctcaggaccaaaccagtggcgggaccagctgaggcccagtcaactgttgcaccttttctgccagcagcatagagtcaaggccccagtctatagaacagatcgggtcatgttccaggacaaagagtactctattgaggaaatcgaagcaggaagaatccccaacccccaccttggcccagtggaagaaaggctggccttgcacgtcctgcagcagcagggcctggtgcccgaacacgtggagagcagaccgttatacagccccctacagcctgacattgagcagggcaaacttcagatgtgggtggacctctttcccaaggccctgggccgtcccggacctccattcaacataacacccagaagagccagacggttcttccttcggtgcattatttggaacactagggatgtaatcctcgatgatcttagcctgactggggaaaaaatgtctgatatttacgttaagggatggatgatcggatttgaagagcataagcaaaaaaccgacgtgcattacaggtccctcgggggagagggcaactttaactggagatttatatttccttttgactacctaccagccgagcaggtctgtacgatcgcaaaaaaggatgccttctggcgccttgataagacagaatcgaagatccctgccagagtggtctttcagatatgggataatgataagttctcctttgatgacttcctcgggtctctgcagcttgacctgaatcggatgcctaagcccgcaaagaccgccaaaaagtgcagtcttgaccaactcgatgacgcctttcaccccgagtggttcgtctccttgtttgagcagaaaactgtcaaaggatggtggccctgtgtggctgaggagggcgagaagaagatcctggcgggaaagctggagatgacactggaaattgtggctgaatccgaacacgaggagcgccctgccggacagggccgtgacgaacctaatatgaatcctaaacttgaagaccccaggcgcccagacactagttttctctggtttactagcccttacaagactatgaagttcattctatggcgacggtttaggtgggccatcattttgttcatcatcctcttcatcctcttgctgtttcttgctatctttatctatgctttcccgaactacgctgccatgaaattagtgaaaccttttagtta

SEQ ID NO: 48973 - DNA, 6336 bp, Artificial Sequence
  derived and/or modified sequence
atgctaagggtcttcattctttatgccgagaatgtccacacacccgacaccgacatctccgatgcgtattgctcggccgtcttcgccggagtaaaaaagcgcactaaagtcataaaaaattccgttaaccctgtgtggaacgagggcttcgaatgggatctgaagggtattcctcttgatcagggtagtgagctccatgtcgtggtcaaagaccacgagaccatggggaggaacaggtttcttggtgaggcgaaggttccattaagggaggtgcttgccacacctagcctatccgcatcctttaacgcccccctattggacaccaaaaagcagcccaccggagcgtcactggtgctgcaggtatcttataccccactgccgggcgcagtgcctctgtttccacctcctacacccttagagcctagccctacactacccgaccttgacgtcgttgctggtgggggacagtccagagctgaaacttggtcacttctgagcgatagtacgatggacactcgttattcaggaaagaaatggccagcccccactgacactggtggagaagaggataccgaagatcaggggctgacgggggacgaggcggagccatttctagaccagtccggaggacccggcgcccccactacaccacggaagctgccatctcgcccacctccccactaccccggcattaaaaggaaaagatccgccccaacctcccgtaagcttctctcagacaaaccccaggatttccagatcagggtgcaagtgattgagggtaggcaactcccaggagttaatataaagccagtggttaaagttaccgccgcaggacagactaagcgaacaagaatccacaagggcaactcacccttatttaacgagacactcttcttcaacctatttgattctccaggcgaactgttcgatgagcctattttcattaccgtggttgacagcaggtctctccgcacggacgccttactgggggagtttcgaatggatgtgggaaccatctatcgtgaacctagacacgcctacctcagaaagtggttactcctctcagatcccgacgatttttcagccggcgccagagggtacttaaagacatcactgtgcgtattaggtcccggcgatgaagcgcctctggaacgtaaggatccgtcagaagataaggaggacatagagagcaacctgctgcgtcccaccggtgtggccttacgaggcgcacacttctgtctgaaggtgttcagagcagaggatctgccacagatggacgacgctgtgatggataatgtaaaacagattttcggttttgaatctaacaaaaaaaatctggtggatccattcgtcgaggttagcttcgcaggcaagatgctgtgttcaaagattctggaaaaaacagccaacccacagtggaatcagaatatcacattaccggccatgttcccctccatgtgtgaaaaaatgagaatacgcatcattgattgggatagactcacccataatgacatcgtggccactacatacctgtctatgagcaagatatctgcccccggtggggaaattgaggaggaaccagcaggggccgtcaagccctctaaggcaagtgatctcgatgattaccttgggttcctgcctacattcggtccctgctatataaacctgtatggctcgccacgggaatttaccgggttccccgacccctataccgagctgaataccgggaaaggagaaggagtggcctatagaggtcggctgctgctgtccctcgagactaaactggtagaacatagcgaacagaaggtggaagatcttccggcggacgacatcctccgcgtggagaagtatttgcgtcgaaggaaatacagcttgttcgctgctttttacagcgctaccatgctgcaagatgtggatgacgccattcagttcgaagtttccataggcaattatggcaacaaattcgacatgacttgcttgccacttgctagtactacacagtattctagagctgtgtttgatgggtgccattactactatctgccctggggtaacgtcaagcccgtggtcgttctgagctcatattgggaggacatctcacaccggatagaaacccagaatcagctcctgggcatcgccgaccgtcttgaggctggtcttgagcaggtgcatctcgcccttaaagcgcagtgttcaactgaggacgttgacagtctcgtcgcacagctcactgacgagctgatagctgggtgcagccagcctctgggggatattcatgagactccgagcgcgacccaccttgaccaatatctgtatcagctgagaacacaccacctgagtcaaattactgaggctgccctggcgttaaaattgggccactccgagctgcctgccgcactcgagcaggctgaggactggttgctgagactgcgggctctggccgaagagccccaaaatagtctgccagatatcgtgatttggatgctacagggggacaaaagggtcgcctatcagcgtgtgcctgcccatcaagtcctgttttcacgcaggggcgctaattattgcgggaaaaattgtgggaagctgcagaccatttttctcaagtacccaatggaaaaggtgcccggggcccgcatgccagtacagatccgcgtgaaactgtggtttggcctgtctgtggatgaaaaagagtttaatcagtttgctgaaggcaagctgagcgtgtttgctgaaacatacgagaatgaaacaaagttagccctggttgggaactgggggaccacaggccttacttaccctaaattctctgatgtgaccggcaaaatcaagctgccgaaagactcatttagaccctcggcaggctggacatgggcaggagactggtttgtatgcccagaaaagacactcctccacgacatggacgccggacatctaagtttcgttgaggaggtttttgagaatcaaacgaggctgcctggaggccagtggatttacatgtccgacaactatacggacgtcaatggagaaaaagtgctgccaaaggacgacattgagtgtcccttagggtggaaatgggaagacgaagagtggtctacagacttaaaccgggctgtggacgaacagggatgggaatactcgatcacaatcccacctgaaagaaagcccaagcattgggtgcccgctgagaaaatgtattacacacataggcggaggagatgggtaaggttgagaagaagagacctatcccagatggaggcccttaaaaggcacaggcaggctgaggctgagggtgaggggtgggaatacgcttctttatttggatggaagttccacctagaataccgtaaaactgacgccttcagacgcagacgttggcgcaggagaatggaacctttggaaaagactgggccagctgcagtgtttgctctggagggggctttaggaggggtaatggatgataagagcgaagattctatgtcggtgtccacactaagttttggggtgaataggcctactatctcttgtattttcgattatgggaaccgctatcacctgagatgttatatgtatcaagccagggacctcgcagcgatggataaagacagtttttccgacccctatgcaattgtgtctttcttacaccaatcccagaaaactgtcgtcgtgaaaaacacactcaatccaacctgggatcagaccctgatattctacgaaatcgagattttcggggagccggccacagtcgccgagcagccaccctctatcgttgtcgagttgtatgaccatgacacgtacggcgcagatgaatttatggggagatgtatttgtcaacctagtctcgagaggatgcctcgcctcgcctggttcccgcttactcggggatcccagccttccggggagctgttagcctccttcgagctcatccaacgcgagaaaccggcaatccaccatataccagggtttgaggtgcaagaaacttctaggattctggacgagtctgaagacacggatctcccatatccccctccgcagcgtgaagcaaacatttatatggtcccccagaacattaagccggctctacaaagaactgctattgagatccttgcttgggggctgcgcaacatgaagtcataccaattagccaacatttcttcaccttcactggtcgttgagtgtggtggacaaaccgtgcagtcctgtgtgataagaaacctccgtaagaaccctaactttgacatctgcactcttttcatggaggtgatgctcccccgggaggaattgtattgtcctcccataacagtgaaagtaatcgacaatcggcaatttggccggcggccagtagtcggacagtgtaccataaggtcccttgaatcgtttttgtgtgacccttactctgccgaatccccatcaccacagggggggcccgatgacgttagtttactcagcccaggggaggacgtactgattgatatagacgacaaggagcccctgatcccaatacaggaggaagaattcatcgactggtggagcaagtttttcgcaagtattggagagagggaaaagtgtgggagctatcttgagaaggattttgacactctgaaggtgtatgatacccagttagaaaacgtcgaagcctttgagggattgtcagacttctgtaatacattcaaattataccggggcaaaacacaagaagaaaccgaggaccctagtgtaataggagagtttaaaggactctttaagatctacccgctgcctgaggaccctgccatcccaatgcctcctcggcagtttcatcagctggcagcccaaggaccacaggagtgtctagtgcggatttacattgtgcgagcttttggacttcagccaaaggatcctaacggaaagtgtgatccttatattaagatatcaatcgggaaaaagtccgtcagcgatcaggataactacatcccgtgcactctggaacctgtttttggaaagatgttcgagttgacatgcactctgccgctcgagaaggatctcaaaattaccttgtatgactacgatctactttccaaagacgaaaaaattggtgaaaccgtggtcgatctggaaaaccggcttttatcgaagtttggagccagatgtgggctcccacagacttattgcgtcagcggaccgaaccagtggcgtgatcagctgaggccctcccaactgttacacctgttttgtcagcagcatcgcgttaaagctcctgtgtataggaccgaccgggtcatgtttcaggataaggagtactcaatcgaagagattgaagcagggaggattcccaatccccacctggggccagtagaagaaaggcttgcactccatgtactccagcagcagggcctggtgccagaacacgtagagagtcgacctttgtacagtccactgcagcctgatatcgaacagggaaaactgcagatgtgggtagatctttttcctaaagctctgggacgccccggccccccttttaatatcactccccgccgagcaagaagatttttcctgagatgtatcatctggaacactcgagacgtgatactcgatgacctcagcctaacaggggaaaaaatgtctgacatctatgtaaaaggctggatgataggattcgaggagcataaacaaaagactgacgtgcactaccgatcccttggcggcgagggaaattttaactggcggtttatattcccgtttgattacttgcccgctgagcaagtgtgtactattgctaaaaaggatgccttttggcgtcttgacaagactgagtctaagattccagcgagagtggtatttcagatctgggacaatgacaaattcagtttcgatgattttctgggtagtctgcaattagatttgaacagaatgcccaagcctgccaagacagccaagaaatgctcactcgatcaactggacgacgctttccatccagaatggtttgtctctctgttcgaacagaaaacagtaaaggggtggtggccatgtgtcgctgaggagggcgagaagaaaatactggccggcaagctagagatgacactggaaatcgtcgccgaaagcgagcacgaagagagaccggcggggcaggggcgggatgagcctaatatgaacccaaaattggaagacccccgcagacctgacacctctttcctgtggtttaccagcccttataaaaccatgaaattcattctgtggagaagattccgctgggctattattctattcattattctctttatactgctcctcttccttgcaattttcatttacgccttcccaaactatgccgcaatgaaactcgtcaaacccttttcttag

SEQ ID NO: 48974 - DNA, 6336 bp, Artificial Sequence
  derived and/or modified sequence
atgctgagagtgttcattttatatgccgaaaatgttcacacaccagacactgacatatctgatgcatactgctccgctgttttcgctggagtgaaaaaaagaaccaaggtaattaaaaactctgtaaatccagtgtggaacgaaggtttcgaatgggatctaaaaggcatcccccttgatcaaggttcggaattgcatgtggttgtgaaggatcatgagaccatgggccgtaatagattcttgggggaagctaaggtcccattacgcgaggtcctcgccaccccaagcttgtcggcctcctttaacgctccactgctggatactaaaaaacagccgactggggctagcctcgtgttgcaagtttcctacactcctctgccaggtgctgtccctctgtttcccccccccaccccactcgagccctcccctacgctccctgacttggatgtagtcgcaggagggggacagtcaagggctgagacttggagcctcctgtcagatagcaccatggacacacgctactcaggaaagaaatggccagcccccaccgacacaggaggagaagaagacaccgaagatcaggggttaaccggagatgaggcggagccatttctagaccagtccggaggacccggcgcccccactacaccacggaagctgccatctcgcccacctccccactaccccggcattaaaaggaaaagatccgccccaacctcccgtaagcttctctcagacaaaccccaggatttccagatcagggtgcaagtgattgagggtaggcaactcccaggagttaatataaagccagtggttaaagttaccgccgcaggacagactaagcgaacaagaatccacaagggcaactcacccttatttaacgagacactcttcttcaacctgttcgattcacctggcgaactctttgatgaacccatatttattaccgtagttgattctcgttcacttcgaaccgacgccttacttggagaatttcgcatggatgtgggcaccatctatcgcgagcctagacatgcttacctccggaaatggctcttgctgtcagaccctgacgacttctctgctggtgcaagagggtacctgaagacctcactgtgtgtcttaggcccaggggacgaagctcctcttgagcgtaaagatccttccgaagacaaagaggacatagaaagtaacctgctccggcctaccggggttgccctcaggggcgcacatttttgcttgaaagtttttcgcgccgaagacctcccacagatggatgacgctgtcatggacaatgtaaaacagatcttcgggttcgagtcaaataagaaaaatctggtggacccatttgtcgaggtgtcctttgccggcaaaatgctctgctccaaaatactagagaaaactgctaaccctcagtggaaccagaacataactttaccagccatgttcccatctatgtgtgaaaaaatgaggatcaggatcatcgattgggatcgtctaacccacaatgacattgtagcgacaacatacctcagcatgtctaaaatcagtgcccccggcggcgagatcgaggaagagcccgcaggtgcagtaaaaccatcgaaggcatcagatcttgatgattacctgggatttctcccaacgttcggtccctgctacatcaacctttatggctcgccaagagaattcactggctttccagacccctacaccgagctcaataccggtaagggagaaggagtggcatacagaggacgcctgctattatctcttgagaccaagctcgtggagcacagcgagcagaaagtagaagatttacctgcggatgacattttaagggtggaaaaatacctgcggaggaggaaatatagtctgtttgcagcgttttacagcgctactatgctacaggatgtcgacgatgcgatccagtttgaagttagtattgggaattatggtaataaatttgacatgacttgtctgcctctggcttctaccactcagtactcaagagctgtttttgatggctgtcattattattacctgccttgggggaacgtgaaacccgtggtggtgttgagttcctactgggaggatatctctcatcggattgaaacacagaatcagctcctgggcatcgccgaccgtctggaggcagggttggagcaggttcacctggccctaaaagcgcaatgttctacagaagatgttgattccctggtagcacagctgacagacgaactcatcgctggctgctcacaaccactgggggacattcatgaaacacctagtgctacacaccttgatcagtatctctaccagttgcggacccatcacctctctcagattactgaggccgctctagctctgaaacttggccattcagaacttcccgccgcactagagcaggctgaagactggttgttaagactgagagcactcgccgaggaaccacagaatagcctccccgatattgtgatatggatgctacagggtgacaaaagagtggcctatcaaagagtgccagcccatcaagtactgttcagccggcgaggggccaactactgcggtaagaactgtggcaagctgcaaacaatttttttgaaatatccaatggaaaaggttcctggtgcacgtatgccggtgcagatccgcgttaagctttggtttggcttgagcgtcgacgagaaggaattcaaccagtttgccgaggggaaactgtcagtatttgcagaaacatatgaaaatgagactaaattagcgctggtagggaactggggaacaaccggactcacttatcctaagttcagtgacgtcaccggaaaaattaagctgcctaaagacagtttcagacctagcgcaggatggacgtgggctggagattggttcgtctgtccggagaagactctgctgcacgatatggacgcaggacatctctcttttgtggaagaagtgtttgagaatcagactagactgcccggcggtcagtggatctatatgagcgacaactatacggacgtcaatggagaaaaagtgctgccaaaggacgacattgagtgtcccttagggtggaaatgggaagacgaagagtggtctacagacttaaaccgggctgtggacgaacagggatgggaatactcgatcacaatcccacctgaaagaaagcccaagcattgggtgcccgctgagaaaatgtattacacacataggcggaggagatgggtaaggttgagaagaagagacctatcccagatggaggcccttaaaaggcacaggcaggctgaggctgagggtgaggggtgggagtatgcatcacttttcggttggaagtttcacctcgaatatagaaaaacagacgcttttcggaggcggcgatggcggcgcagaatggaaccgctggaaaagacagggccagctgcagtatttgcactggaaggggcccttggaggcgttatggacgataagagcgaggatagcatgagcgtttcgaccctttcatttggcgttaacagacctactataagttgtatcttcgattacggaaatagataccacctccggtgttatatgtatcaggctagggacctggccgctatggacaaggactccttctccgatccctacgcaatcgtgtcttttctgcaccagtctcagaaaaccgtcgttgttaaaaatactctgaatccaacttgggaccagaccctgatcttttacgagattgagatctttggcgaaccagctactgttgccgaacagcccccatcaatcgttgtggaactgtacgaccacgatacatatggtgctgatgaattcatgggcagatgcatctgtcaaccttctctcgaacgaatgcccagattggcttggtttcccctgactcgaggcagccagcccagcggcgaactcctggcatccttcgagctgatacaacgcgaaaagcctgctatccatcatatacctgggttcgaagtgcaggagacctctcggatccttgacgagtccgaagatacggatctcccctaccctccccctcaaagggaggctaacatatacatggtgcctcagaacataaagcctgccctgcaacgcacagcaattgaaattctggcctggggtcttcgcaacatgaaatcttatcagctggctaatatttcttcccctagcttagtcgtcgagtgtggcggacaaaccgttcaaagctgtgtgatccgtaacctgaggaaaaatcctaactttgatatctgcacgctctttatggaagtcatgctccccagagaggagctctactgccccccaattaccgtgaaagtaattgacaatcgccaattcggacgccgtcccgtggtcggccaatgcacaatacggtctctggagtcttttctatgtgatccctactccgccgagtcccctagccctcagggcggcccagacgacgtgtcccttctctcccccggtgaagatgtgctaatcgacatagatgataaagaaccccttatccccattcaggaagaagagtttatcgactggtggtcgaagttttttgcaagtatcggagagagagagaagtgcgggtcataccttgaaaaggattttgatacacttaaggtctatgacacccaactggagaatgtcgaagcatttgaggggctgtctgacttctgcaacacatttaaactgtaccgcggaaaaacccaagaggaaacagaagaccctagtgtgataggagaatttaagggcctgtttaagatatacccactgcccgaagaccccgccatccccatgcctccccggcagttccaccagctggcagcgcaagggccccaggaatgcctagttagaatctacatagtgcgcgccttcggcctgcagcccaaagatccaaatggcaaatgtgatccttatattaagatctctataggcaaaaagtccgtctcagaccaagataattatattccctgtaccctggaacccgtcttcggaaaaatgttcgaactaacttgtacgcttccacttgagaaagacctaaagattacattgtatgactacgatctgctctcaaaagacgagaagattggagaaactgtggttgatctggaaaaccgccttctgtcaaaatttggggctcgatgtggattgccccagacctactgtgtgtcagggccgaatcagtggcgtgatcaactgcgcccgtcacagcttctgcacctgttttgtcaacaacatcgcgttaaagcacccgtgtatcggacggacagagtgatgttccaagacaaggagtacagcatcgaagagatcgaagccggtagaattccaaacccacacctggggcctgttgaagaacggctagcccttcatgtgttacaacagcagggtcttgtgcctgagcacgtggaatcacgcccactgtattcaccgctgcagcctgacatcgagcagggcaaacttcagatgtgggttgacctttttccgaaagctctgggccggccgggtcccccttttaatattacacccagaagagctaggcggtttttcttacgctgcatcatttggaacacccgtgacgtcattctggatgatttaagcctgactggagagaaaatgagcgatatctacgtgaaaggttggatgattgggtttgaagagcacaaacagaagacagatgttcactatcgctcactgggaggcgaagggaacttcaactggaggttcattttcccatttgactacctacccgccgagcaggtttgtaccatcgctaaaaaggacgccttttggagacttgataaaacagagtcaaagataccggctcgagtggtcttccagatttgggataacgacaagtttagttttgatgattttctgggatctctgcagcttgatttaaataggatgcccaaacccgccaaaactgcaaagaagtgtagtctggaccaacttgacgatgcctttcaccccgagtggttcgtctctctctttgaacagaagacagtgaaagggtggtggccgtgtgtcgcagaggaaggtgaaaagaaaatcctggctggtaagctggaaatgacgttagaaattgtggcagaaagcgagcatgaggaacgccccgctgggcaaggacgtgacgaacccaacatgaaccctaagttagaagacccgagaagaccagacacctccttcctgtggttcacaagcccttacaaaaccatgaagtttatcctctggcggagattccggtgggccatcatcctgtttatcattctatttatcttgttgttgtttctcgccatattcatctatgccttccccaattatgccgcaatgaaactcgtcaaacccttttcttag

SEQ ID NO: 48975 - RNA, 6336 nt, Artificial Sequence
  derived and/or modified sequence
augcuaagggucuucauucuuuaugccgagaauguccacacacccgacaccgacaucuccgaugcguauugcucggccgucuucgccggaguaaaaaagcgcacuaaagucauaaaaaauuccguuaacccuguguggaacgagggcuucgaaugggaucugaaggguauuccucuugaucaggguagugagcuccaugucguggucaaagaccacgagaccauggggaggaacagguuucuuggugaggcgaagguuccauuaagggaggugcuugccacaccuagccuauccgcauccuuuaacgccccccuauuggacaccaaaaagcagcccaccggagcgucacuggugcugcagguaucuuauaccccacugccgggcgcagugccucuguuuccaccuccuacacccuuagagccuagcccuacacuacccgaccuugacgucguugcuggugggggacaguccagagcugaaacuuggucacuucugagcgauaguacgauggacacucguuauucaggaaagaaauggccagcccccacugacacugguggagaagaggauaccgaagaucaggggcugacgggggacgaggcggagccauuucuagaccaguccggaggacccggcgcccccacuacaccacggaagcugccaucucgcccaccuccccacuaccccggcauuaaaaggaaaagauccgccccaaccucccguaagcuucucucagacaaaccccaggauuuccagaucagggugcaagugauugaggguaggcaacucccaggaguuaauauaaagccagugguuaaaguuaccgccgcaggacagacuaagcgaacaagaauccacaagggcaacucacccuuauuuaacgagacacucuucuucaaccuauuugauucuccaggcgaacuguucgaugagccuauuuucauuaccgugguugacagcaggucucuccgcacggacgccuuacugggggaguuucgaauggaugugggaaccaucuaucgugaaccuagacacgccuaccucagaaagugguuacuccucucagaucccgacgauuuuucagccggcgccagaggguacuuaaagacaucacugugcguauuaggucccggcgaugaagcgccucuggaacguaaggauccgucagaagauaaggaggacauagagagcaaccugcugcgucccaccgguguggccuuacgaggcgcacacuucugucugaagguguucagagcagaggaucugccacagauggacgacgcugugauggauaauguaaaacagauuuucgguuuugaaucuaacaaaaaaaaucugguggauccauucgucgagguuagcuucgcaggcaagaugcuguguucaaagauucuggaaaaaacagccaacccacaguggaaucagaauaucacauuaccggccauguuccccuccaugugugaaaaaaugagaauacgcaucauugauugggauagacucacccauaaugacaucguggccacuacauaccugucuaugagcaagauaucugcccccgguggggaaauugaggaggaaccagcaggggccgucaagcccucuaaggcaagugaucucgaugauuaccuuggguuccugccuacauucggucccugcuauauaaaccuguauggcucgccacgggaauuuaccggguuccccgaccccuauaccgagcugaauaccgggaaaggagaaggaguggccuauagaggucggcugcugcugucccucgagacuaaacugguagaacauagcgaacagaagguggaagaucuuccggcggacgacauccuccgcguggagaaguauuugcgucgaaggaaauacagcuuguucgcugcuuuuuacagcgcuaccaugcugcaagauguggaugacgccauucaguucgaaguuuccauaggcaauuauggcaacaaauucgacaugacuugcuugccacuugcuaguacuacacaguauucuagagcuguguuugaugggugccauuacuacuaucugcccugggguaacgucaagcccguggucguucugagcucauauugggaggacaucucacaccggauagaaacccagaaucagcuccugggcaucgccgaccgucuugaggcuggucuugagcaggugcaucucgcccuuaaagcgcaguguucaacugaggacguugacagucucgucgcacagcucacugacgagcugauagcugggugcagccagccucugggggauauucaugagacuccgagcgcgacccaccuugaccaauaucuguaucagcugagaacacaccaccugagucaaauuacugaggcugcccuggcguuaaaauugggccacuccgagcugccugccgcacucgagcaggcugaggacugguugcugagacugcgggcucuggccgaagagccccaaaauagucugccagauaucgugauuuggaugcuacagggggacaaaagggucgccuaucagcgugugccugcccaucaaguccuguuuucacgcaggggcgcuaauuauugcgggaaaaauugugggaagcugcagaccauuuuucucaaguacccaauggaaaaggugcccggggcccgcaugccaguacagauccgcgugaaacugugguuuggccugucuguggaugaaaaagaguuuaaucaguuugcugaaggcaagcugagcguguuugcugaaacauacgagaaugaaacaaaguuagcccugguugggaacugggggaccacaggccuuacuuacccuaaauucucugaugugaccggcaaaaucaagcugccgaaagacucauuuagacccucggcaggcuggacaugggcaggagacugguuuguaugcccagaaaagacacuccuccacgacauggacgccggacaucuaaguuucguugaggagguuuuugagaaucaaacgaggcugccuggaggccaguggauuuacauguccgacaacuauacggacgucaauggagaaaaagugcugccaaaggacgacauugagugucccuuaggguggaaaugggaagacgaagaguggucuacagacuuaaaccgggcuguggacgaacagggaugggaauacucgaucacaaucccaccugaaagaaagcccaagcauugggugcccgcugagaaaauguauuacacacauaggcggaggagauggguaagguugagaagaagagaccuaucccagauggaggcccuuaaaaggcacaggcaggcugaggcugagggugaggggugggaauacgcuucuuuauuuggauggaaguuccaccuagaauaccguaaaacugacgccuucagacgcagacguuggcgcaggagaauggaaccuuuggaaaagacugggccagcugcaguguuugcucuggagggggcuuuaggagggguaauggaugauaagagcgaagauucuaugucgguguccacacuaaguuuuggggugaauaggccuacuaucucuuguauuuucgauuaugggaaccgcuaucaccugagauguuauauguaucaagccagggaccucgcagcgauggauaaagacaguuuuuccgaccccuaugcaauugugucuuucuuacaccaaucccagaaaacugucgucgugaaaaacacacucaauccaaccugggaucagacccugauauucuacgaaaucgagauuuucggggagccggccacagucgccgagcagccacccucuaucguugucgaguuguaugaccaugacacguacggcgcagaugaauuuauggggagauguauuugucaaccuagucucgagaggaugccucgccucgccugguucccgcuuacucggggaucccagccuuccggggagcuguuagccuccuucgagcucauccaacgcgagaaaccggcaauccaccauauaccaggguuugaggugcaagaaacuucuaggauucuggacgagucugaagacacggaucucccauaucccccuccgcagcgugaagcaaacauuuauauggucccccagaacauuaagccggcucuacaaagaacugcuauugagauccuugcuugggggcugcgcaacaugaagucauaccaauuagccaacauuucuucaccuucacuggucguugagugugguggacaaaccgugcaguccugugugauaagaaaccuccguaagaacccuaacuuugacaucugcacucuuuucauggaggugaugcucccccgggaggaauuguauuguccucccauaacagugaaaguaaucgacaaucggcaauuuggccggcggccaguagucggacaguguaccauaaggucccuugaaucguuuuugugugacccuuacucugccgaauccccaucaccacagggggggcccgaugacguuaguuuacucagcccaggggaggacguacugauugauauagacgacaaggagccccugaucccaauacaggaggaagaauucaucgacugguggagcaaguuuuucgcaaguauuggagagagggaaaagugugggagcuaucuugagaaggauuuugacacucugaagguguaugauacccaguuagaaaacgucgaagccuuugagggauugucagacuucuguaauacauucaaauuauaccggggcaaaacacaagaagaaaccgaggacccuaguguaauaggagaguuuaaaggacucuuuaagaucuacccgcugccugaggacccugccaucccaaugccuccucggcaguuucaucagcuggcagcccaaggaccacaggagugucuagugcggauuuacauugugcgagcuuuuggacuucagccaaaggauccuaacggaaagugugauccuuauauuaagauaucaaucgggaaaaaguccgucagcgaucaggauaacuacaucccgugcacucuggaaccuguuuuuggaaagauguucgaguugacaugcacucugccgcucgagaaggaucucaaaauuaccuuguaugacuacgaucuacuuuccaaagacgaaaaaauuggugaaaccguggucgaucuggaaaaccggcuuuuaucgaaguuuggagccagaugugggcucccacagacuuauugcgucagcggaccgaaccaguggcgugaucagcugaggcccucccaacuguuacaccuguuuugucagcagcaucgcguuaaagcuccuguguauaggaccgaccgggucauguuucaggauaaggaguacucaaucgaagagauugaagcagggaggauucccaauccccaccuggggccaguagaagaaaggcuugcacuccauguacuccagcagcagggccuggugccagaacacguagagagucgaccuuuguacaguccacugcagccugauaucgaacagggaaaacugcagauguggguagaucuuuuuccuaaagcucugggacgccccggccccccuuuuaauaucacuccccgccgagcaagaagauuuuuccugagauguaucaucuggaacacucgagacgugauacucgaugaccucagccuaacaggggaaaaaaugucugacaucuauguaaaaggcuggaugauaggauucgaggagcauaaacaaaagacugacgugcacuaccgaucccuuggcggcgagggaaauuuuaacuggcgguuuauauucccguuugauuacuugcccgcugagcaaguguguacuauugcuaaaaaggaugccuuuuggcgucuugacaagacugagucuaagauuccagcgagagugguauuucagaucugggacaaugacaaauucaguuucgaugauuuucuggguagucugcaauuagauuugaacagaaugcccaagccugccaagacagccaagaaaugcucacucgaucaacuggacgacgcuuuccauccagaaugguuugucucucuguucgaacagaaaacaguaaaggggugguggccaugugucgcugaggagggcgagaagaaaauacuggccggcaagcuagagaugacacuggaaaucgucgccgaaagcgagcacgaagagagaccggcggggcaggggcgggaugagccuaauaugaacccaaaauuggaagacccccgcagaccugacaccucuuuccugugguuuaccagcccuuauaaaaccaugaaauucauucuguggagaagauuccgcugggcuauuauucuauucauuauucucuuuauacugcuccucuuccuugcaauuuucauuuacgccuucccaaacuaugccgcaaugaaacucgucaaacccuuuucuuag

SEQ ID NO: 48976 - RNA, 6336 nt, Artificial Sequence
  derived and/or modified sequence
augcugagaguguucauuuuauaugccgaaaauguucacacaccagacacugacauaucugaugcauacugcuccgcuguuuucgcuggagugaaaaaaagaaccaagguaauuaaaaacucuguaaauccaguguggaacgaagguuucgaaugggaucuaaaaggcaucccccuugaucaagguucggaauugcaugugguugugaaggaucaugagaccaugggccguaauagauucuugggggaagcuaaggucccauuacgcgagguccucgccaccccaagcuugucggccuccuuuaacgcuccacugcuggauacuaaaaaacagccgacuggggcuagccucguguugcaaguuuccuacacuccucugccaggugcugucccucuguuucccccccccaccccacucgagcccuccccuacgcucccugacuuggauguagucgcaggagggggacagucaagggcugagacuuggagccuccugucagauagcaccauggacacacgcuacucaggaaagaaauggccagcccccaccgacacaggaggagaagaagacaccgaagaucagggguuaaccggagaugaggcggagccauuucuagaccaguccggaggacccggcgcccccacuacaccacggaagcugccaucucgcccaccuccccacuaccccggcauuaaaaggaaaagauccgccccaaccucccguaagcuucucucagacaaaccccaggauuuccagaucagggugcaagugauugaggguaggcaacucccaggaguuaauauaaagccagugguuaaaguuaccgccgcaggacagacuaagcgaacaagaauccacaagggcaacucacccuuauuuaacgagacacucuucuucaaccuguucgauucaccuggcgaacucuuugaugaacccauauuuauuaccguaguugauucucguucacuucgaaccgacgccuuacuuggagaauuucgcauggaugugggcaccaucuaucgcgagccuagacaugcuuaccuccggaaauggcucuugcugucagacccugacgacuucucugcuggugcaagaggguaccugaagaccucacugugugucuuaggcccaggggacgaagcuccucuugagcguaaagauccuuccgaagacaaagaggacauagaaaguaaccugcuccggccuaccgggguugcccucaggggcgcacauuuuugcuugaaaguuuuucgcgccgaagaccucccacagauggaugacgcugucauggacaauguaaaacagaucuucggguucgagucaaauaagaaaaaucugguggacccauuugucgagguguccuuugccggcaaaaugcucugcuccaaaauacuagagaaaacugcuaacccucaguggaaccagaacauaacuuuaccagccauguucccaucuaugugugaaaaaaugaggaucaggaucaucgauugggaucgucuaacccacaaugacauuguagcgacaacauaccucagcaugucuaaaaucagugcccccggcggcgagaucgaggaagagcccgcaggugcaguaaaaccaucgaaggcaucagaucuugaugauuaccugggauuucucccaacguucggucccugcuacaucaaccuuuauggcucgccaagagaauucacuggcuuuccagaccccuacaccgagcucaauaccgguaagggagaaggaguggcauacagaggacgccugcuauuaucucuugagaccaagcucguggagcacagcgagcagaaaguagaagauuuaccugcggaugacauuuuaaggguggaaaaauaccugcggaggaggaaauauagucuguuugcagcguuuuacagcgcuacuaugcuacaggaugucgacgaugcgauccaguuugaaguuaguauugggaauuaugguaauaaauuugacaugacuugucugccucuggcuucuaccacucaguacucaagagcuguuuuugauggcugucauuauuauuaccugccuugggggaacgugaaacccguggugguguugaguuccuacugggaggauaucucucaucggauugaaacacagaaucagcuccugggcaucgccgaccgucuggaggcaggguuggagcagguucaccuggcccuaaaagcgcaauguucuacagaagauguugauucccugguagcacagcugacagacgaacucaucgcuggcugcucacaaccacugggggacauucaugaaacaccuagugcuacacaccuugaucaguaucucuaccaguugcggacccaucaccucucucagauuacugaggccgcucuagcucugaaacuuggccauucagaacuucccgccgcacuagagcaggcugaagacugguuguuaagacugagagcacucgccgaggaaccacagaauagccuccccgauauugugauauggaugcuacagggugacaaaagaguggccuaucaaagagugccagcccaucaaguacuguucagccggcgaggggccaacuacugcgguaagaacuguggcaagcugcaaacaauuuuuuugaaauauccaauggaaaagguuccuggugcacguaugccggugcagauccgcguuaagcuuugguuuggcuugagcgucgacgagaaggaauucaaccaguuugccgaggggaaacugucaguauuugcagaaacauaugaaaaugagacuaaauuagcgcugguagggaacuggggaacaaccggacucacuuauccuaaguucagugacgucaccggaaaaauuaagcugccuaaagacaguuucagaccuagcgcaggauggacgugggcuggagauugguucgucuguccggagaagacucugcugcacgauauggacgcaggacaucucucuuuuguggaagaaguguuugagaaucagacuagacugcccggcggucaguggaucuauaugagcgacaacuauacggacgucaauggagaaaaagugcugccaaaggacgacauugagugucccuuaggguggaaaugggaagacgaagaguggucuacagacuuaaaccgggcuguggacgaacagggaugggaauacucgaucacaaucccaccugaaagaaagcccaagcauugggugcccgcugagaaaauguauuacacacauaggcggaggagauggguaagguugagaagaagagaccuaucccagauggaggcccuuaaaaggcacaggcaggcugaggcugagggugaggggugggaguaugcaucacuuuucgguuggaaguuucaccucgaauauagaaaaacagacgcuuuucggaggcggcgauggcggcgcagaauggaaccgcuggaaaagacagggccagcugcaguauuugcacuggaaggggcccuuggaggcguuauggacgauaagagcgaggauagcaugagcguuucgacccuuucauuuggcguuaacagaccuacuauaaguuguaucuucgauuacggaaauagauaccaccuccgguguuauauguaucaggcuagggaccuggccgcuauggacaaggacuccuucuccgaucccuacgcaaucgugucuuuucugcaccagucucagaaaaccgucguuguuaaaaauacucugaauccaacuugggaccagacccugaucuuuuacgagauugagaucuuuggcgaaccagcuacuguugccgaacagcccccaucaaucguuguggaacuguacgaccacgauacauauggugcugaugaauucaugggcagaugcaucugucaaccuucucucgaacgaaugcccagauuggcuugguuuccccugacucgaggcagccagcccagcggcgaacuccuggcauccuucgagcugauacaacgcgaaaagccugcuauccaucauauaccuggguucgaagugcaggagaccucucggauccuugacgaguccgaagauacggaucuccccuacccucccccucaaagggaggcuaacauauacauggugccucagaacauaaagccugcccugcaacgcacagcaauugaaauucuggccuggggucuucgcaacaugaaaucuuaucagcuggcuaauauuucuuccccuagcuuagucgucgaguguggcggacaaaccguucaaagcugugugauccguaaccugaggaaaaauccuaacuuugauaucugcacgcucuuuauggaagucaugcuccccagagaggagcucuacugccccccaauuaccgugaaaguaauugacaaucgccaauucggacgccgucccguggucggccaaugcacaauacggucucuggagucuuuucuaugugaucccuacuccgccgaguccccuagcccucagggcggcccagacgacgugucccuucucucccccggugaagaugugcuaaucgacauagaugauaaagaaccccuuauccccauucaggaagaagaguuuaucgacugguggucgaaguuuuuugcaaguaucggagagagagagaagugcgggucauaccuugaaaaggauuuugauacacuuaaggucuaugacacccaacuggagaaugucgaagcauuugaggggcugucugacuucugcaacacauuuaaacuguaccgcggaaaaacccaagaggaaacagaagacccuagugugauaggagaauuuaagggccuguuuaagauauacccacugcccgaagaccccgccauccccaugccuccccggcaguuccaccagcuggcagcgcaagggccccaggaaugccuaguuagaaucuacauagugcgcgccuucggccugcagcccaaagauccaaauggcaaaugugauccuuauauuaagaucucuauaggcaaaaaguccgucucagaccaagauaauuauauucccuguacccuggaacccgucuucggaaaaauguucgaacuaacuuguacgcuuccacuugagaaagaccuaaagauuacauuguaugacuacgaucugcucucaaaagacgagaagauuggagaaacugugguugaucuggaaaaccgccuucugucaaaauuuggggcucgauguggauugccccagaccuacugugugucagggccgaaucaguggcgugaucaacugcgcccgucacagcuucugcaccuguuuugucaacaacaucgcguuaaagcacccguguaucggacggacagagugauguuccaagacaaggaguacagcaucgaagagaucgaagccgguagaauuccaaacccacaccuggggccuguugaagaacggcuagcccuucauguguuacaacagcagggucuugugccugagcacguggaaucacgcccacuguauucaccgcugcagccugacaucgagcagggcaaacuucagauguggguugaccuuuuuccgaaagcucugggccggccgggucccccuuuuaauauuacacccagaagagcuaggcgguuuuucuuacgcugcaucauuuggaacacccgugacgucauucuggaugauuuaagccugacuggagagaaaaugagcgauaucuacgugaaagguuggaugauuggguuugaagagcacaaacagaagacagauguucacuaucgcucacugggaggcgaagggaacuucaacuggagguucauuuucccauuugacuaccuacccgccgagcagguuuguaccaucgcuaaaaaggacgccuuuuggagacuugauaaaacagagucaaagauaccggcucgaguggucuuccagauuugggauaacgacaaguuuaguuuugaugauuuucugggaucucugcagcuugauuuaaauaggaugcccaaacccgccaaaacugcaaagaaguguagucuggaccaacuugacgaugccuuucaccccgagugguucgucucucucuuugaacagaagacagugaaagggugguggccgugugucgcagaggaaggugaaaagaaaauccuggcugguaagcuggaaaugacguuagaaauuguggcagaaagcgagcaugaggaacgccccgcugggcaaggacgugacgaacccaacaugaacccuaaguuagaagacccgagaagaccagacaccuccuuccugugguucacaagcccuuacaaaaccaugaaguuuauccucuggcggagauuccggugggccaucauccuguuuaucauucuauuuaucuuguuguuguuucucgccauauucaucuaugccuuccccaauuaugccgcaaugaaacucgucaaacccuuuucuuag

SEQ ID NO: 48977 - protein, 2097 aa, Artificial Sequence
  derived and/or modified sequence
MLRVFILYAENVHTPDTDISDAYCSAVFAGVKKRTKVIKNSVNPVWNEGFEWDLKGIPLDQGSELHVVVKDHETMGRNRFLGEAKVPLREVLATPSLSASFNAPLLDTKKQPTGASLVLQVSYTPLPGAVPLFPPPTPLEPSPTLPDLDVVAGGGQSRAETWSLLSDSTMDTRYSGKKWPAPTDTGGEEDTEDQGLTGDEAEPFLDQSGGPGAPTTPRKLPSRPPPHYPGIKRKRSAPTSRKLLSDKPQDFQIRVQVIEGRQLPGVNIKPVVKVTAAGQTKRTRIHKGNSPLFNETLFFNLFDSPGELFDEPIFITVVDSRSLRTDALLGEFRMDVGTIYREPRHAYLRKWLLLSDPDDFSAGARGYLKTSLCVLGPGDEAPLERKDPSEDKEDIESNLLRPTGVALRGAHFCLKVFRAEDLPQMDDAVMDNVKQIFGFESNKKNLVDPFVEVSFAGKMLCSKILEKTANPQWNQNITLPAMFPSMCEKMRIRIIDWDRLTHNDIVATTYLSMSKISAPGGEIEVDDYLGFLPTFGPCYINLYGSPREFTGFPDPYTELNTGKGEGVAYRGRLLLSLETKLVEHSEQKVEDLPADDILRVEKYLRRRKYSLFAAFYSATMLQDVDDAIQFEVSIGNYGNKFDMTCLPLASTTQYSRAVFDGCHYYYLPWGNVKPVVVLSSYWEDISHRIETQNQLLGIADRLEAGLEQVHLALKAQCSTEDVDSLVAQLTDELIAGCSQPLGDIHETPSATHLDQYLYQLRTHHLSQITEAALALKLGHSELPAALEQAEDWLLRLRALAEEPQNSLPDIVIWMLQGDKRVAYQRVPAHQVLFSRRGANYCGKNCGKLQTIFLKYPMEKVPGARMPVQIRVKLWFGLSVDEKEFNQFAEGKLSVFAETYENETKLALVGNWGTTGLTYPKFSDVTGKIKLPKDSFRPSAGWTWAGDWFVCPEKTLLHDMDAGHLSFVEEVFENQTRLPGGQWIYMSDNYTDVNGEKVLPKDDIECPLGWKWEDEEWSTDLNRAVDEQGWEYSITIPPERKPKHWVPAEKMYYTHRRRRWVRLRRRDLSQMEALKRHRQAEAEGEGWEYASLFGWKFHLEYRKTDAFRRRRWRRRMEPLEKTGPAAVFALEGALGGVMDDKSEDSMSVSTLSFGVNRPTISCIFDYGNRYHLRCYMYQARDLAAMDKDSFSDPYAIVSFLHQSQKTVVVKNTLNPTWDQTLIFYEIEIFGEPATVAEQPPSIVVELYDHDTYGADEFMGRCICQPSLERMPRLAWFPLTRGSQPSGELLASFELIQREKPAIHHIPGFEVQETSRILDESEDTDLPYPPPQREANIYMVPQNIKPALQRTAIEILAWGLRNMKSYQLANISSPSLVVECGGQTVQSCVIRNLRKNPNFDICTLFMEVMLPREELYCPPITVKVIDNRQFGRRPVVGQCTIRSLESFLCDPYSAESPSPQGGPDDVSLLSPGEDVLIDIDDKEPLIPIQEEEFIDWWSKFFASIGEREKCGSYLEKDFDTLKVYDTQLENVEAFEGLSDFCNTFKLYRGKTQEETEDPSVIGEFKGLFKIYPLPEDPAIPMPPRQFHQLAAQGPQECLVRIYIVRAFGLQPKDPNGKCDPYIKISIGKKSVSDQDNYIPCTLEPVFGKMFELTCTLPLEKDLKITLYDYDLLSKDEKIGETVVDLENRLLSKFGARCGLPQTYCVSGPNQWRDQLRPSQLLHLFCQQHRVKAPVYRTDRVMFQDKEYSIEEIEAGRIPNPHLGPVEERLALHVLQQQGLVPEHVESRPLYSPLQPDIEQGKLQMWVDLFPKALGRPGPPFNITPRRARRFFLRCIIWNTRDVILDDLSLTGEKMSDIYVKGWMIGFEEHKQKTDVHYRSLGGEGNFNWRFIFPFDYLPAEQVCTIAKKDAFWRLDKTESKIPARVVFQIWDNDKFSFDDFLGSLQLDLNRMPKPAKTAKKCSLDQLDDAFHPEWFVSLFEQKTVKGWWPCVAEEGEKKILAGKLEMTLEIVAESEHEERPAGQGRDEPNMNPKLEDPRRPDTSFLWFTSPYKTMKFILWRRFRWAIILFIILFILLLFLAIFIYAFPNYAAMKLVKPFS

SEQ ID NO: 48978 - DNA, 6941 bp, Artificial Sequence
  derived and/or modified sequence
gcggccgccgcccagccaggtgcaaaatgccgtgtcattgggagactccgcagccggagcattagattacagctcgacggagctcgggaagggcggcgggggtggaagatgagcagaagcccctgttctcggaacgccggctgacaagcggggtgagcgcagccggggcggggacccagcctagcccactggagcagccgggggtggcccgttcccctttaagagcaactgctctaagccaggagccagagattcgagccggcctcgcccagccagccctctccagcgaggggacccacaagcggcgcctcggccctcccgacctttccgagccctctttgcgccctgggcgcacggggccctacacgcgccaagcatgctgagggtcttcatcctctatgccgagaacgtccacacacccgacaccgacatcagcgatgcctactgctccgcggtgtttgcaggggtgaagaagagaaccaaagtcatcaagaacagcgtgaaccctgtatggaatgagggatttgaatgggacctcaagggcatccccctggaccagggctctgagcttcatgtggtggtcaaagaccatgagacgatggggaggaacaggttcctgggggaagccaaggtcccactccgagaggtcctcgccacccctagtctgtccgccagcttcaatgcccccctgctggacaccaagaagcagcccacaggggcctcgctggtcctgcaggtgtcctacacaccgctgcctggagctgtgcccctgttcccgccccctactcctctggagccctccccgactctgcctgacctggatgtagtggcaggcgggggacagagccgggccgagacttggtccctgctcagtgacagcaccatggacacgagatactctggaaagaagtggccggcccccacggacacaggaggagaggaagacacagaggaccagggactcactggagatgaggcggagccattcctggatcaaagcggaggcccgggggctcccaccaccccaaggaaactaccttcacgtcctccgccccactaccccgggatcaaaagaaagcgaagtgcgcctacatctagaaagctgctgtcagacaaaccgcaggatttccagatcagggtccaggtgatcgaggggcgccagctgccgggggtgaacatcaagcctgtggtcaaggttaccgctgcagggcagaccaagcggacgcggatccacaagggaaacagcccactcttcaatgagactcttttcttcaacttgtttgactctcctggggagctgtttgatgagcccatctttatcacggtggtagactctcgttctctcaggacagatgctctcctcggggagttccggatggacgtgggcaccatttacagagagccccggcacgcctatctcaggaagtggctgctgctctcagaccctgatgacttctctgctggggccagaggctacctgaaaacaagcctttgtgtgctggggcctggggacgaagcgcctctggagagaaaagacccctctgaagacaaggaggacattgaaagcaacctgctccggcccacaggcgtagccctgcgaggagcccacttctgcctgaaggtcttccgggccgaggacttgccgcagatggacgatgccgtgatggacaacgtgaaacagatctttggcttcgagagtaacaagaagaacttggtggacccctttgtggaggtcagctttgcggggaaaatgctgtgcagcaagatcttggagaagacggccaaccctcagtggaaccagaacatcacactgcctgccatgtttccctccatgtgcgaaaaaatgaggattcgtatcatagactgggaccgcctgactcacaatgacatcgtggctaccacctacctgagtatgtcgaaaatctctgcccctggaggagaaatagaagtggatgactacctgggcttcctccccacttttgggccctgctacatcaacctctatggcagtcccagagagttcacaggcttcccagacccctacacagagctcaacacaggcaagggggaaggtgtggcttatcgtggccggcttctgctctccctggagaccaagctggtggagcacagtgaacagaaggtggaggaccttcctgcggatgacatcctccgggtggagaagtaccttaggaggcgcaagtactccctgtttgcggccttctactcagccaccatgctgcaggatgtggatgatgccatccagtttgaggtcagcatcgggaactacgggaacaagttcgacatgacctgcctgccgctggcctccaccactcagtacagccgtgcagtctttgacgggtgccactactactacctaccctggggtaacgtgaaacctgtggtggtgctgtcatcctactgggaggacatcagccatagaatcgagactcagaaccagctgcttgggattgctgaccggctggaagctggcctggagcaggtccacctggccctgaaggcgcagtgctccacggaggacgtggactcgctggtggctcagctgacggatgagctcatcgcaggctgcagccagcctctgggtgacatccatgagacaccctctgccacccacctggaccagtacctgtaccagctgcgcacccatcacctgagccaaatcactgaggctgccctggccctgaagctcggccacagtgagctccctgcagctctggagcaggcggaggactggctcctgcgtctgcgtgccctggcagaggagccccagaacagcctgccggacatcgtcatctggatgctgcagggagacaagcgtgtggcataccagcgggtgcccgcccaccaagtcctcttctcccggcggggtgccaactactgtggcaagaattgtgggaagctacagacaatctttctgaaatatccgatggagaaggtgcctggcgcccggatgccagtgcagatacgggtcaagctgtggtttgggctctcagtggatgagaaggagttcaaccagtttgctgaggggaagctgtctgtctttgctgaaacctatgagaacgagactaagttggcccttgttgggaactggggcacaacgggcctcacctaccccaagttttctgacgtcacgggcaagatcaagctacccaaggacagcttccgcccctcggccggctggacctgggctggagattggttcgtgtgtccggagaagactctgctccatgacatggacgccggtcacctgagcttcgtggaagaggtgtttgagaaccagacccggcttcccggaggccagtggatctacatgagtgacaactacaccgatgtgaacggggagaaggtgcttcccaaggatgacattgagtgcccactgggctggaagtgggaagatgaggaatggtccacagacctcaaccgggctgtcgatgagcaaggctgggagtatagcatcaccatccccccggagcggaagccgaagcactgggtccctgctgagaagatgtactacacacaccgacggcggcgctgggtgcgcctgcgcaggagggatctcagccaaatggaagcactgaaaaggcacaggcaggcggaggcggagggcgagggctgggagtacgcctctctttttggctggaagttccacctcgagtaccgcaagacagatgccttccgccgccgccgctggcgccgtcgcatggagccactggagaagacggggcctgcagctgtgtttgcccttgagggggccctgggcggcgtgatggatgacaagagtgaagattccatgtccgtctccaccttgagcttcggtgtgaacagacccacgatttcctgcatattcgactatgggaaccgctaccatctacgctgctacatgtaccaggcccgggacctggctgcgatggacaaggactctttttctgatccctatgccatcgtctccttcctgcaccagagccagaagacggtggtggtgaagaacacccttaaccccacctgggaccagacgctcatcttctacgagatcgagatctttggcgagccggccacagttgctgagcaaccgcccagcattgtggtggagctgtacgaccatgacacttatggtgcagacgagtttatgggtcgctgcatctgtcaaccgagtctggaacggatgccacggctggcctggttcccactgacgaggggcagccagccgtcgggggagctgctggcctcttttgagctcatccagagagagaagccggccatccaccatattcctggttttgaggtgcaggagacatcaaggatcctggatgagtctgaggacacagacctgccctacccaccaccccagagggaggccaacatctacatggttcctcagaacatcaagccagcgctccagcgtaccgccatcgagatcctggcatggggcctgcggaacatgaagagttaccagctggccaacatctcctcccccagcctcgtggtagagtgtgggggccagacggtgcagtcctgtgtcatcaggaacctccggaagaaccccaactttgacatctgcaccctcttcatggaagtgatgctgcccagggaggagctctactgcccccccatcaccgtcaaggtcatcgataaccgccagtttggccgccggcctgtggtgggccagtgtaccatccgctccctggagagcttcctgtgtgacccctactcggcggagagtccatccccacagggtggcccagacgatgtgagcctactcagtcctggggaagacgtgctcatcgacattgatgacaaggagcccctcatccccatccaggaggaagagttcatcgattggtggagcaaattctttgcctccataggggagagggaaaagtgcggctcctacctggagaaggattttgacaccctgaaggtctatgacacacagctggagaatgtggaggcctttgagggcctgtctgacttttgtaacaccttcaagctgtaccggggcaagacgcaggaggagacagaagatccatctgtgattggtgaatttaagggcctcttcaaaatttatcccctcccagaagacccagccatccccatgcccccaagacagttccaccagctggccgcccagggaccccaggagtgcttggtccgtatctacattgtccgagcatttggcctgcagcccaaggaccccaatggaaagtgtgatccttacatcaagatctccatagggaagaaatcagtgagtgaccaggataactacatcccctgcacgctggagcccgtatttggaaagatgttcgagctgacctgcactctgcctctggagaaggacctaaagatcactctctatgactatgacctcctctccaaggacgaaaagatcggtgagacggtcgtcgacctggagaacaggctgctgtccaagtttggggctcgctgtggactcccacagacctactgtgtctctggaccgaaccagtggcgggaccagctccgcccctcccagctcctccacctcttctgccagcagcatagagtcaaggcacctgtgtaccggacagaccgtgtaatgtttcaggataaagaatattccattgaagagatagaggctggcaggatcccaaacccacacctgggcccagtggaggagcgtctggctctgcatgtgcttcagcagcagggcctggtcccggagcacgtggagtcacggcccctctacagccccctgcagccagacatcgagcaggggaagctgcagatgtgggtcgacctatttccgaaggccctggggcggcctggacctcccttcaacatcaccccacggagagccagaaggtttttcctgcgttgtattatctggaataccagagatgtgatcctggatgacctgagcctcacgggggagaagatgagcgacatttatgtgaaaggttggatgattggctttgaagaacacaagcaaaagacagacgtgcattatcgttccctgggaggtgaaggcaacttcaactggaggttcattttccccttcgactacctgccagctgagcaagtctgtaccattgccaagaaggatgccttctggaggctggacaagactgagagcaaaatcccagcacgagtggtgttccagatctgggacaatgacaagttctcctttgatgattttctgggctccctgcagctcgatctcaaccgcatgcccaagccagccaagacagccaagaagtgctccttggaccagctggatgatgctttccacccagaatggtttgtgtccctttttgagcagaaaacagtgaagggctggtggccctgtgtagcagaagagggtgagaagaaaatactggcgggcaagctggaaatgaccttggagattgtagcagagagtgagcatgaggagcggcctgctggccagggccgggatgagcccaacatgaaccctaagcttgaggacccaaggcgccccgacacctccttcctgtggtttacctccccatacaagaccatgaagttcatcctgtggcggcgtttccggtgggccatcatcctcttcatcatcctcttcatcctgctgctgttcctggccatcttcatctacgccttcccgaactatgctgccatgaagctggtgaagcccttcagctgaggactctcctgccctgtagaaggggccgtggggtcccctccagcatgggactggcctgcctcctccgcccagctcggcgagctcctccagacctcctaggcctgattgtcctgccagggtgggcagacagacagatggaccggcccacactcccagagttgctaacatggagctctgagatcaccccacttccatcatttccttctcccccaacccaacgcttttttggatcagctcagacatatttcagtataaaacagttggaaccaca
